United States Patent Application Publication US 2024/0327476 A1 - sequence listing, part 23

SEQ ID NO: 25579 - DNA, 5605 bp, Homo sapiens
  source 1..5605: mol_type = unassigned DNA
cagtccagcgcccgccgcccgccaccccggaccccggtgtctggcttcccccgagccgggaccccgcgatggccaagcgcagctcgctgtacatccgcatcgtggaggggaagaaccttcccgccaaggacatcactggcagcagcgacccctactgcatcgtgaaggtggacaatgagcccatcatcaggacagccacagtgtggaagaccctgtgccccttctggggtgaggagtaccaagtgcacctgccgcccaccttccacgctgtggctttctatgtcatggatgaggatgccctcagccgggacgacgttatcggaaaggtctgccttacaagggacaccatagcctctcaccctaagggtttcagcgggtgggcccacctgacggaggtcgaccccgatgaggaggtgcagggcgagatccacctgcggctggaagtgtggccaggggcccgggcctgccggctacgctgctctgtgctggaggccagggatctggccccaaaggaccgcaatggcacatctgaccccttcgtccgagtgcgctacaagggccggacacgggagacctcgatcgtgaagaagtcatgctacccacgctggaatgagacgtttgaatttgagctgcaggagggggccatggaggcgctgtgcgtggaggcctgggactgggaccttgtcagccgaaacgacttcctgggcaaagtggtgattgatgtccagagactgcgggtggtgcagcaggaggagggctggttccggctgcagcccgaccagtccaagagccggcggcatgacgagggcaacctgggctccttgcagctggaggtgcggctgcgggacgagacggtgctgccctccagctactaccagccactggtgcacctgctgtgccacgaggtcaagctgggcatgcagggcccagggcagctgatcccactcatcgaggagacaaccagcaccgagtgtcgccaggacgtggccacgaacctgctcaagctcttcctggggcaggggctggccaaggacttcctggacctgctcttccagctggagctgagtcgcaccagtgagaccaacaccctgttccggagcaactctctggcctcaaagtccatggagtcttttctgaaggtggccgggatgcagtacctgcacggcgtcctgggccccatcatcaacaaggtgtttgaggagaagaagtacgtggagctggaccccagcaaagtggaagttaaggatgtagggtgctccgggctgcaccgcccgcagaccgaggccgaggtgctggagcagagcgcgcagacgctgcgcgcccacctgggggccctgctgagcgcgctcagccgctcggttcgcgcgtgccccgccgtggtgcgcgccaccttccgccagctcttccggcgcgtgcgcgagcgcttccccggcgcccagcacgagaatgtaccgttcatcgccgtcaccagcttcctgtgcctgcgcttcttctctcccgccatcatgtcgcccaagctcttccacctgcgggagcgccacgcggacgcccgcaccagccgcaccctgctcctgttggccaaggcagtccagaacgtgggcaacatggacacgccggcttccagggccaaggaggcttggatggagccgctgcagcccaccgtgcgccagggcgtggcgcagctgaaggacttcatcaccaagctcgtggacatcgaggagaaggacgagctggacctgcagcggacgctgagtttgcaggcgccacctgtgaaggaggggccactcttcatccacaggaccaagggcaagggccccctcatgtcctcctccttcaagaagctctacttctccctcactaccgaggccctcagcttcgcgaagacgcccagctccaagaaaagcgccctcatcaagttagccaacatccgggcagcggaaaaggttgaggaaaagagctttggcggctcgcacgtcatgcaggtcatctacacggacgacgccggcaggccccagactgcctacctgcagtgcaagtgtgtgaatgagcttaaccagtggctgtctgcgctgcggaaggtgagcatcaacaacaccggactgctgggctcctaccaccctggcgtcttccgtggggacaagtggagctgctgccaccaaaaagagaagacaggtcagggctgcgataagacccggtcacgggtgaccctgcaggagtggaatgaccctcttgaccatgaccttgaggcccagctcatctaccggcacctgctgggcgtggaggccatgctgtgggagaggcaccgggagctgagcgggggcgcagaggcaggcacggtgcccacgagccctggcaaagtccccgaggactcattggcccggctgctccgggtgctgcaggacctccgcgaggcccatagctccagcccggccggctccccaccctcagagcccaactgcctcctggagctgcagacgtgaggcccgccctacgctccccttgctgagtcccctgccaagcgctcggagcccccccaggacactctgcaccccctcaccccggtcctcctcattagggtgcagggcctaggtctcttccaggtgggggaggggggagagtcaggaataaggggatccccagaagtgcagagctgagcaggcttgggcctgtcatggctggccggaagtgtccccagctccctacagacgctgtagccatcactgcctctccagggaccctcctctcctgcccaggacagacccagccagaaccactgctaggatgggccgcacccaggggtctggcctccagggacctagagaatgggagggagaacggggccccaggagacccggccgccaccccacccgctacccttgggtgccacagggctgtgctgttgccaacagtaaacctgctcttactgtccaggctctggggtcttgtgatgagggtctggggagaaagtgggcccggggggaccccggaggctgtcggtggatgtgccgatgatggggctgacagtatgggctctgggcatccctgttcccccctctttcttccccccactcttctggggtcgggggttcctttcccttcccagttgctgtccctgggtcccctctttcatgtcccacaggccacagagcccagtgtgtccaaccagctgttctctcctcaaagcagcccccaagcaagtcccttctctagggtgtccctgaggacagcacagaggcgggactcagagaccccattcctcttcacgcagcccttaccccaagccctctagctgtgtggctggcagtgttggccacgtaggggctcccatccccccaccattgtgtcacatgggctgccaggctcagctcccagctgcgtccacagtgacctggatcagggtggggacaaggactggaccctccttctccagaaggccttcagctcttgccttgccatgcagtcacctccttccccctctgaccccagatcccaaaggtgcaccgttgccccagcccctttctggccccatggggtttctctgatgccttcatcatagaggcccggggctggtccgatggttggcaaaacttgactccggcccagtccccactcttggggacttagaacccctgctgtcctgggatctggcctgcctttctttggtcagtccctgtggtcccccaccagctccccctcccatagggctgcccaccaagccctgcccccagcccaagaggagcccccactgcctgcggggcagtgatgtctggccaccggctcacaccaatgacttggtcctggggtggcagaagcagcaggtgacaggagcagggcccctgtccctctcttctggccctgtggtacccaggccacacgttgtgcccgctcttggggctgaccggctgtagggaccaccagccgctgctactgtgggccgccccggggcagggtgggcagggcttttgtgggttatgaggacacagaagtccctgaggcccccagacctggctcagccaacctccttcctcccccggttgccccccactctaaagcctcctccctcccagcgtccactggctccaggctcctcacaacagcagctcatagacacggggcgtctccaggtggtcccagccctccagatgtttctagctctccaggtgggcgctgttttcacgtctgcctgcatccattcattccttcattcctcacctttatcctgttatctctatttttttaagctaccaggaaggaaagggaagaagagatcacgaaactgggacccccagaaaggaggagtgggctttgaacttagacatctacctcagagctcaaataggttgtttaaaatcacattcaattttcagatgaaggggaactttatagttttttttttttttttttttttgagacagagtctcactgtgttgcccaggctggagtgcaaatggcttgatcttggttcactgcaacctctgcctcccaggttcaagcaattctcttgcctcagcctcccgagtagctgggactaaaggcgtgtgccaccatgcccagctaattcttgtatttttagtagagacggagtttctccatgttggccagactggtctcgaactcctgacctcaggtgatctgaccgccttggcctccgaaagtgctgagattacagttgcgagccactgtgcgtggccagaactttataataagagacttgaagctgggtgtgacggtgcacacctctagtcccagctactcgggaggccaagacagaaggatcaccttgaggccaggagtttaaggccagcctgggcaacatagcaaaacctagtccctaaaattaaaaaaaaaaaaaaaaaaaaaaggaaaataaaggagacttgaaatttttgaactaaatagtggtgatggctacacattgtgaatgtaattaacaccactgagttaaacacttaaaatggttaaaatggcaaattgtatgttatacctattttactacaataaaaagtataaaaaagagaagatatttaggtgacttacagcaaccaattgcaacaaaacaaaatgttaagaaatgatctttttatgaggcaattggaaatttgaacactgatcaactataggatgattggaattattaatttttaaaggtgtgataagatactgcacttggctgggcacagtggcacatgcctgtaatcccagctacttggcaggctgaggtgggagaatcgcttgagctcaggagttcgagaccagcctgggcaacgtggcgaaatccccgtctttacaaaaacaaacaaacaaacaaaaaagatattgcagttgtgttgtaagcgtccttatctttcagagctacatagtggaatgtttatggaatatttaggataaatgatataggcatttgggatttgctgcaaaatgacccagaggcaggggtcagggggagaggtagagatgagacaagaggtagaggggagaggtagaggtagccacgagctgataattacagacaagagatgcggagtatgtgggggctcattatcctgcatagtctatctttgtatatctttgaacttttcaagaataaaaaagcttaaaaagtata

SEQ ID NO: 25580 - DNA, 2787 bp, Homo sapiens
  source 1..2787: mol_type = unassigned DNA
agtccagcgcccgccgcccgccaccccggaccccggtgtctggcttcccccgagccgggaccccgcgatggccaagcgcagctcgctgtacatccgcatcgtggaggggaagaaccttcccgccaaggacatcactggcagcagcgacccctactgcatcgtgaaggtggacaatgagcccatcatcaggacagccacagtgtggaagaccctgtgccccttctggggtgaggagtaccaagtgcacctgccgcccaccttccacgctgtggctttctatgtcatggatgaggatgccctcagccgggacgacgttatcggaaaggtctgccttacaagggacaccatagcctctcaccctaagggtttcagcgggtgggcccacctgacggaggtcgaccccgatgaggaggtgcagggcgagatccacctgcggctggaagtgtggccaggggcccgggcctgccggctacgctgctctgtgctggaggccagggatctggccccaaaggaccgcaatggcacatctgaccccttcgtccgagtgcgctacaagggccggacacgggagacctcgatcgtgaagaagtcatgctacccacgctggaatgagacgtttgaatttgagctgcaggagggggccatggaggcgctgtgcgtggaggcctgggactgggaccttgtcagccgaaacgacttcctgggcaaagtggtgattgatgtccagagactgcgggtggtgcagcaggaggagggctggttccggctgcagcccgaccagtccaagagccggcggcatgacgagggcaacctgggctccttgcagctggaggtgcggctgcgggacgagacggtgctgccctccagctactaccagccactggtgcacctgctgtgccacgaggtcaagctgggcatgcagggcccagggcagctgatcccactcatcgaggagacaaccagcaccgagtgtcgccaggacgtggccacgaacctgctcaagctcttcctggggcaggggctggccaaggacttcctggacctgctcttccagctggagctgagtcgcaccagtgagaccaacaccctgttccggagcaactctctggcctcaaagtccatggagtcttttctgaaggtggccgggatgcagtacctgcacggcgtcctgggccccatcatcaacaaggtgtttgaggagaagaagtacgtggagctggaccccagcaaagtggaagttaaggatgtagggtgctccgggctgcaccgcccgcagaccgaggccgaggtgctggagcagagcgcgcagacgctgcgcgcccacctgggggccctgctgagcgcgctcagccgctcggttcgcgcgtgccccgccgtggtgcgcgccaccttccgccagctcttccggcgcgtgcgcgagcgcttccccggcgcccagcacgagaatgtaccgttcatcgccgtcaccagcttcctgtgcctgcgcttcttctctcccgccatcatgtcgcccaagctcttccacctgcgggagcgccacgcggacgcccgcaccagccgcaccctgctcctgttggccaaggcagtccagaacgtgggcaacatggacacgccggcttccagggccaaggaggcttggatggagccgctgcagcccaccgtgcgccagggcgtggcgcagctgaaggacttcatcaccaagctcgtggacatcgaggagaaggacgagctggacctgcagcggacgctgagtttgcaggcgccacctgtgaaggaggggccactcttcatccacaggaccaagggcaagggccccctcatgtcctcctccttcaagaagctctacttctccctcactaccgaggccctcagcttcgcgaagacgcccagctccaagtgtgtgaatgagcttaaccagtggctgtctgcgctgcggaaggtgagcatcaacaacaccggactgctgggctcctaccaccctggcgtcttccgtggggacaagtggagctgctgccaccaaaaagagaagacaggtcagggctgcgataagacccggtcacgggtgaccctgcaggagtggaatgaccctcttgaccatgaccttgaggcccagctcatctaccggcacctgctgggcgtggaggccatgctgtgggagaggcaccgggagctgagcgggggcgcagaggcaggcacggtgcccacgagccctggcaaagtccccgaggactcattggcccggctgctccgggtgctgcaggacctccgcgaggcccatagctccagcccggccggctccccaccctcagagcccaactgcctcctggagctgcagacgtgaggcccgccctacgctccccttgctgagtcccctgccaagcgctcggagcccccccaggacactctgcaccccctcaccccggtcctcctcattagggtgcagggcctaggtctcttccaggtgggggaggggggagagtcaggaataaggggatccccagaagtgcagagctgagcaggcttgggcctgtcatggctggccggaagtgtccccagctccctacagacgctgtagccatcactgcctctccagggaccctcctctcctgcccaggacagacccagccagaaccactgctaggatgggccgcacccaggggtctggcctccagggacctagagaatgggagggagaacggggccccaggagacccggccgccaccccacccgctacccttgggtgccacagggctgtgctgttgccaacagtaaacctgctcttactg

SEQ ID NO: 25581 - DNA, 3569 bp, Homo sapiens
  source 1..3569: mol_type = unassigned DNA
tgtttgagaggagggggtagctgggaggggcagcaggagatgccaggaacagcttcccctagcacagcacagactacagacaggggagcctctggggctgcagacactgcagacggacggacagacagatggacaacagctggaggcttggcccggccatagggctctctgcgggacagtcccagctgctagtgtcgctgttgctgctactgacccgtgtccagcctgggacagacgtggctgccccagagcacatcagctatgtgccccagctctcaaacgacaccttggcggggaggctcaccctgtccaccttcacgctggagcagcctctaggccagttcagcagccacaacatctctgacttggataccatctggctggtggtggccctcagcaacgccacccagagcttcacggccccacggacaaaccaggacatccctgctcctgccaacttctcccagaggggctactatctcacactgagggccaaccgggtgctgtaccagaccagaggccagctccatgtcctccgcgtcggcaatgatacccactgccaaccaacaaaaattggctgcaaccatcccctaccaggacccggcccctacagggtgaagttcctggtgatgaatgacgaaggacccgtggctgaaaccaagtggtccagcgacactcgcctgcagcaagcccaggcacttcgggctgtccccggcccccagagcccgggcaccgtggtcatcatcgccatcctgtctatcctcctggccgtcctcctcacggtcctcctggctgtgctcatatacacctgccccagctcttctccttcaagcccagctcaggtgccgcctcttccaggaagccccctgggaccatctccagtctcagtgggagcagtgtgtccttggttgctcccagagtctatagcagagatctggacccaagactctggactcccggctttgggctggcagcactggcagcagcgacccctactgcatcgtgaaggtggacaatgagcccatcatcaggacagccacagtgtggaagaccctgtgccccttctggggtgaggagtaccaagtgcacctgccgcccaccttccacgctgtggctttctatgtcatggatgaggatgccctcagccgggacgacgttatcggaaaggtctgccttacaagggacaccatagcctctcaccctaagggtttcagcgggtgggcccacctgacggaggtcgaccccgatgaggaggtgcagggcgagatccacctgcggctggaagtgtggccaggggcccgggcctgccggctacgctgctctgtgctggaggccagggatctggccccaaaggaccgcaatggcacatctgaccccttcgtccgagtgcgctacaagggccggacacgggagacctcgatcgtgaagaagtcatgctacccacgctggaatgagacgtttgaatttgagctgcaggagggggccatggaggcgctgtgcgtggaggcctgggactgggaccttgtcagccgaaacgacttcctgggcaaagtggtgattgatgtccagagactgcgggtggtgcagcaggaggagggctggttccggctgcagcccgaccagtccaagagccggcggcatgacgagggcaacctgggctccttgcagctggaggtgcggctgcgggacgagacggtgctgccctccagctactaccagccactggtgcacctgctgtgccacgaggtcaagctgggcatgcagggcccagggcagctgatcccactcatcgaggagacaaccagcaccgagtgtcgccaggacgtggccacgaacctgctcaagctcttcctggggcaggggctggccaaggacttcctggacctgctcttccagctggagctgagtcgcaccagtgagaccaacaccctgttccggagcaactctctggcctcaaagtccatggagtcttttctgaaggtggccgggatgcagtacctgcacggcgtcctgggccccatcatcaacaaggtgtttgaggagaagaagtacgtggagctggaccccagcaaagtggaagttaaggatgtagggtgctccgggctgcaccgcccgcagaccgaggccgaggtgctggagcagagcgcgcagacgctgcgcgcccacctgggggccctgctgagcgcgctcagccgctcggttcgcgcgtgccccgccgtggtgcgcgccaccttccgccagctcttccggcgcgtgcgcgagcgcttccccggcgcccagcacgagaatgtaccgttcatcgccgtcaccagcttcctgtgcctgcgcttcttctctcccgccatcatgtcgcccaagctcttccacctgcgggagcgccacgcggacgcccgcaccagccgcaccctgctcctgttggccaaggcagtccagaacgtgggcaacatggacacgccggcttccagggccaaggaggcttggatggagccgctgcagcccaccgtgcgccagggcgtggcgcagctgaaggacttcatcaccaagctcgtggacatcgaggagaaggacgagctggacctgcagcggacgctgagtttgcaggcgccacctgtgaaggaggggccactcttcatccacaggaccaagggcaagggccccctcatgtcctcctccttcaagaagctctacttctccctcactaccgaggccctcagcttcgcgaagacgcccagctccaagaaaagcgccctcatcaagttagccaacatccgggcagcggaaaaggttgaggaaaagagctttggcggctcgcacgtcatgcaggtcatctacacggacgacgccggcaggccccagactgcctacctgcagtgcaagtgtgtgaatgagcttaaccagtggctgtctgcgctgcggaaggtgagcatcaacaacaccggactgctgggctcctaccaccctggcgtcttccgtggggacaagtggagctgctgccaccaaaaagagaagacaggtcagggctgcgataagacccggtcacgggtgaccctgcaggagtggaatgaccctcttgaccatgaccttgaggcccagctcatctaccggcacctgctgggcgtggaggccatgctgtgggagaggcaccgggagctgagcgggggcgcagaggcaggcacggtgcccacgagccctggcaaagtccccgaggactcattggcccggctgctccgggtgctgcaggacctccgcgaggcccatagctccagcccggccggctccccaccctcagagcccaactgcctcctggagctgcagacgtgaggcccgccctacgctccccttgctgagtcccctgccaagcgctcggagcccccccaggacactctgcaccccctcaccccggtcctcctcattagggtgcagggcctaggtctcttccaggtgggggaggggggagagtcaggaataaggggatccccagaagtgcagagctgagcaggcttgggcctgtcatggctggccggaagtgtccccagctccctacagacgctgtagccatcactgcctct

SEQ ID NO: 25582 - DNA, 3382 bp, Homo sapiens
  source 1..3382: mol_type = unassigned DNA
gtgtttaactggaaactagaacgagatggaaggggatgttcaaggcccctcccttgactctgaacggacccccagggaacatgcgaccctctctctggcgacgcctcccacccaccactaatacttgctcctggaccggggggcgcggaggttggagagaggaggcaggtgtctgcatgctacccgggtctcggacaggcggcactgggaccacgaggcagggagccaggcttgaagcaggtgacatgtagacgtcccctggtccagcctcggaacctgagcgcccttctgcctggaaagtttgtggctaggcgccatggccaagagcagctccctgaatgttcgcgtggtggagggccgcgcgctgcctgccaaggacgtgtctgggagcagcgacccctactgcctagtgaaagtggacgacgaggtggtggccaggacagctactgtctggaggagcctgggccccttctggggggaggagtacacggtgcacctgcctctggatttccaccagctggccttctacgtgctggatgaggacactgtcgggcacgacgacatcatcggcaagatctcgctgagcagggaggcgattacagccgacccccgagggattgacagctggattaacttgagccgagtggacccagatgcagaagtgcagggtgagatctgcctgtcagtgcagatgctggaggatgggcagggccgctgccttcgctgccatgtgcttcaggccagggacctggctcccagagacatctctggcacatctgacccatttgcacgtgtgttttggggcagccagagcttggagacctcaaccatcaagaagactcgcttcccgcactgggatgaagtgctggagctgcgggagatgccaggtgccccgtccccactgcgggtggagctctgggactgggacatggtgggcaagaatgacttcttgggcatggtggagttctctccaaagaccctccagcagaagccacctaaaggctggttccgcctcctgccctttcccagagccgaggaggattctggggggaacctgggtgccctgcgagtgaaggtacgcctgattgaggaccgcgtcctgccctcccagtgctaccagcctctcatggagctgctcatggagtctgtgcaggggccagcagaggaggacactgctagccccttggctttgctggaagagctgaccttgggggactgccgccaggaccttgccaccaagctggtgaaactctttcttggccggggactggctgggcgctttctggactatctcacccggcgtgaggtggctcggaccatggaccccaacaccctcttccgttctaactccctggcatccaagtcgatggaacagtttatgaagctcgtgggcatgccctacctgcacgaggtcctgaagcctgtgattagccgtgtctttgaggagaagaagtacatggagctggatccctgcaagatggacctgggccgcacccggaggatctccttcaaaggcgcactctcggaggagcagatgcgggagaccagcctggggctgctgacgggctacctggggcccatcgtggacgccatcgtgggctccgtggggcgctgcccgcccgccatgcgcctcgccttcaagcagctgcaccggcgagtggaggagcgcttcccccaggccgagcaccaggatgtgaagtacctggccatcagtggatttctcttcttgcgattcttcgcacctgccatccttaccccaaagctgtttgaccttcgggaccaacacgcggacccccagactagccgctcactgctgttgcttgccaaggctgtgcagagcattggaaacctgggccagcagctgggccaaggcaaggaactgtggatggcccccctgcaccccttcctgctgcagtgtgtctcacgtgtgagagacttcctggaccggctggtggatgtggatggggatgaagctggtgtcccagccagggccctgttcccgccctcggccattgttcgagaaggctatctgctgaagcgcaaggaggagcctgccggcctggccacgcgctttgccttcaagaagcgctacgtctggctcagcggggagaccctctccttctccaagagtcctgagtggcagatgtgtcactccatccccgtgtctcacatccgcgccgtggagcgcgtagacgagggcgccttccaactgccccacgtgatgcaggtggtgacgcaggacggcacgggggcgctgcacaccacctacctccagtgcaagaatgtgaatgagctcaaccagtggctctcggccttgcgcaaggccagcgcccccaacccgaacaagctggccgcctgccaccccggtgccttccgcagcgcgcgctggacctgctgcctccaggctgagcgctcagccgccggctgcagccgtacacactcagctgtcaccctgggggactggagtgacccactggatcctgatgctgaggcccagacagtgtatcggcagctgctcctggggcgggaccagctcaggctgaaattactggaggattctaacatggatacaactctggaggcagacacaggggcctgtcctgaggtcctggcccggcaaagagcagcaactgcccgcctgctggaggtgctcgcagacctggatcgtgcccacgaggagttccagcagcaggagcgagggaaggcggccctgggcccccttggcccctaaggaaatgccagagctagcccggaaggaggagcaagagccagggggccctcttcagcgcatcctgccccgggagtctcctgtctccttggacctctttgattctgtggtttggaggctcccagagacgtgcctagtcctgtgtgccttgagtccagaactcagggcatggaagccctttggcaggggccagccttgcactgagtgaaacttgccctctggcttgattcagactggagtggataggataaggaacctgacttatttgactgagactggggtctctacttcaccaaactggcctctatccataccaaggaggccagcctggccctgagctgctggatacagctggacctgaattcctgatgcccatgtgatgttgttgccccagatgggcactaaatggcctcactccttcctgttttcatgtctgctaatccctataacctcactgattcttctgtaccctgcccttggcctaggactccaaccacaagcttccagaatcaggtgccctcaggaagaaccaaggctgggtgggggtccagtgtgccaaactcagacccttggagcctgggagaccttgggccaggctgtttatctctctctgggtctcagattaccctgtataaaaagaggagggaaagtcta

SEQ ID NO: 25583 - DNA, 3040 bp, Homo sapiens
  source 1..3040: mol_type = unassigned DNA
ttgtctggagctccagacgcctcggcaagagcccgctgcgccccctgcgcgctcctcctgctcggagcacggctcctacctgtagagtccggacgggcgctccctccccgggcacctacaccttctcctctttcggaaatctcccatccagctacccgggtctcggacaggcggcactgggaccacgaggcagggagccaggcttgaagcaggtgacatgtagacgtcccctggtccagcctcggaacctgagcgcccttctgcctggaaagtttgtggctaggcgccatggccaagagcagctccctgaatgttcgcgtggtggagggccgcgcgctgcctgccaaggacgtgtctgggagcagcgacccctactgcctagtgaaagtggacgacgaggtggtggccaggacagctactgtctggaggagcctgggccccttctggggggaggagtacacggtgcacctgcctctggatttccaccagctggccttctacgtgctggatgaggacactgtcgggcacgacgacatcatcggcaagatctcgctgagcagggaggcgattacagccgacccccgagggattgacagctggattaacttgagccgagtggacccagatgcagaagtgcagggtgagatctgcctgtcagtgcagatgctggaggatgggcagggccgctgccttcgctgccatgtgcttcaggccagggacctggctcccagagacatctctggcacatctgacccatttgcacgtgtgttttggggcagccagagcttggagacctcaaccatcaagaagactcgcttcccgcactgggatgaagtgctggagctgcgggagatgccaggtgccccgtccccactgcgggtggagctctgggactgggacatggtgggcaagaatgacttcttgggcatggtggagttctctccaaagaccctccagcagaagccacctaaaggctggttccgcctcctgccctttcccagagccgaggaggattctggggggaacctgggtgccctgcgagtgaaggtacgcctgattgaggaccgcgtcctgccctcccagtgctaccagcctctcatggagctgctcatggagtctgtgcaggggccagcagaggaggacactgctagccccttggctttgctggaagagctgaccttgggggactgccgccaggaccttgccaccaagctggtgaaactctttcttggccggggactggctgggcgctttctggactatctcacccggcgtgaggtggctcggaccatggaccccaacaccctcttccgttctaactccctggcatccaagtcgatggaacagtttatgaagctcgtgggcatgccctacctgcacgaggtcctgaagcctgtgattagccgtgtctttgaggagaagaagtacatggagctggatccctgcaagatggacctgggccgcacccggaggatctccttcaaaggcgcactctcggaggagcagatgcgggagaccagcctggggctgctgacgggctacctggggcccatcgtggacgccatcgtgggctccgtggggcgctgcccgcccgccatgcgcctcgccttcaagcagctgcaccggcgagtggaggagcgcttcccccaggccgagcaccaggatgtgaagtacctggccatcagtggatttctcttcttgcgattcttcgcacctgccatccttaccccaaagctgtttgaccttcgggaccaacacgcggacccccagactagccgctcactgctgttgcttgccaaggctgtgcagagcattggaaacctgggccagcagctgggccaaggcaaggaactgtggatggcccccctgcaccccttcctgctgcagtgtgtctcacgtgtgagagacttcctggaccggctggtggatgtggatggggatgaagctggtgtcccagccagggccctgttcccgccctcggccattgttcgagaaggctatctgctgaagcgcaaggaggagcctgccggcctggccacgcgctttgccttcaagaagcgctacgtctggctcagcggggagaccctctccttctccaagagtcctgagtggcaggtggtgacgcaggacggcacgggggcgctgcacaccacctacctccagtgcaagaatgtgaatgagctcaaccagtggctctcggccttgcgcaaggccagcgcccccaacccgaacaagctggccgcctgccaccccggtgccttccgcagcgcgcgctggacctgctgcctccaggctgagcgctcagccgccggctgcagccgtacacactcagctgtcaccctgggggactggagtgacccactggatcctgatgctgaggcccagacagtgtatcggcagctgctcctggggcgggaccagctcaggctgaaattactggaggattctaacatggatacaactctggaggcagacacaggggcctgtcctgaggtcctggcccggcaaagagcagcaactgcccgcctgctggaggtgctcgcagacctggatcgtgcccacgaggagttccagcagcaggagcgagggaaggcggccctgggcccccttggcccctaaggaaatgccagagctagcccggaaggaggagcaagagccagggggccctcttcagcgcatcctgccccgggagtctcctgtctccttggacctctttgattctgtggtttggaggctcccagagacgtgcctagtcctgtgtgccttgagtccagaactcagggcatggaagccctttggcaggggccagccttgcactgagtgaaacttgccctctggcttgattcagactggagtggataggataaggaacctgacttatttgactgagactggggtctctacttcaccaaactggcctctatccataccaaggaggccagcctggccctgagctgctggatacagctggacctgaattcctgatgcccatgtgatgttgttgccccagatgggcactaaatggcctcactccttcctg

SEQ ID NO: 25584 - DNA, 3817 bp, Homo sapiens
  source 1..3817: mol_type = unassigned DNA
ctagaacgagatggaaggggatgttcaaggcccctcccttgactctgaacggacccccagggaacatgcgaccctctctctggcgacgcctcccacccaccactaatacttgctcctggaccggggggcgcggaggttggagagaggagctacccgggtctcggacaggcggcactgggaccacgaggcagggagccaggcttgaagcaggtgacatgtagacgtcccctggtccagcctcggaacctgagcgcccttctgcctggaaagtttgtggctaggcgccatggccaagagcagctccctgaatgttcgcgtggtggagggccgcgcgctgcctgccaaggacgtgtctgggagcagcgacccctactgcctagtgaaagtggacgacgaggtggtggccaggacagctactgtctggaggagcctgggccccttctggggggaggagtacacggtgcacctgcctctggatttccaccagctggccttctacgtgctggatgaggacactgtcgggcacgacgacatcatcggcaagatctcgctgagcagggaggcgattacagccgacccccgagggattgacagctggattaacttgagccgagtggacccagatgcagaagtgcagggtgagatctgcctgtcagtgcagatgctggaggatgggcagggccgctgccttcgctgccatgtgcttcaggccagggacctggctcccagagacatctctggcacatctgacccatttgcacgtgtgttttggggcagccagagcttggagacctcaaccatcaagaagactcgcttcccgcactgggatgaagtgctggagctgcgggagatgccaggtgccccgtccccactgcgggtggagctctgggactgggacatggtgggcaagaatgacttcttgggcatggtggagttctctccaaagaccctccagcagaagccacctaaaggctggttccgcctcctgccctttcccagagccgaggaggattctggggggaacctgggtgccctgcgagtgaaggtacgcctgattgaggaccgcgtcctgccctcccagtgctaccagcctctcatggagctgctcatggagtctgtgcaggggccagcagaggaggacactgctagccccttggctttgctggaagagctgaccttgggggactgccgccaggaccttgccaccaagctggtgaaactctttcttggccggggactggctgggcgctttctggactatctcacccggcgtgaggtggctcggaccatggaccccaacaccctcttccgttctaactccctggcatccaagtcgatggaacagtttatgaagctcgtgggcatgccctacctgcacgaggtcctgaagcctgtgattagccgtgtctttgaggagaagaagtacatggagctggatccctgcaagatggacctgggccgcacccggaggatctccttcaaaggcgcactctcggaggagcagatgcgggagaccagcctggggctgctgacgggctacctggggcccatcgtggacgccatcgtgggctccgtggggcgctgcccgcccgccatgcgcctcgccttcaagcagctgcaccggcgagtggaggagcgcttcccccaggccgagcaccagcaggatgtgaagtacctggccatcagtggatttctcttcttgcgattcttcgcacctgccatccttaccccaaagctgtttgaccttcgggaccaacacgcggacccccagactagccgctcactgctgttgcttgccaaggctgtgcagagcattggaaacctgggccagcagctgggccaaggcaaggaactgtggatggcccccctgcaccccttcctgctgcagtgtgtctcacgtgtgagagacttcctggaccggctggtggatgtggatggggatgaagaagctggtgtcccagccagggccctgttcccgccctcggccattgttcgagaaggctatctgctgaagcgcaaggaggagcctgccggcctggccacgcgctttgccttcaagaagcgctacgtctggctcagcggggagaccctctccttctccaagagtcctgagtggcagatgtgtcactccatccccgtgtctcacatccgcgccgtggagcgcgtagacgagggcgccttccaactgccccacgtgatgcaggtggtgacgcaggacggcacgggggcgctgcacaccacctacctccagtgcaagaatgtgaatgagctcaaccagtggctctcggccttgcgcaaggccagcgcccccaacccgaacaagctggccgcctgccaccccggtgccttccgcagcgcgcgctggacctgctgcctccaggctgagcgctcagccgccggctgcagccgtacacactcagctgtcaccctgggggactggagtgacccactggatcctgatgctgaggcccagacagtgtatcggcagctgctcctggggcgggaccagctcaggctgaaattactggaggattctaacatggatacaactctggaggcagacacaggggcctgtcctgaggtcctggcccggcaaagagcagcaactgcccgcctgctggaggtgctcgcagacctggatcgtgcccacgaggagttccagcagcaggagcgagggaaggcggccctgggcccccttggcccctaaggaaatgccagagctagcccggaaggaggagcaagagccagggggccctcttcagcgcatcctgccccgggagtctcctgtctccttggacctctttgattctgtggtttggaggctcccagagacgtgcctagtcctgtgtgccttgagtccagaactcagggcatggaagccctttggcaggggccagccttgcactgagtgaaacttgccctctggcttgattcagactggagtggataggataaggaacctgacttatttgactgagactggggtctctacttcaccaaactggcctctatccataccaaggaggccagcctggccctgagctgctggatacagctggacctgaattcctgatgcccatgtgatgttgttgccccagatgggcactaaatggcctcactccttcctgttttcatgtctgctaatccctataacctcactgattcttctgtaccctgcccttggcctaggactccaaccacaagcttccagaatcaggtgccctcaggaagaaccaaggctgggtgggggtccagtgtgccaaactcagacccttggagcctgggagaccttgggccaggctgtttatctctctctgggtctcagattaccctgtataaaaagaggagggaaagtctagatgtgtggttttcaaactggattccaatgaggtagttcaagaacaagggaggagtttctctgactgtgggccaaagaccacccgctagaatgtctgctagaaatgcagatttctgaggcccagccagctactgactcagaatctgagggtatatgaaggcaagaatcagggttatttaacagattccgtaggtcatttggatgagtatcagctttgaggaccacaggcctggggaatgggcaattttattttattttgtttttagagttgggggtctcactctgttgcccaggctgcagtacagtggcatgatcataggtcagtgcaccctcaaacttctggacttcagtgatcctcccacgttagcctccagagcagctgcgactacaggtgcaagccatcacgcctggctaatttttaaatttttgtagagatggggggtctcactatgttgccca

SEQ ID NO: 25585 - DNA, 8167 bp, Homo sapiens
  source 1..8167: mol_type = unassigned DNA
agctgggccatggccgcgaggcaggggtgagaccggcggccacccgtgagccctccgcacccgcaccatgcagaagagcgtgcgctacaacgaggggcacgccctgtacctggcctttctggcgcgcaaggagggcaccaagcgcggcttcctgagtaagaagacggccgaggcgagccgctggcacgagaagtggttcgccctctaccagaatgtgctcttctacttcgagggcgagcagagctgccgcccggcgggcatgtacctcctggagggctgcagctgcgaacgaacgcccgcgccacccagggccggcgccgggcagggaggcgtccgagacgcgctggacaagcagtattactttactgttctttttggccatgaaggtcagaagccactggagctgcgctgtgaggaggagcaggatggtaaagagtggatggaggccattcaccaagccagttatgcagacattttgattgagagggaagtattaatgcagaagtacattcatctagttcagatcgtagagacagaaaaaattgcagctaaccaactccgacatcaacttgaagatcaagacacagaaatcgaaaggcttaaatcagagattattgctcttaataaaaccaaagaacgaatgcgaccttaccaaagcaaccaagaagacgaagatccagacatcaagaagattaaaaaggttcagagcttcatgcgaggatggttgtgcagaaggaaatggaagaccatcgtgcaggattacatttgttctcctcatgctgaaagtatgaggaagagaaaccagattgtgttcaccatggtggaggcagagtcagagtacgttcaccagctctacatcctggtcaatggctttctccggcccctgcgtatggccgccagctccaagaagccccccatcagccacgacgacgtcagcagtatttttcttaacagtgaaacaatcatgtttcttcatgaaatatttcatcaaggactaaaggcaaggatagcaaactggcccactttaattttagctgatctgtttgatattttgctccccatgctgaacatttatcaagaatttgtgcgtaatcaccagtacagcctgcaagttctcgccaattgtaagcaaaacagagattttgacaaactcttaaaacagtatgaagccaatccagcctgtgaggggaggatgctggagacattcttgacctatcccatgtttcagatccccagatatatcatcacactccatgagctccttgctcacacaccccatgagcatgtggaaaggaaaagcctggagtttgccaaatcaaagctagaggaactatccagagtaatgcacgatgaagtcagcgacactgaaaacataaggaaaaaccttgccatcgaaagaatgatcgtggagggctgtgacatcttgctggacaccagccaaacgttcatccgccaaggttctcttattcaagtaccttccgttgagagggggaaacttagtaaagttcgcctgggttcgttgtctttgaaaaaggaaggagagagacaatgcttcttatttacaaaacactttttaatatgtacaagaagttcaggagggaagcttcatctgctcaagacaggtggggttctgtctctaatagactgcacattgattgaggagccagatgcaagcgatgatgactctaaaggttctgggcaagtgtttgggcacctggattttaaaatagtggtggagcctcctgacgctgccgccttcactgttgtcttgttagcaccctcacgccaggagaaagctgcctggatgagtgacatcagtcagtgtgtggacaatatacgatgtaatggtttaatgactatagtgtttgaagagaattccaaagtcactgtgccacatatgattaagtctgatgcccgtcttcataaagacgacactgacatttgcttcagtaaaacactcaactcctgcaaagtgccccagatccgttatgccagcgtggagcgcctcttggaacgactgacagacttgcggtttcttagtattgatttcctcaacacctttctgcacacctatcgtattttcactactgccgctgtggtgctggggaaactctccgacatatacaagaggcctttcacctccatccctgtcaggtcattggaattgttttttgctaccagccagaacaacagaggtgaacatttggtggatggcaaatccccacgtctgtgtcgcaaattctcttccccgccaccactggctgtgtccagaacatcttccccagtgagggccagaaagctgtctttgacttctcccttgaactcaaagataggagcattggacctgacaacttccagcagtcccaccaccaccacccagagtcccgctgcgtctccaccaccacacactggtcagataccactggatctcagcagaggcctctcttctccagagcaaagcccgggaacggtagaagagaatgtcgataacccacgcgtggatctgtgtaacaagctaaaacgaagtattcaaaaagcagtcctagagtctgcaccagcggaccgagcaggagtggaaagctcccctgcagcggacaccacagaactttcaccttgcagatccccctcaactcctcggcacctccgctatcgacagcctggaggacagacggcggacaatgcccactgctctgtttcaccggcttctgcttttgcaatagccacagctgcagcaggacatgggagtccaccaggctttaacaacaccgagagaacatgtgataaagagtttattatacggagaacggctaccaatcgagttctgaacgtcctccgtcactgggtctcaaagcacgcacaggatttcgaactcaacaatgaactaaagatgaatgtcctaaatttgctagaagaagttttgcgagacccagaccttcttccccaagaaaggaaagccgccgcgaatatcctcagggccctttcacaagatgaccaagatgacatccacctaaaattagaggatataattcaaatgactgactgcatgaaggccgaatgctttgagtccttgtcggccatggagctggcagaacagatcaccctcctggaccatgtcattttcagaagcattccctacgaggagtttcttgggcaggggtggatgaagctggataaaaacgaaagaactccttacattatgaaaaccagccaacacttcaatgacatgagtaacctggtggcctcccagataatgaactatgctgatgtcagctcccgtgccaacgccatcgagaaatgggtggcagtggcggacatctgccgatgcctgcacaactacaacggcgtgctggagatcacctcggccttaaacagaagtgccatctacaggctgaagaaaacctgggccaaggtctctaagcagacaaaagctctaatggacaaacttcaaaagactgtttcctctgaaggaagatttaaaaatcttagagaaacccttaaaaattgtaaccctcctgcagttccttatcttgggatgtacttgacagacctggcatttattgaagaaggaacaccaaactttactgaggaaggccttgtcaatttctccaaaatgagaatgatatcacacatcatcagagagatacgccagttccagcagacttcctacagaatagatcatcagccaaaggtcgcacagtacttgcttgacaaagaccttatcatagatgaagatacgctatatgagctgtcactaaaaattgaacctcgactccctgcttgaagatctggccttgcccctgagtccacgggatgttcatggaaagcaggacagacagaattgtgtatgccttgcctatcacggtacagcacgaagccaggctcctttctccaccaaagaagatggaaccagactggaattctgtctccagagagaaacccagctgtttgggtcaaagacagatgcttcagacttgggtgggaaggtgaaagatggctatttagaaagctggtggcacgttttacataagggaatgtcagatgggagatgctagttgccattttaacaaagcaggtaaatcggtaaattttaaactctgtccatgttctgttagaactcagggacaaggatccatgaaaaagacctgtgatgtttctctggcgctttactggcctgggcacacctaccaatcttctaggatttgactggttccattacatttccttttggtataagcttcacagaaaagctgacacttcctctacagagatggaccaaaacataagcaatttcagtctacagcatgtgcatggttgtcagtgcattctaaatatttctatgtgaggaatggtaccttctgaaactgcctttccagtctttaggcaatgggataggaaagaaagaatgaaacacaaatggatttgtatgtaacatttccttaattaaatgcagtaggctgtgccccagaggattccagacagtggctggctgaggtgggtggggagcttttccttgagactgttggtcctaagaagccagcccttttggagaggcagctgcaaaaaggtgcacgcccatctcaccgacaaaactgtggaacagaaggccaccaagtgctgtggggaatcatgggtttcagtgctgagtgaaaatctatacctaaaaatcatctctgcaccttgctttgtttgttttctttccccactcatagtactgcaggaatctattctcatttacacagacctttttttaggcttactatgaacattggctgtattttttttaaacagtttagtgaaattttcttttcaaaacccacacttccatatgctgttcgtagatctctttctttaaaaactgatgttgagagatctctgagaatattataagtgcatgggaaatgggcccaaccaccgaacagctcttacattacaaaaccaaatgcaagggttagtcctgctacctgaggctggggaagtgaccttccttttcccaagattgtcagttgttgaagaaatagggctatctcattgtttacctccctcttctcttctcagggagactgctgctttaaaagaaggaagagaaaaaatatagttctatttccctgaacctgttgcacctgacattttctcttagcagcatgaaacttattgatgctgacaatgaaaaatggatctgtctggctgctttccctctttccttgcactttaattatgttgctagagctaacagactaataaattccacctgctggctcttaagactcagtgaaagagctagcattggtaatgcaccatagaggtagagaatgtacactttctgcacggtaagtgccatctctgtatgtaactatatagtgaaatatcaactaagtaaaagaaaatataatatttgaagaccattcccaaaatattttcaatagttcatattagccaacagtgtagcactcaacccaaggagggttccttatggatgctttctttttcttttttaaagttgcttgtttgttctctttagtttcaaataagaggttgacgcatcttgatgcatgatgagaagcatgggctgtttggatcctaacaacgcataacttgtgatttatttctcagtgctccagaaactgagggtttgaaataatatgtatcagttgcaccaaacacctcaaggtcttgcagaagaaaagtaaaggttagctttcatggctcaaaagcatagtcctgaagggtgaactaaaaccgggacaaatctgtgagaggaccacacacatactagtttcgggccaaacaacacgtggaaaggtgcatgcattctactctgccttggagttgccagagtccttcagagggaaagggatggttctgtgtgcactttttctggaagttcggactcatttctttgacccaaatgttccagagacactgcagccattcttattaacaaaaaataagacaggagtttccaaatgctccttcccttttggatcgcagcttttcttcaactagtgacaaagcttttgcgcctatttcctgcaggatgttggaactgccccgcactggtcatattaggcactgtcaattgctatgctgacttttagggggtttttgtttgtttgaaaaacagggtctcaccatgttgcccaggctggtctcgaactcctggactcaagcaatcttcctgcctcagcctctcaagcagctgggactgcaggggtgtgccactcactagcctttcgcatttttgtttgagaattacaccactttctggagtctgcagccttcctggagctgcaagagggcaagagagagagctccacctctgagggagtgtctgttgatgacctgcactattcgtgtgccagctgggagaggaatgcacattttaaaatcccttcaatttggtcaaattaaaaatccccaagagcaatttgcagtgttttttctggtcgttaaagtacccatcctcttctgcctacacacaaagcatgcattcccagctgcatctgcctctagtccattatggagacccatttctaagaggagatgggaggtcaacctctaacagccaagtagcgaacatgtatactgtaaaattaacctagaaaatcagaagaaaaatccaatttcatgctttcgaatgaatgcccacattttgtactgtcaacgaaattatcttggagcttttaggggatgccttttcgttattaactgagacatctagttttgctacagggacaaatctcttacctaatccaatatattatttgacagattcaggcatgaagtaaaacgtcgtcacttttccttagtgcttttctgaaggaatttaaagacggaattttaaacggccattgcaatattttcaagtggctctcataccaagtcccattactgtttgttaaatttcagtacgtcttaaagtactacttataaacaaatgaaactcagagaaactgaatcacctggaagagaaaaatccattatggtcccatgtggagtgaataatgatggatcagcaccctttctctcatgttattgtataagacgagacttttgggccagcagcgattgggcagcttttaaattcttaactgaaaagagtaatgcaatacagggattattcccaataaaattaacttttatttaaaagcaagagattttacttagcttttttttttcaaagtttgattttatccccttgaaaaaaaatctcttcactttaaagtataaaggtttttaaaaatccaattgcaaaatgtattatttttacaactatcgaaaaggcataaaagagaacatactatttatggctgaagggtatagccaggctaatgtgcacagagggaatcaataaataaaactctttttcatttcagtaagaaatcagattgtaagtttaatggctccattatagataccaccgtgtaatagaagacttaagtcaatgaaatctaatcagtgtgtcatttctcagcggccattggtgacttaaaattaagatgaggcagagccaaaatggaaaacagtcattttgttgtaggtataaacacatgaacgattcagaaaattattcatctcagctgccatgcagcatgacattaacattaggattgatagcactagtctgatctgctcaaggaaaataatagttctattatacttaatgatgttggtttttacacagctcatttcatttttcactagaaagccagttatgaaagagagctggcctaggcatcccggccctgagtcctaggcccagtctccaactggaaaaccttaggctggtgtttacacatccctgagcctcagtttcctcatctgcaaaacggtgtgaatagtaatccctgtgctgcttatctcacagggctattgtgaggaccaaatggattagactgtaaactgcaaagtgctgtccgcacatgaggtcatctgattactgtcctcagatctcttttgtagaggatttcaatgtatttctttatcatttgagtgtgtgtgtgatggacgaatatgtgtgtgagtttgagaagcatatcgttcgtgtccagttactttgcaaatttgtggacatttgtgattggacagaggggtttgtgctgtggcctaacacttgccaagtgaggtgtaggttatgcctatatgcaaattaaacttcacctttcttgaa

SEQ ID NO: 25586 - DNA, 5789 bp, Homo sapiens
  source 1..5789: mol_type = unassigned DNA
atgccagggagccaagcgtcctgcccggccgttgctccgactgtgtgttccaggagtggtggctctgaggtgtgaccctgcccacgtttgggcccagccaggttcagccccccaataaggagggcagcttgataacacaaagaaaacagtgtcaacgagtactaccaagagaagaagacaagaggtcaacacagactcattttctactccgtgtgaatgatagctacagcaggggaaagtttcatagtctatcagtgggtcagaaaatggagttttatagcagaggcttcttagaagcttaaacccctgtcccaatgacgtcaagttcgcccgctggcttggaaggttcagacctatcttccatcaacaccatgatgtcggcggtcatgagtgtagggaaggtcacagagaatggcgggagcccccaggggatcaagtccccctcgaagcctccaggaccaaatcggattggcagaaggaaccaggaaacgaaagaggagaagtcttcctataactgccccctgtgtgagaagatttgcactacccagcaccagctgaccatgcacattcgccagcacaacacagacactggaggagccgaccactcatgcagcatctgcggaaagtcactgagctcggccagctccctcgatcgccacatgctggtgcactctggcgagaggccttacaagtgcactgtgtgtggccagtcatttaccaccaatgggaacatgcacagacatatgaagatccatgagaaggaccctaacagtgccacagccacagcccctccatctcctctgaaacgtaggcgattgtcctccaagaggaaactgagtcacgatgccgagtcagagagagaagacccagcaccagctaaaaagatggtagaagacgggcagtcaggtgacttggagaagaaagctgatgaagtctttcactgcccagtatgtttcaaggagtttgtttgcaagtatggactggagacccacatggagacccattcagataacccactaagatgtgacatttgttgtgtcacctttcgaacacatcgaggactgctgcgtcacaacgcgcttgtccacaaacaacttcccagggatgcaatgggcagacctttcatacagaacaacccttcaattcctgctggcttccacgacttaggattcacggacttctcctgtaggaagtttcctcgcatttctcaggcctggtgcgaaacaaacctgcggaggtgcatcagcgagcaacaccgttttgtctgcgacacctgtgacaaggcgttccccatgctctgctcactggctctgcacaagcagacccatgtggcggcagaccagggtcaagaaaagccgcaggccacgcccctgcctggtgacgccctggaccagaagggcttcctggccttgcttggcctgcagcacaccaaagacgtcaggcctgcccccgccgaggagcccctgccggatgacaaccaggcaattcagctccagacactcaagtgtcagctacctcaggaccccggctgcaccaacctgctgagcctgtcacctttcgaagctgcttccctaggcggttctctcacagttctccccgcgaccaaggacagcataaagcacctgtccctgcagcccttccagaagggcttcatcatccagcctgacagcagcattgtggtcaagcccatctctggcgagtcggccatcgagctggcagacatccagcaaattctgaagatggcagcctcggctccccctcagatcagtcttccgcccttctccaaggcccctgccgccccactgcaggcgatcttcaagcacatgccccctctgaagccaaagcccctggtcacaccacggacggtggtggccacctccacgcccccgcctctcatcaacgcccagcaggcttccccgggctgtatcagccccagcctgccgccaccgcccctgaagctcctcaaaggctcagtggaggcggcctccaacgcccacctgctgcagtccaagtccgggacccagccccacgcggccacgcggctctccctgcagcagccgcgggcggagctgccgggccagcctgagatgaagacgcagctggagcaggacagcatcatcgaggccctgctgccgctgagcatggaggccaagatcaagcaggagatcacagagggggaactcaaggccttcatgacagcgcccggcggcaagaagacgcccgccatgcgcaaggtgctctacccctgccgcttctgcaaccaggtgtttgccttctcgggggtcttgcgtgcccacgtgcgctcccacctgggcatctcgccataccagtgcaacatctgcgactacatcgccgccgacaaggccgcgctcatccgccacctgcgcacgcacagtggggagcggccctacatttgcaagatctgccactaccccttcactgtcaaagccaactgcgagcggcacctgcgcaagaagcacctcaaggccacccgcaaggatatcgagaagaacatcgagtatgtgagtagcagcgcggccgagctggtggacgccttctgcgccccggacaccgtgtgccggctgtgcggcgaggacctcaagcactatcgtgccctgcgcatccacatgcgcacgcactgcggccgcggcctgggcgggggccacaagggccgcaagcccttcgagtgcaaggagtgcagcgccgcgttcgcggccaagcgcaactgcatccaccacatcctcaagcagcacctgcacgtgcccgagcaggacatcgagagctacgtgctggccgccgacggcctgggccccgcagaggcgccggccgctgaggcgtcggggcgcggggaggacagtggctgcgctgcccttggtgactgcaagcccctcactgccttcctggaaccccagaacggctttcttcacaggggccccacccagcctccacctccccatgtctcgatcaagttggagcccgccagtagctttgcggtggacttcaatgagcccctggacttctcgcagaagggcctggccctggtccaagtgaagcaggaaaacatctcctttctgagcccttcttccctggtcccctatgactgctccatggagcccatcgacctgtccatccccaagaacttcaggaaaggggacaaggatttggccactcccagcgaagccaagaagcctgaggaggaggcggggagcagcgagcagccctctccctgcccagcacccggcccttctcttcctgtaactttggggcccagcggaatcctggaaagccccatggcccctgctccggcggccaccccggaacccccagcacagcccctgcagggccctgttcagctggcggtcccaatctactcctcagccctggtcagcagccctccactcgtgggcagctcagccctcctgagtggcacagccttgctgcgtccactgcggcccaagcccccgctgcttttgccaaagccccccgtgacagaagagctgcccccgctggcctccattgcccagatcatctcatctgtatcctcggcccccaccctgctgaaaaccaaggtggcggacccagggcccgcaagcactggcagtaacaccacggcttcagacagcttaggaggttctgtccccaaagccgccaccaccgccacccccgctgccaccaccagcccaaaagagtctagtgagcctcccgctccagccagcagcccagaggctgcctctcccaccgagcagggcccagcgggcacgtcgaagaagaggggccggaaaagggggatgaggagccgaccccgcgccaacagcggcggggtggacctggactccagcggggagtttgccagcatcgagaagatgctggccaccacagacaccaacaagttcagtccgtttctgcagacagcggaggacaacactcaggatgaggtggccggagcccctgccgaccaccatgggcccagtgatgaagagcagggcagtcccccagaagacaagctgctgagggccaagcggaactcgtacaccaactgcctgcagaagatcacctgtccccactgtccccgggttttcccttgggccagctccctacagaggcacatgctcacacacactggtcagaaacccttcccttgtcaaaaatgcgatgccttcttttctaccaaatctaactgtgaacgccaccagttgcgcaaacacggagttaccacctgttccctgagaagaaacgggcttatcccccagtcaaaagagagtgatgttggatcccatgatagcacaggggaaaggccatacaaatgtcagacctgcgagcgaaccttcaccttgaagcacagcctggttcgccaccagcggatccaccagaaagccaggcatgccaaacaccacgggaaggacagcgacaaggaagagcggggtgaggaggacagcgagaatgagtccacccacagcggcaacaacgccgtctcagagaacgaggctgagctggctcccaatgccagcaaccacatggctgtcacccggagccggaaggagggcttggccagtgccaccaaggactgcagccacagggaggagaaggtcacggcagggtggccgtctgagcctggccagggtgaccttaacccagagagcccggcggccctggggcaggacctgctggagccgcgcagcaagaggcctgcccacccaatcctggccacagctgatggcgcctcccagctcgtggggatggagtgacagcctcagtccccctcagcacagacaaaagccagcagagcaaagcgtctatacttcatggggtttcctcagtgccctttggctgttgaggagtgagagagagagagagagagagagagagagagagagagagagacaagcaggagcgtggctgctcgctcagtgccatagccttaccgcagcctgcgcgggaggccacagcccgtgccgattccagtgccttaactacttaccggatccctccatattatcatgggtgttgtatttttccaaaatgacttcttaaacaaaacaaatattataatgaattgtctggagaggacctcttcatttgagcattagcgttattttgtattggtgtgtgtgagcttgttcttgtgaatctgtgatagcaccgtttgttctgtgagctggaaacagaaggaaaaaacatacccttgggtacccatagccaataactggaagaaaatgatgtgaatttcatgtaaatgaccagaggaaagatggataagatgataatttcttaaatagacattttccttttttctttgtgcttcatggtggagctgtcatctggtccttggtattacaggatgtggttgatgaaggtttccaatatggtttcaggccaaaaccagggaagattctagcttcagcctcatgtccatttccagtctgtcagcattagacatggtcactgttcaagtttcaagacatccattcttaactatagagaagagttactcccctggcgtcttaacctatggaaaacatgcacggataggatatatttgattgcctcctcttccctttcagtatatgtattattaatattattattattattattattattagttcatcagtttgctgttctctgcagtgagcagaatcaaatgggcaatatttgtcctgggagacctgtgccgcacccaggtccccgtgttaacgtgtgcctgcggttgtggttggcaccctcgggtggtagctcttctactgtaatgagacaagcctttcttctgtcactgcagaatttagaagggg

SEQ ID NO: 25587 - DNA, 7440 bp, Homo sapiens
  source 1..7440: mol_type = unassigned DNA
atgccagggagccaagcgtcctgcccggccgttgctccgactgtgtgttccaggagtggtggctctgaggtgtgaccctgcccacgtttgggcccagccaggttcagccccccaataaggagggcagcttgataacacaaagaaaacagtgtcaacgagtactaccaagagaagaagacaagaggtcaacacagactcattttctactccgtgtgaatgatagctacagcaggggaaagtttcatagtctatcagtgggtcagaaaatggagttttatagcagaggcttcttagaagcttaaacccctgtcccaatgacgtcaagttcgcccgctggcttggaaggttcagacctatcttccatcaacaccatgatgtcggcggtcatgagtgtagggaaggtcacagagaatggcgggagcccccaggggatcaagtccccctcgaagcctccaggaccaaatcggattggcagaaggaaccaggaaacgaaagaggagaagtcttcctataactgccccctgtgtgagaagatttgcactacccagcaccagctgaccatgcacattcgccagcacaacacagacactggaggagccgaccactcatgcagcatctgcggaaagtcactgagctcggccagctccctcgatcgccacatgctggtgcactctggcgagaggccttacaagtgcactgtgtgtggccagtcatttaccaccaatgggaacatgcacagacatatgaagatccatgagaaggaccctaacagtgccacagccacagcccctccatctcctctgaaacgtaggcgattgtcctccaagaggaaactgagtcacgatgccgagtcagagagagaagacccagcaccagctaaaaagatggtagaagacgggcagtcaggtgacttggagaagaaagctgatgaagtctttcactgcccagtatgtttcaaggagtttgtttgcaagtatggactggagacccacatggagacccattcagataacccactaagatgtgacatttgttgtgtcacctttcgaacacatcgaggactgctgcgtcacaacgcgcttgtccacaaacaacttcccagggatgcaatgggcagacctttcatacagaacaacccttcaattcctgctggcttccacgacttaggattcacggacttctcctgtaggaagtttcctcgcatttctcaggcctggtgcgaaacaaacctgcggaggtgcatcagcgagcaacaccgttttgtctgcgacacctgtgacaaggcgttccccatgctctgctcactggctctgcacaagcagacccatgtggcggcagaccagggtcaagaaaagccgcaggccacgcccctgcctggtgacgccctggaccagaagggcttcctggccttgcttggcctgcagcacaccaaagacgtcaggcctgcccccgccgaggagcccctgccggatgacaaccaggcaattcagctccagacactcaagtgtcagctacctcaggaccccggctgcaccaacctgctgagcctgtcacctttcgaagctgcttccctaggcggttctctcacagttctccccgcgaccaaggacagcataaagcacctgtccctgcagcccttccagaagggcttcatcatccagcctgacagcagcattgtggtcaagcccatctctggcgagtcggccatcgagctggcagacatccagcaaattctgaagatggcagcctcggctccccctcagatcagtcttccgcccttctccaaggcccctgccgccccactgcaggcgatcttcaagcacatgccccctctgaagccaaagcccctggtcacaccacggacggtggtggccacctccacgcccccgcctctcatcaacgcccagcaggcttccccgggctgtatcagccccagcctgccgccaccgcccctgaagctcctcaaaggctcagtggaggcggcctccaacgcccacctgctgcagtccaagtccgggacccagccccacgcggccacgcggctctccctgcagcagccgcgggcggagctgccgggccagcctgagatgaagacgcagctggagcaggacagcatcatcgaggccctgctgccgctgagcatggaggccaagatcaagcaggagatcacagagggggaactcaaggccttcatgacagcgcccggcggcaagaagacgcccgccatgcgcaaggtgctctacccctgccgcttctgcaaccaggtgtttgccttctcgggggtcttgcgtgcccacgtgcgctcccacctgggcatctcgccataccagtgcaacatctgcgactacatcgccgccgacaaggccgcgctcatccgccacctgcgcacgcacagtggggagcggccctacatttgcaagatctgccactaccccttcactgtcaaagccaactgcgagcggcacctgcgcaagaagcacctcaaggccacccgcaaggatatcgagaagaacatcgagtatgtgagtagcagcgcggccgagctggtggacgccttctgcgccccggacaccgtgtgccggctgtgcggcgaggacctcaagcactatcgtgccctgcgcatccacatgcgcacgcactgcggccgcggcctgggcgggggccacaagggccgcaagcccttcgagtgcaaggagtgcagcgccgcgttcgcggccaagcgcaactgcatccaccacatcctcaagcagcacctgcacgtgcccgagcaggacatcgagagctacgtgctggccgccgacggcctgggccccgcagaggcgccggccgctgaggcgtcggggcgcggggaggacagtggctgcgctgcccttggtgactgcaagcccctcactgccttcctggaaccccagaacggctttcttcacaggggccccacccagcctccacctccccatgtctcgatcaagttggagcccgccagtagctttgcggtggacttcaatgagcccctggacttctcgcagaagggcctggccctggtccaagtgaagcaggaaaacatctcctttctgagcccttcttccctggtcccctatgactgctccatggagcccatcgacctgtccatccccaagaacttcaggaaaggggacaaggatttggccactcccagcgaagccaagaagcctgaggaggaggcggggagcagcgagcagccctctccctgcccagcacccggcccttctcttcctgtaactttggggcccagcggaatcctggaaagccccatggcccctgctccggcggccaccccggaacccccagcacagcccctgcagggccctgttcagctggcggtcccaatctactcctcagccctggtcagcagccctccactcgtgggcagctcagccctcctgagtggcacagccttgctgcgtccactgcggcccaagcccccgctgcttttgccaaagccccccgtgacagaagagctgcccccgctggcctccattgcccagatcatctcatctgtatcctcggcccccaccctgctgaaaaccaaggtggcggacccagggcccgcaagcactggcagtaacaccacggcttcagacagcttaggaggttctgtccccaaagccgccaccaccgccacccccgctgccaccaccagcccaaaagagtctagtgagcctcccgctccagccagcagcccagaggctgcctctcccaccgagcagggcccagcgggcacgtcgaagaagaggggccggaaaagggggatgaggagccgaccccgcgccaacagcggcggggtggacctggactccagcggggagtttgccagcatcgagaagatgctggccaccacagacaccaacaagttcagtccgtttctgcagacagcggaggacaacactcaggatgaggtggccggagcccctgccgaccaccatgggcccagtgatgaagagcagggcagtcccccagaagacaagctgctgagggccaagcggaactcgtacaccaactgcctgcagaagatcacctgtccccactgtccccgggttttcccttgggccagctccctacagaggcacatgctcacacacactgacagtcagtcggatgcggagactgcagccgccgcgggcgaagtgctagacctcacctcacgggacagagagcagccgtcggagggcgccactgagctccgccaggtcgcaggggatgcgcctgtggagcaggccacggcggaaacggcctcgccggtgcaccgggaagagcacgggcgtggggagagccatgagccggaggaggagcatggcactgaggagagcactggggacgccgacggcgcggaagaggacgcgtcgagcaaccagagcctggacctggacttcgccaccaagctcatggacttcaagctggcggagggcgacggcgaggcaggcgccgggggcgcggcctcgcaggagcagaagctcgcctgcgacacctgtgggaagagcttcaagttcctgggcaccctgagccgccaccggaaggcgcacggccgccaggagcccaaggacgagaagggagatggcgccagcactgcagaggaggggccccagcccgcccctgaacaggaggagaagccccccgagaccccggcagaggtggtggagtcggccccgggtgccggggaggccccggcggaaaagctcgcggaggagacggagggcccctccgacggggagagcgcggccgagaaaaggtcctcagagaagagcgacgatgacaagaaaccaaagacagactcccccaaaagcgtggccagcaaggcagacaagaggaagaaggtctgcagcgtgtgcaacaagcggttctggtcgctgcaggacctgacccggcacatgcgctcccacacaggggaaaggccatacaaatgtcagacctgcgagcgaaccttcaccttgaagcacagcctggttcgccaccagcggatccaccagaaagccaggcatgccaaacaccacgggaaggacagcgacaaggaagagcggggtgaggaggacagcgagaatgagtccacccacagcggcaacaacgccgtctcagagaacgaggctgagctggctcccaatgccagcaaccacatggctgtcacccggagccggaaggagggcttggccagtgccaccaaggactgcagccacagggaggagaaggtcacggcagggtggccgtctgagcctggccagggtgaccttaacccagagagcccggcggccctggggcaggacctgctggagccgcgcagcaagaggcctgcccacccaatcctggccacagctgatggcgcctcccagctcgtggggatggagtgacagcctcagtccccctcagcacagacaaaagccagcagagcaaagcgtctatacttcatggggtttcctcagtgccctttggctgttgaggagtgagagagagagagagagagagagagagagagagagagagagacaagcaggagcgtggctgctcgctcagtgccatagccttaccgcagcctgcgcgggaggccacagcccgtgccgattccagtgccttaactacttaccggatccctccatattatcatgggtgttgtatttttccaaaatgacttcttaaacaaaacaaatattataatgaattgtctggagaggacctcttcatttgagcattagcgttattttgtattggtgtgtgtgagcttgttcttgtgaatctgtgatagcaccgtttgttctgtgagctggaaacagaaggaaaaaacatacccttgggtacccatagccaataactggaagaaaatgatgtgaatttcatgtaaatgaccagaggaaagatggataagatgataatttcttaaatagacattttccttttttctttgtgcttcatggtggagctgtcatctggtccttggtattacaggatgtggttgatgaaggtttccaatatggtttcaggccaaaaccagggaagattctagcttcagcctcatgtccatttccagtctgtcagcattagacatggtcactgttcaagtttcaagacatccattcttaactatagagaagagttactcccctggcgtcttaacctatggaaaacatgcacggataggatatatttgattgcctcctcttccctttcagtatatgtattattaatattattattattattattattattagttcatcagtttgctgttctctgcagtgagcagaatcaaatgggcaatatttgtcctgggagacctgtgccgcacccaggtccccgtgttaacgtgtgcctgcggttgtggttggcaccctcgggtggtagctcttctactgtaatgagacaagcctttcttctgtcactgcagaatttagaaggggccgtgagcagtcttcccaagcatggtccaggagcagctcagagagggtggagtgaggatgcatgcatccagggaacaggcatcaagaagccagggccgtgcctggagcactgcagagatgactttggagaaagcaaagcagtgacccagtgaccaggcacattactcgtgagcgaggtattcccagtcttcctgctaagcctaatccaagccttacccagctgtgctactgtcatttgcaaagcaaggaaatactactactggtaataaaactacacatgcaagatgtcagataagaaataggtttatatttaccttcctgcgatgtggggttggtgcttgaagataaatgtgctgtttctagtttcttaaatagcccacacccctggatgcaaaaaggcagggttatttttacccatgagcatcctgtgcaggcaatagacttccctcactgtctccgcctgcagggaggagaatgtaccccactgcacctgagctcctggtccctcagccaagacctcaggggtccccagccagcctgctgctggggacccctgtgcttgctgcagtgtatggagcctcttgccttcccctggggaggcacccctgtaccccagcttccttcccctggccttttctggccccagtgctcctcctttacatagacttgttcacacagaaacgtgcacgcccccttttctccgccacttcaccagtttctgaaatccaacctcccagacttcacaggaagatagatattcttgagataatgaaaagtgatatcttcgcatacgaaaggaaaaaaggttgaggtatatatgatttttaactgtattaggggtgtatgaaccagtttaaaaacgaggttttatttactgtagagatgaatgcaaatcagaaccaatgatcccttggcctacttagttaaaaccagttcatacatcccttagggtttttattattattattattattattacagttgttattgttgtttttgttgttattattatttgggg

SEQ ID NO: 25588 - DNA, 5826 bp, Homo sapiens
  source 1..5826: mol_type = unassigned DNA
cgggatggcaactgcggtcaccctgctaaagtcggggcgggggcggcggtcctccccctcaccccccccagtccgagcgccgccgccgccgccgccgccgccgccgcggccgctcagtaacacgtccccaggagactcgcaggagcaacacgtgatgtgtctacttatcagggttgctccgactgtgtgttccaggagtggtggctctgaggtgtgaccctgcccacgtttgggcccagccaggttcagccccccaataaggagggcagcttgataacacaaagaaaacagtgtcaacgagtactaccaagagaagaagacaagaggtcaacacagactcattttctactccgtgtgaatgatagctacagcaggggaaagtttcatagtctatcagtgggtcagaaaatggagttttatagcagaggcttcttagaagcttaaacccctgtcccaatgacgtcaagttcgcccgctggcttggaaggttcagacctatcttccatcaacaccatgatgtcggcggtcatgagtgtagggaaggtcacagagaatggcgggagcccccaggggatcaagtccccctcgaagcctccaggaccaaatcggattggcagaaggaaccaggaaacgaaagaggagaagtcttcctataactgccccctgtgtgagaagatttgcactacccagcaccagctgaccatgcacattcgccagcacaacacagacactggaggagccgaccactcatgcagcatctgcggaaagtcactgagctcggccagctccctcgatcgccacatgctggtgcactctggcgagaggccttacaagtgcactgtgtgtggccagtcatttaccaccaatgggaacatgcacagacatatgaagatccatgagaaggaccctaacagtgccacagccacagcccctccatctcctctgaaacgtaggcgattgtcctccaagaggaaactgagtcacgatgccgagtcagagagagaagacccagcaccagctaaaaagatggtagaagacgggcagtcaggtgacttggagaagaaagctgatgaagtctttcactgcccagtatgtttcaaggagtttgtttgcaagtatggactggagacccacatggagacccattcagataacccactaagatgtgacatttgttgtgtcacctttcgaacacatcgaggactgctgcgtcacaacgcgcttgtccacaaacaacttcccagggatgcaatgggcagacctttcatacagaacaacccttcaattcctgctggcttccacgacttaggattcacggacttctcctgtaggaagtttcctcgcatttctcaggcctggtgcgaaacaaacctgcggaggtgcatcagcgagcaacaccgttttgtctgcgacacctgtgacaaggcgttccccatgctctgctcactggctctgcacaagcagacccatgtggcggcagaccagggtcaagaaaagccgcaggccacgcccctgcctggtgacgccctggaccagaagggcttcctggccttgcttggcctgcagcacaccaaagacgtcaggcctgcccccgccgaggagcccctgccggatgacaaccaggcaattcagctccagacactcaagtgtcagctacctcaggaccccggctgcaccaacctgctgagcctgtcacctttcgaagctgcttccctaggcggttctctcacagttctccccgcgaccaaggacagcataaagcacctgtccctgcagcccttccagaagggcttcatcatccagcctgacagcagcattgtggtcaagcccatctctggcgagtcggccatcgagctggcagacatccagcaaattctgaagatggcagcctcggctccccctcagatcagtcttccgcccttctccaaggcccctgccgccccactgcaggcgatcttcaagcacatgccccctctgaagccaaagcccctggtcacaccacggacggtggtggccacctccacgcccccgcctctcatcaacgcccagcaggcttccccgggctgtatcagccccagcctgccgccaccgcccctgaagctcctcaaaggctcagtggaggcggcctccaacgcccacctgctgcagtccaagtccgggacccagccccacgcggccacgcggctctccctgcagcagccgcgggcggagctgccgggccagcctgagatgaagacgcagctggagcaggacagcatcatcgaggccctgctgccgctgagcatggaggccaagatcaagcaggagatcacagagggggaactcaaggccttcatgacagcgcccggcggcaagaagacgcccgccatgcgcaaggtgctctacccctgccgcttctgcaaccaggtgtttgccttctcgggggtcttgcgtgcccacgtgcgctcccacctgggcatctcgccataccagtgcaacatctgcgactacatcgccgccgacaaggccgcgctcatccgccacctgcgcacgcacagtggggagcggccctacatttgcaagatctgccactaccccttcactgtcaaagccaactgcgagcggcacctgcgcaagaagcacctcaaggccacccgcaaggatatcgagaagaacatcgagtatgtgagtagcagcgcggccgagctggtggacgccttctgcgccccggacaccgtgtgccggctgtgcggcgaggacctcaagcactatcgtgccctgcgcatccacatgcgcacgcactgcggccgcggcctgggcgggggccacaagggccgcaagcccttcgagtgcaaggagtgcagcgccgcgttcgcggccaagcgcaactgcatccaccacatcctcaagcagcacctgcacgtgcccgagcaggacatcgagagctacgtgctggccgccgacggcctgggccccgcagaggcgccggccgctgaggcgtcggggcgcggggaggacagtggctgcgctgcccttggtgactgcaagcccctcactgccttcctggaaccccagaacggctttcttcacaggggccccacccagcctccacctccccatgtctcgatcaagttggagcccgccagtagctttgcggtggacttcaatgagcccctggacttctcgcagaagggcctggccctggtccaagtgaagcaggaaaacatctcctttctgagcccttcttccctggtcccctatgactgctccatggagcccatcgacctgtccatccccaagaacttcaggaaaggggacaaggatttggccactcccagcgaagccaagaagcctgaggaggaggcggggagcagcgagcagccctctccctgcccagcacccggcccttctcttcctgtaactttggggcccagcggaatcctggaaagccccatggcccctgctccggcggccaccccggaacccccagcacagcccctgcagggccctgttcagctggcggtcccaatctactcctcagccctggtcagcagccctccactcgtgggcagctcagccctcctgagtggcacagccttgctgcgtccactgcggcccaagcccccgctgcttttgccaaagccccccgtgacagaagagctgcccccgctggcctccattgcccagatcatctcatctgtatcctcggcccccaccctgctgaaaaccaaggtggcggacccagggcccgcaagcactggcagtaacaccacggcttcagacagcttaggaggttctgtccccaaagccgccaccaccgccacccccgctgccaccaccagcccaaaagagtctagtgagcctcccgctccagccagcagcccagaggctgcctctcccaccgagcagggcccagcgggcacgtcgaagaagaggggccggaaaagggggatgaggagccgaccccgcgccaacagcggcggggtggacctggactccagcggggagtttgccagcatcgagaagatgctggccaccacagacaccaacaagttcagtccgtttctgcagacagcggaggacaacactcaggatgaggtggccggagcccctgccgaccaccatgggcccagtgatgaagagcagggcagtcccccagaagacaagctgctgagggccaagcggaactcgtacaccaactgcctgcagaagatcacctgtccccactgtccccgggttttcccttgggccagctccctacagaggcacatgctcacacacactgacagtcagtcggatgcggagactgcagccgccgcgggcgaagtgctagacctcacctcacgggacagagagcagccgtcggagggcgccactgagctccgccaggtcgcaggggatgcgcctgtggagcaggccacggcggaaacggcctcgccggtgcaccgggaagagcacgggcgtggggagagccatgagccggaggaggagcatggcactgaggagagcactggggacgccgacggcgcggaagaggacgcgtcgagcaaccagagcctggacctggacttcgccaccaagctcatggacttcaagctggcggagggcgacggcgaggcaggcgccgggggcgcggcctcgcaggagcagaagctcgcctgcgacacctgtgggaagagcttcaagttcctgggcaccctgagccgccaccggaaggcgcacggccgccaggagcccaaggacgagaagggagatggcgccagcactgcagaggaggggccccagcccgcccctgaacaggaggagaagccccccgagaccccggcagaggtggtggagtcggccccgggtgccggggaggccccggcggaaaagctcgcggaggagacggagggcccctccgacggggagagcgcggccgagaaaaggtcctcagagaagagcgacgatgacaagaaaccaaagacagactcccccaaaagcgtggccagcaaggcagacaagaggaagaaggtctgcagcgtgtgcaacaagcggttctggtcgctgcaggacctgacccggcacatgcgctcccacacaggggaaaggccatacaaatgtcagacctgcgagcgaaccttcaccttgaagcacagcctggttcgccaccagcggatccaccagaaagccaggcatgccaaacaccacgggaaggacagcgacaaggaagagcggggtgaggaggacagcgagaatgagtccacccacagcggcaacaacgccgtctcagagaacgaggctgagctggctcccaatgccagcaaccacatggctgtcacccggagccggaaggagggcttggccagtgccaccaaggactgcagccacagggaggagaaggtcacggcagggtggccgtctgagcctggccagggtgaccttaacccagagagcccggcggccctggggcaggacctgctggagccgcgcagcaagaggcctgcccacccaatcctggccacagctgatggcgcctcccagctcgtggggatggagtgacagcctcagtccccctcagcacagacaaaagccagcagagcaaagcgtctatacttcatggggtttcctcagtgccctttggctgttgaggagtgagagagagagagagagagagagagagagagagagagagagacaagcaggagcgtggctgctcgctcagtgccatagccttaccgcagcctgcgcgggaggccacagcccgtgccgattccagtgccttaactacttaccggatccctccatattatcatgggtgttgtatttttccaaaatgacttcttaaacaaaacaaatattataatg

SEQ ID NO: 25589 - DNA, 8778 bp, Homo sapiens
  source 1..8778: mol_type = unassigned DNA
gaagctgggcggggggccgagacgggggccgggacgacggctggggcgccggggtcgccagctcctcgcccacctccctccctgtgggagaagaggaggaggggaagtgactgcggagttgatgaactttgcacatccagaaacgccattttgattccttttccggaacaagtttgcatctctcctcggtctctccctgaagcccaccggtccccaacgcatcatgccagggagccaagcgtcctgcccggccgttgctccgactgtgtgttccaggagtggtggctctgaggtgtgaccctgcccacgtttgggcccagccaggttcagccccccaataaggagggcagcttgataacacaaagaaaacagtgtcaacgagtactaccaagagaagaagacaagaggtcaacacagactcattttctactccgtgtgaatgatagctacagcaggggaaagtttcatagtctatcagtgggtcagaaaatggagttttatagcagaggcttcttagaagcttaaacccctgtcccaatgacgtcaagttcgcccgctggcttggaaggttcagacctatcttccatcaacaccatgatgtcggcggtcatgagtgtagggaaggtcacagagaatggcgggagcccccaggggatcaagtccccctcgaagcctccaggaccaaatcggattggcagaaggaaccaggaaacgaaagaggagaagtcttcctataactgccccctgtgtgagaagatttgcactacccagcaccagctgaccatgcacattcgccagcacaacacagacactggaggagccgaccactcatgcagcatctgcggaaagtcactgagctcggccagctccctcgatcgccacatgctggtgcactctggcgagaggccttacaagtgcactgtgtgtggccagtcatttaccaccaatgggaacatgcacagacatatgaagatccatgagaaggaccctaacagtgccacagccacagcccctccatctcctctgaaacgtaggcgattgtcctccaagaggaaactgagtcacgatgccgagtcagagagagaagacccagcaccagctaaaaagatggtagaagacgggcagtcaggtgacttggagaagaaagctgatgaagtctttcactgcccagtatgtttcaaggagtttgtttgcaagtatggactggagacccacatggagacccattcagataacccactaagatgtgacatttgttgtgtcacctttcgaacacatcgaggactgctgcgtcacaacgcgcttgtccacaaacaacttcccagggatgcaatgggcagacctttcatacagaacaacccttcaattcctgctggcttccacgacttaggattcacggacttctcctgtaggaagtttcctcgcatttctcaggcctggtgcgaaacaaacctgcggaggtgcatcagcgagcaacaccgttttgtctgcgacacctgtgacaaggcgttccccatgctctgctcactggctctgcacaagcagacccatgtggcggcagaccagggtcaagaaaagccgcaggccacgcccctgcctggtgacgccctggaccagaagggcttcctggccttgcttggcctgcagcacaccaaagacgtcaggcctgcccccgccgaggagcccctgccggatgacaaccaggcaattcagctccagacactcaagtgtcagctacctcaggaccccggctgcaccaacctgctgagcctgtcacctttcgaagctgcttccctaggcggttctctcacagttctccccgcgaccaaggacagcataaagcacctgtccctgcagcccttccagaagggcttcatcatccagcctgacagcagcattgtggtcaagcccatctctggcgagtcggccatcgagctggcagacatccagcaaattctgaagatggcagcctcggctccccctcagatcagtcttccgcccttctccaaggcccctgccgccccactgcaggcgatcttcaagcacatgccccctctgaagccaaagcccctggtcacaccacggacggtggtggccacctccacgcccccgcctctcatcaacgcccagcaggcttccccgggctgtatcagccccagcctgccgccaccgcccctgaagctcctcaaaggctcagtggaggcggcctccaacgcccacctgctgcagtccaagtccgggacccagccccacgcggccacgcggctctccctgcagcagccgcgggcggagctgccgggccagcctgagatgaagacgcagctggagcaggacagcatcatcgaggccctgctgccgctgagcatggaggccaagatcaagcaggagatcacagagggggaactcaaggccttcatgacagcgcccggcggcaagaagacgcccgccatgcgcaaggtgctctacccctgccgcttctgcaaccaggtgtttgccttctcgggggtcttgcgtgcccacgtgcgctcccacctgggcatctcgccataccagtgcaacatctgcgactacatcgccgccgacaaggccgcgctcatccgccacctgcgcacgcacagtggggagcggccctacatttgcaagatctgccactaccccttcactgtcaaagccaactgcgagcggcacctgcgcaagaagcacctcaaggccacccgcaaggatatcgagaagaacatcgagtatgtgagtagcagcgcggccgagctggtggacgccttctgcgccccggacaccgtgtgccggctgtgcggcgaggacctcaagcactatcgtgccctgcgcatccacatgcgcacgcactgcggccgcggcctgggcgggggccacaagggccgcaagcccttcgagtgcaaggagtgcagcgccgcgttcgcggccaagcgcaactgcatccaccacatcctcaagcagcacctgcacgtgcccgagcaggacatcgagagctacgtgctggccgccgacggcctgggccccgcagaggcgccggccgctgaggcgtcggggcgcggggaggacagtggctgcgctgcccttggtgactgcaagcccctcactgccttcctggaaccccagaacggctttcttcacaggggccccacccagcctccacctccccatgtctcgatcaagttggagcccgccagtagctttgcggtggacttcaatgagcccctggacttctcgcagaagggcctggccctggtccaagtgaagcaggaaaacatctcctttctgagcccttcttccctggtcccctatgactgctccatggagcccatcgacctgtccatccccaagaacttcaggaaaggggacaaggatttggccactcccagcgaagccaagaagcctgaggaggaggcggggagcagcgagcagccctctccctgcccagcacccggcccttctcttcctgtaactttggggcccagcggaatcctggaaagccccatggcccctgctccggcggccaccccggaacccccagcacagcccctgcagggccctgttcagctggcggtcccaatctactcctcagccctggtcagcagccctccactcgtgggcagctcagccctcctgagtggcacagccttgctgcgtccactgcggcccaagcccccgctgcttttgccaaagccccccgtgacagaagagctgcccccgctggcctccattgcccagatcatctcatctgtatcctcggcccccaccctgctgaaaaccaaggtggcggacccagggcccgcaagcactggcagtaacaccacggcttcagacagcttaggaggttctgtccccaaagccgccaccaccgccacccccgctgccaccaccagcccaaaagagtctagtgagcctcccgctccagccagcagcccagaggctgcctctcccaccgagcagggcccagcgggcacgtcgaagaagaggggccggaaaagggggatgaggagccgaccccgcgccaacagcggcggggtggacctggactccagcggggagtttgccagcatcgagaagatgctggccaccacagacaccaacaagttcagtccgtttctgcagacagcggaggacaacactcaggatgaggtggccggagcccctgccgaccaccatgggcccagtgatgaagagcagggcagtcccccagaagacaagctgctgagggccaagcggaactcgtacaccaactgcctgcagaagatcacctgtccccactgtccccgggttttcccttgggccagctccctacagaggcacatgctcacacacactggtcagaaacccttcccttgtcaaaaatgcgatgccttcttttctaccaaatctaactgtgaacgccaccagttgcgcaaacacggagttaccacctgttccctgagaagaaacgggcttatcccccagtcaaaagagagtgatgttggatcccatgatagcacagacagtcagtcggatgcggagactgcagccgccgcgggcgaagtgctagacctcacctcacgggacagagagcagccgtcggagggcgccactgagctccgccaggtcgcaggggatgcgcctgtggagcaggccacggcggaaacggcctcgccggtgcaccgggaagagcacgggcgtggggagagccatgagccggaggaggagcatggcactgaggagagcactggggacgccgacggcgcggaagaggacgcgtcgagcaaccagagcctggacctggacttcgccaccaagctcatggacttcaagctggcggagggcgacggcgaggcaggcgccgggggcgcggcctcgcaggagcagaagctcgcctgcgacacctgtgggaagagcttcaagttcctgggcaccctgagccgccaccggaaggcgcacggccgccaggagcccaaggacgagaagggagatggcgccagcactgcagaggaggggccccagcccgcccctgaacaggaggagaagccccccgagaccccggcagaggtggtggagtcggccccgggtgccggggaggccccggcggaaaagctcgcggaggagacggagggcccctccgacggggagagcgcggccgagaaaaggtcctcagagaagagcgacgatgacaagaaaccaaagacagactcccccaaaagcgtggccagcaaggcagacaagaggaagaaggtctgcagcgtgtgcaacaagcggttctggtcgctgcaggacctgacccggcacatgcgctcccacacaggggaaaggccatacaaatgtcagacctgcgagcgaaccttcaccttgaagcacagcctggttcgccaccagcggatccaccagaaagccaggcatgccaaacaccacgggaaggacagcgacaaggaagagcggggtgaggaggacagcgagaatgagtccacccacagcggcaacaacgccgtctcagagaacgaggctgagctggctcccaatgccagcaaccacatggctgtcacccggagccggaaggagggcttggccagtgccaccaaggactgcagccacagggaggagaaggtcacggcagggtggccgtctgagcctggccagggtgaccttaacccagagagcccggcggccctggggcaggacctgctggagccgcgcagcaagaggcctgcccacccaatcctggccacagctgatggcgcctcccagctcgtggggatggagtgacagcctcagtccccctcagcacagacaaaagccagcagagcaaagcgtctatacttcatggggtttcctcagtgccctttggctgttgaggagtgagagagagagagagagagagagagagagagagagagagagacaagcaggagcgtggctgctcgctcagtgccatagccttaccgcagcctgcgcgggaggccacagcccgtgccgattccagtgccttaactacttaccggatccctccatattatcatgggtgttgtatttttccaaaatgacttcttaaacaaaacaaatattataatgaattgtctggagaggacctcttcatttgagcattagcgttattttgtattggtgtgtgtgagcttgttcttgtgaatctgtgatagcaccgtttgttctgtgagctggaaacagaaggaaaaaacatacccttgggtacccatagccaataactggaagaaaatgatgtgaatttcatgtaaatgaccagaggaaagatggataagatgataatttcttaaatagacattttccttttttctttgtgcttcatggtggagctgtcatctggtccttggtattacaggatgtggttgatgaaggtttccaatatggtttcaggccaaaaccagggaagattctagcttcagcctcatgtccatttccagtctgtcagcattagacatggtcactgttcaagtttcaagacatccattcttaactatagagaagagttactcccctggcgtcttaacctatggaaaacatgcacggataggatatatttgattgcctcctcttccctttcagtatatgtattattaatattattattattattattattattagttcatcagtttgctgttctctgcagtgagcagaatcaaatgggcaatatttgtcctgggagacctgtgccgcacccaggtccccgtgttaacgtgtgcctgcggttgtggttggcaccctcgggtggtagctcttctactgtaatgagacaagcctttcttctgtcactgcagaatttagaaggggccgtgagcagtcttcccaagcatggtccaggagcagctcagagagggtggagtgaggatgcatgcatccagggaacaggcatcaagaagccagggccgtgcctggagcactgcagagatgactttggagaaagcaaagcagtgacccagtgaccaggcacattactcgtgagcgaggtattcccagtcttcctgctaagcctaatccaagccttacccagctgtgctactgtcatttgcaaagcaaggaaatactactactggtaataaaactacacatgcaagatgtcagataagaaataggtttatatttaccttcctgcgatgtggggttggtgcttgaagataaatgtgctgtttctagtttcttaaatagcccacacccctggatgcaaaaaggcagggttatttttacccatgagcatcctgtgcaggcaatagacttccctcactgtctccgcctgcagggaggagaatgtaccccactgcacctgagctcctggtccctcagccaagacctcaggggtccccagccagcctgctgctggggacccctgtgcttgctgcagtgtatggagcctcttgccttcccctggggaggcacccctgtaccccagcttccttcccctggccttttctggccccagtgctcctcctttacatagacttgttcacacagaaacgtgcacgcccccttttctccgccacttcaccagtttctgaaatccaacctcccagacttcacaggaagatagatattcttgagataatgaaaagtgatatcttcgcatacgaaaggaaaaaaggttgaggtatatatgatttttaactgtattaggggtgtatgaaccagtttaaaaacgaggttttatttactgtagagatgaatgcaaatcagaaccaatgatcccttggcctacttagttaaaaccagttcatacatcccttagggtttttattattattattattattattacagttgttattgttgtttttgttgttattattatttggggtttcttgtgttttttctttgcgactctccacactaaacttgcaatattgtggggagaagctgtgactaaactctacgctgcggtgagatgtagcagtaatcagctcccagcgacgtgtgtagctggggctgccgctcgcaataatcactattgatttaaagctttacttagccttgatctgtaccctcgtagtcaataaggtcttgccacattttattagtgaggtggagaaacgtattatttgtttgttgtttttgcccttcccccaccccccaatattaaactgtgaaatttgtgatttgtttaaactctgggtgaatcatagcttagtttgcatgtccagctaatttgtttctatacattttgtttgattctctttctccttctctcagggcttttacaaaaaaatatatatatatggatcttctgaaaagttttttgaggtgcaagttttttctcttttttttttttttttttttttctcattgattaatggacatgatgctgagattcaatcactacatgaaacacctggctgtgaaaacaaaacaacccagagggctgtgttccaagcagcgctggggaagctacgtaacagtcggatgccagttttggaagattcaccatgcgttctgaccctctgttcgtctctttcctctcctctttcttcaagaaggaaattgatcctagtgatttcagcccatgcattaaacaggaaacaataataaatttgtagaattcatatttttctaaagggaacttaaaaactgctgctacatgttatgtacaaaactggtttatgccacatgaacagagaatcacaagtttggttttggtactttttgttcctctttgtattcagttgtatagaacttccaaattcagaatgagaagaaagctgttctgtatcaaaccatttaagcaataaatgttatattttaaaagctgca

SEQ ID NO: 25590 - DNA, 243 bp, Homo sapiens
  source 1..243: mol_type = unassigned DNA
gcatcatgccagggagccaagcgtcctgcccggccgttgctccgactgtgtgttccaggagtggtggctctgaggtgtgaccctgcccacgtttgggcccagccaggttcagccccccaataaggagggcagcttgataacacaaagaaaacagtgtcaacgagtactaccaagagaagaagacaagagttttatagcagaggcttcttagaagcttaaacccctgtcccaatgacgtcaagt

SEQ ID NO: 25591 - DNA, 1021 bp, Homo sapiens
  source 1..1021: mol_type = unassigned DNA
gggccgagacgggggccgggacgacggctggggcgccggggtcgccagctcctcgcccacctccctccctgtgggagaagaggaggaggggaagtgactgcggagttgatgaactttgcacatccagaaacgccattttgattccttttccggaacaagtttgcatctctcctcggtctctccctgaagcccaccggtccccaacgcatcatgccagggagccaagcgtcctgcccggccgtaagttgctccgactgtgtgttccaggagtggtggctctgaggtgtgaccctgcccacgtttgggcccagccaggttcagccccccaataaggagggcagcttgataacacaaagaaaacagtgtcaacgagtactaccaagagaagaagacaagaggtcaacacagactcattttctactccgtgtgaatgatagctacagcaggggaaagtttcatagtctatcagtgggtcagaaaatggagttttatagcagaggcttcttagaagcttaaacccctgtcccaatgacgtcaagttcgcccgctggcttggaaggttcagacctatcttccatcaacaccatgatgtcggcggtcatgagtgtagggaaggtcacagagaatggcgggagcccccaggggatcaagtccccctcgaagcctccaggaccaaatcggattggcagaaggaaccaggaaacgaaagaggagaagtcttcctataactgccccctgtgtgagaagatttgcactacccagcaccagctgaccatgcacattcgccagcacaacacagacactggaggagccgaccactcatgcagcatctgcggaaagtcactgagctcggccagctccctcgatcgccacatgctggtgcactctggcgagaggccttacaagtgcactgtgtgtggccagtcatttaccaccaatgggaacatgcacagacatatgaagatccatgagaaggaccctaacagtgccacagccacagcccctccatctcctctgaaac

SEQ ID NO: 25592 - DNA, 2833 bp, Homo sapiens
  source 1..2833: mol_type = unassigned DNA
ttcagacacctgagagcatcctgttctgggtacagtgtgtgtatgtatatgtttgtttgaagccgctggtcctcgccttttactccttagctggacagcgggttcgggatctgccccatgactaaggctgaagtggaaagttgcgaagatagaacaagagttgttccttagggtggtgtccctaaacttgaaagtggacttggtcctgctcgcaggttgctccgactgtgtgttccaggagtggtggctctgaggtgtgaccctgcccacgtttgggcccagccaggttcagccccccaataaggagggcagcttgataacacaaagaaaacagtgtcaacgagtactaccaagagaagaagacaagaggtcaacacagactcattttctactccgtgtgaatgatagctacagcaggggaaagtttcatagtctatcagtgggtcagaaaatggagttttatagcagaggcttcttagaagcttaaacccctgtcccaatgacgtcaagttcgcccgctggcttggaaggttcagacctatcttccatcaacaccatgatgtcggcggtcatgagtgtagggaaggtcacagagaatggcgggagcccccaggggatcaagtccccctcgaagcctccaggaccaaatcggattggcagaaggaaccaggaaacgaaagaggagaagtcttcctataactgccccctgtgtgagaagatttgcactacccagcaccagctgaccatgcacattcgccagcacaacacagacactggaggagccgaccactcatgcagcatctgcggaaagtcactgagctcggccagctccctcgatcgccacatgctggtgcactctggcgagaggccttacaagtgcactgtgtgtggccagtcatttaccaccaatgggaacatgcacagacatatgaagatccatgagaaggaccctaacagtgccacagccacagcccctccatctcctctgaaacgtaggcgattgtcctccaagaggaaactgagtcacgatgccgagtcagagagagaagacccagcaccagctaaaaagatggtagaagacgggcagtcaggtgacttggagaagaaagctgatgaagtctttcactgcccagtatgtttcaaggagtttgtttgcaagtatggactggagacccacatggagacccattcagataacccactaagatgtgacatttgttgtgtcacctttcgaacacatcgaggactgctgcgtcacaacgcgcttgtccacaaacaacttcccagggatgcaatgggcagacctttcatacagaacaacccttcaattcctgctggcttccacgacttaggattcacggacttctcctgtaggaagtttcctcgcatttctcaggcctggtgcgaaacaaacctgcggaggtgcatcagcgagcaacaccgttttgtctgcgacacctgtgacaaggcgttccccatgctctgctcactggctctgcacaagcagacccatgtggcggcagaccagggtcaagaaaagccgcaggccacgcccctgcctggtgacgccctggaccagaagggcttcctggccttgcttggcctgcagcacaccaaagacgtcaggcctgcccccgccgaggagcccctgccggatgacaaccaggcaattcagctccagacactcaagtgtcagctacctcaggaccccggctgcaccaacctgctgagcctgtcacctttcgaagctgcttccctaggcggttctctcacagttctccccgcgaccaaggacagcataaagcacctgtccctgcagcccttccagaagggcttcatcatccagcctgacagcagcattgtggtcaagcccatctctggcgagtcggccatcgagctggcagacatccagcaaattctgaagatggcagcctcggctccccctcagatcagtcttccgcccttctccaaggcccctgccgccccactgcaggcgatcttcaagcacatgccccctctgaagccaaagcccctggtcacaccacggacggtggtggccacctccacgcccccgcctctcatcaacgcccagcaggcttccccgggctgtatcagccccagcctgccgccaccgcccctgaagctcctcaaaggctcagtggaggcggcctccaacgcccacctgctgcagtccaagtccgggacccagccccacgcggccacgcggctctccctgcagcagccgcgggcggagctgccgggccagcctgagatgaagacgcagctggagcaggacagcatcatcgaggccctgctgccgctgagcatggaggccaagatcaagcaggagatcacagagggggaactcaaggccttcatgacagcgcccggcggcaagaagacgcccgccatgcgcaaggtgctctacccctgccgcttctgcaaccaggtgtttgccttctcgggggtcttgcgtgcccacgtgcgctcccacctgggcatctcgccataccagtgcaacatctgcgactacatcgccgccgacaaggccgcgctcatccgccacctgcgcacgcacagtggggagcggccctacatttgcaagatctgccactaccccttcactgtcaaagccaactgcgagcggcacctgcgcaagaagcacctcaaggccacccgcaaggatatcgagaagaacatcgagtatgtgagtagcagcgcggccgagctggtggacgccttctgcgccccggacaccgtgtgccggctgtgcggcgaggacctcaagcactatcgtgccctgcgcatccacatgcgcacgcactgcggccgc

SEQ ID NO: 25593 - DNA, 998 bp, Homo sapiens
  source 1..998: mol_type = unassigned DNA
gcgggcgaggaagctgggcggggggccgagacgggggccgggacgacggctggggcgccggggtcgccagctcctcgcccacctccctccctgtgggagaagaggaggaggggaagtgactgcggagttgatgaactttgcacatccagaaacgccattttgattccttttccggaacaagtttgcatctctcctcggtctctccctgaagcccaccggtccccaacgcatcatgccagggagccaagcgtcctgcccggccgttgctccgactgtgtgttccaggagtggtggctctgaggtgtgaccctgcccacgtttgggcccagccaggttcagccccccaataaggagggcagcttgataacacaaagaaaacagtgtcaacgagtactaccaagagaagaagacaagaggtcaacacagactcattttctactccgtgtgaatgatagctacagcaggggaaagtttcatagtctatcagtgggtcagaaaatggaggtaatcagcagtgtggcgggagggttcttctttccctcctaggttttatagcagaggcttcttagaagcttaaacccctgtcccaatgacgtcaagttcgcccgctggcttggaaggttcagacctatcttccatcaacaccatgatgtcggcggtcatgagtgtagggaaggtcacagagaatggcgggagcccccaggggatcaagtccccctcgaagcctccaggaccaaatcggattggcagaaggaaccaggaaacgaaagaggagaagtcttcctataactgccccctgtgtgagaagatttgcactacccagcaccagctgaccatgcacattcgccagcacaacacagacactggaggagccgaccactcatgcagcatctgcggaaagtcactgagctcggccagctccctcgatcgccacatgctggtgcactctggcgagaggccttacaagtgcactgtgtgtggccagtcatttaccacca

SEQ ID NO: 25594 - DNA, 9816 bp, Homo sapiens
  source 1..9816: mol_type = unassigned DNA
tagttgtatatttcttaatttcttcaactgtcttatttttccccctctgtttctgatagcactaattgctgccttgcttttctcttgttaaactggcagtctgtaggtgtctgctgtgaacatgccattaggatgcacgaagctcccccccggagccagtggtccgagccattctcacatggtgctgcccttgacgttattggaatgtgcctgggggataggggttgctccgactgtgtgttccaggagtggtggctctgaggtgtgaccctgcccacgtttgggcccagccaggttcagccccccaataaggagggcagcttgataacacaaagaaaacagtgtcaacgagtactaccaagagaagaagacaagaggtcaacacagactcattttctactccgtgtgaatgatagctacagcaggggaaagtttcatagtctatcagtgggtcagaaaatggagttttatagcagaggcttcttagaagcttaaacccctgtcccaatgacgtcaagttcgcccgctggcttggaaggttcagacctatcttccatcaacaccatgatgtcggcggtcatgagtgtagggaaggtcacagagaatggcgggagcccccaggggatcaagtccccctcgaagcctccaggaccaaatcggattggcagaaggaaccaggtaagtgttcacacctagtggtgacctctggtgggttcaatccatgagaacattgggagatgtttccgagtttcctatgataaaaccttggaagaattgggaataaaacggacatacccagaggccttgatcatttttcaagggcaaaatttttatggcttatgttagtttcctttcatggagaaggttttctttgctgtggtgtcgatgttggtggaagtgcccttatttttggccccaccattggattttaactcaagctttcttcacttgatggccatggcagggaacatcactgatttctgtgatgtggtttgtttcctcattcacacagctggctatttttaagtatcttcagattaggtagcaaataagtattgcctgtgctagggctgccgttcagctttctatccttgaaaaagcacagaatttggcttcagataattccagttaagatgctgtttagtcatcttggattttcattgggcatcagatcagaacagggtaaagtaaataggtggaattgagaagggttaatgctgttacaaaagttgatgtcttctctgttgggaaataaatgaatcttcaatgtaagatgggacatttccttgaaaagttgttgctgtcttggcaacatactgttgaacagaaagaaggaaggtggtggaaggaggcagagagtgaatacttctcatttcaactctggatccatgtaatacgagttgacttcctcgtgtttaaagtttggtttaactaatttaatgagactatactaaatccttggagagaaggtggtcttgcatttgtccaggaaccagcaatggatgagaaagcaaacctgctgggcttttgtaaactaattttctttttttataaataatcctactgtggctgtccttatacagaattctctgagtattaatatgatggttttctataaattcttagaagtagagccttaattaaggctttcgatacaacttgccctacaagaaaagttgtaccagccccaaaccctgccagcagtatgggggaggatgcatttctccacaccttgctgaaggatggggacttggcagagttcagtgatgttttagggttggaacattgattcctttctctctctcttttttcccttttctccttgtgcctctcttcctgtgggtgcctgagaaaatactcagcctgtatgactgtggcctgagtcgagaaggagtgctagctctgagaagaaaaggaaacgaaagaggagaagtcttcctataactgccccctgtgtgagaagatttgcactacccagcaccagctgaccatgcacattcgccagcacaacacagacactggaggagccgaccactcatgcagcatctgcggaaagtcactgagctcggccagctccctcgatcgccacatgctggtgcactctggcgagaggccttacaagtgcactgtgtgtggccagtcatttaccaccaatgggaacatgcacagacatatgaagatccatgagaaggaccctaacagtgccacagccacagcccctccatctcctctgaaacgtaggcgattgtcctccaagaggaaactgagtcacgatgccgagtcagagagagaagacccagcaccagctaaaaagatggtagaagacgggcagtcaggtgacttggagaagaaagctgatgaagtctttcactgcccagtatgtttcaaggagtttgtttgcaagtatggactggagacccacatggagacccattcagataacccactaagatgtgacatttgttgtgtcacctttcgaacacatcgaggactgctgcgtcacaacgcgcttgtccacaaacaacttcccagggatgcaatgggcagacctttcatacagaacaacccttcaattcctgctggcttccacgacttaggattcacggacttctcctgtaggaagtttcctcgcatttctcaggcctggtgcgaaacaaacctgcggaggtgcatcagcgagcaacaccgttttgtctgcgacacctgtgacaaggcgttccccatgctctgctcactggctctgcacaagcagacccatgtggcggcagaccagggtcaagaaaagccgcaggccacgcccctgcctggtgacgccctggaccagaagggcttcctggccttgcttggcctgcagcacaccaaagacgtcaggcctgcccccgccgaggagcccctgccggatgacaaccaggcaattcagctccagacactcaagtgtcagctacctcaggaccccggctgcaccaacctgctgagcctgtcacctttcgaagctgcttccctaggcggttctctcacagttctccccgcgaccaaggacagcataaagcacctgtccctgcagcccttccagaagggcttcatcatccagcctgacagcagcattgtggtcaagcccatctctggcgagtcggccatcgagctggcagacatccagcaaattctgaagatggcagcctcggctccccctcagatcagtcttccgcccttctccaaggcccctgccgccccactgcaggcgatcttcaagcacatgccccctctgaagccaaagcccctggtcacaccacggacggtggtggccacctccacgcccccgcctctcatcaacgcccagcaggcttccccgggctgtatcagccccagcctgccgccaccgcccctgaagctcctcaaaggctcagtggaggcggcctccaacgcccacctgctgcagtccaagtccgggacccagccccacgcggccacgcggctctccctgcagcagccgcgggcggagctgccgggccagcctgagatgaagacgcagctggagcaggacagcatcatcgaggccctgctgccgctgagcatggaggccaagatcaagcaggagatcacagagggggaactcaaggccttcatgacagcgcccggcggcaagaagacgcccgccatgcgcaaggtgctctacccctgccgcttctgcaaccaggtgtttgccttctcgggggtcttgcgtgcccacgtgcgctcccacctgggcatctcgccataccagtgcaacatctgcgactacatcgccgccgacaaggccgcgctcatccgccacctgcgcacgcacagtggggagcggccctacatttgcaagatctgccactaccccttcactgtcaaagccaactgcgagcggcacctgcgcaagaagcacctcaaggccacccgcaaggatatcgagaagaacatcgagtatgtgagtagcagcgcggccgagctggtggacgccttctgcgccccggacaccgtgtgccggctgtgcggcgaggacctcaagcactatcgtgccctgcgcatccacatgcgcacgcactgcggccgcggcctgggcgggggccacaagggccgcaagcccttcgagtgcaaggagtgcagcgccgcgttcgcggccaagcgcaactgcatccaccacatcctcaagcagcacctgcacgtgcccgagcaggacatcgagagctacgtgctggccgccgacggcctgggccccgcagaggcgccggccgctgaggcgtcggggcgcggggaggacagtggctgcgctgcccttggtgactgcaagcccctcactgccttcctggaaccccagaacggctttcttcacaggggccccacccagcctccacctccccatgtctcgatcaagttggagcccgccagtagctttgcggtggacttcaatgagcccctggacttctcgcagaagggcctggccctggtccaagtgaagcaggaaaacatctcctttctgagcccttcttccctggtcccctatgactgctccatggagcccatcgacctgtccatccccaagaacttcaggaaaggggacaaggatttggccactcccagcgaagccaagaagcctgaggaggaggcggggagcagcgagcagccctctccctgcccagcacccggcccttctcttcctgtaactttggggcccagcggaatcctggaaagccccatggcccctgctccggcggccaccccggaacccccagcacagcccctgcagggccctgttcagctggcggtcccaatctactcctcagccctggtcagcagccctccactcgtgggcagctcagccctcctgagtggcacagccttgctgcgtccactgcggcccaagcccccgctgcttttgccaaagccccccgtgacagaagagctgcccccgctggcctccattgcccagatcatctcatctgtatcctcggcccccaccctgctgaaaaccaaggtggcggacccagggcccgcaagcactggcagtaacaccacggcttcagacagcttaggaggttctgtccccaaagccgccaccaccgccacccccgctgccaccaccagcccaaaagagtctagtgagcctcccgctccagccagcagcccagaggctgcctctcccaccgagcagggcccagcgggcacgtcgaagaagaggggccggaaaagggggatgaggagccgaccccgcgccaacagcggcggggtggacctggactccagcggggagtttgccagcatcgagaagatgctggccaccacagacaccaacaagttcagtccgtttctgcagacagcggaggacaacactcaggatgaggtggccggagcccctgccgaccaccatgggcccagtgatgaagagcagggcagtcccccagaagacaagctgctgagggccaagcggaactcgtacaccaactgcctgcagaagatcacctgtccccactgtccccgggttttcccttgggccagctccctacagaggcacatgctcacacacactgacagtcagtcggatgcggagactgcagccgccgcgggcgaagtgctagacctcacctcacgggacagagagcagccgtcggagggcgccactgagctccgccaggtcgcaggggatgcgcctgtggagcaggccacggcggaaacggcctcgccggtgcaccgggaagagcacgggcgtggggagagccatgagccggaggaggagcatggcactgaggagagcactggggacgccgacggcgcggaagaggacgcgtcgagcaaccagagcctggacctggacttcgccaccaagctcatggacttcaagctggcggagggcgacggcgaggcaggcgccgggggcgcggcctcgcaggagcagaagctcgcctgcgacacctgtgggaagagcttcaagttcctgggcaccctgagccgccaccggaaggcgcacggccgccaggagcccaaggacgagaagggagatggcgccagcactgcagaggaggggccccagcccgcccctgaacaggaggagaagccccccgagaccccggcagaggtggtggagtcggccccgggtgccggggaggccccggcggaaaagctcgcggaggagacggagggcccctccgacggggagagcgcggccgagaaaaggtcctcagagaagagcgacgatgacaagaaaccaaagacagactcccccaaaagcgtggccagcaaggcagacaagaggaagaaggtctgcagcgtgtgcaacaagcggttctggtcgctgcaggacctgacccggcacatgcgctcccacacaggggaaaggccatacaaatgtcagacctgcgagcgaaccttcaccttgaagcacagcctggttcgccaccagcggatccaccagaaagccaggcatgccaaacaccacgggaaggacagcgacaaggaagagcggggtgaggaggacagcgagaatgagtccacccacagcggcaacaacgccgtctcagagaacgaggctgagctggctcccaatgccagcaaccacatggctgtcacccggagccggaaggagggcttggccagtgccaccaaggactgcagccacagggaggagaaggtcacggcagggtggccgtctgagcctggccagggtgaccttaacccagagagcccggcggccctggggcaggacctgctggagccgcgcagcaagaggcctgcccacccaatcctggccacagctgatggcgcctcccagctcgtggggatggagtgacagcctcagtccccctcagcacagacaaaagccagcagagcaaagcgtctatacttcatggggtttcctcagtgccctttggctgttgaggagtgagagagagagagagagagagagagagagagagagagagagacaagcaggagcgtggctgctcgctcagtgccatagccttaccgcagcctgcgcgggaggccacagcccgtgccgattccagtgccttaactacttaccggatccctccatattatcatgggtgttgtatttttccaaaatgacttcttaaacaaaacaaatattataatgaattgtctggagaggacctcttcatttgagcattagcgttattttgtattggtgtgtgtgagcttgttcttgtgaatctgtgatagcaccgtttgttctgtgagctggaaacagaaggaaaaaacatacccttgggtacccatagccaataactggaagaaaatgatgtgaatttcatgtaaatgaccagaggaaagatggataagatgataatttcttaaatagacattttccttttttctttgtgcttcatggtggagctgtcatctggtccttggtattacaggatgtggttgatgaaggtttccaatatggtttcaggccaaaaccagggaagattctagcttcagcctcatgtccatttccagtctgtcagcattagacatggtcactgttcaagtttcaagacatccattcttaactatagagaagagttactcccctggcgtcttaacctatggaaaacatgcacggataggatatatttgattgcctcctcttccctttcagtatatgtattattaatattattattattattattattattagttcatcagtttgctgttctctgcagtgagcagaatcaaatgggcaatatttgtcctgggagacctgtgccgcacccaggtccccgtgttaacgtgtgcctgcggttgtggttggcaccctcgggtggtagctcttctactgtaatgagacaagcctttcttctgtcactgcagaatttagaaggggccgtgagcagtcttcccaagcatggtccaggagcagctcagagagggtggagtgaggatgcatgcatccagggaacaggcatcaagaagccagggccgtgcctggagcactgcagagatgactttggagaaagcaaagcagtgacccagtgaccaggcacattactcgtgagcgaggtattcccagtcttcctgctaagcctaatccaagccttacccagctgtgctactgtcatttgcaaagcaaggaaatactactactggtaataaaactacacatgcaagatgtcagataagaaataggtttatatttaccttcctgcgatgtggggttggtgcttgaagataaatgtgctgtttctagtttcttaaatagcccacacccctggatgcaaaaaggcagggttatttttacccatgagcatcctgtgcaggcaatagacttccctcactgtctccgcctgcagggaggagaatgtaccccactgcacctgagctcctggtccctcagccaagacctcaggggtccccagccagcctgctgctggggacccctgtgcttgctgcagtgtatggagcctcttgccttcccctggggaggcacccctgtaccccagcttccttcccctggccttttctggccccagtgctcctcctttacatagacttgttcacacagaaacgtgcacgcccccttttctccgccacttcaccagtttctgaaatccaacctcccagacttcacaggaagatagatattcttgagataatgaaaagtgatatcttcgcatacgaaaggaaaaaaggttgaggtatatatgatttttaactgtattaggggtgtatgaaccagtttaaaaacgaggttttatttactgtagagatgaatgcaaatcagaaccaatgatcccttggcctacttagttaaaaccagttcatacatcccttagggtttttattattattattattattattacagttgttattgttgtttttgttgttattattatttggggtttcttgtgttttttctttgcgactctccacactaaacttgcaatattgtggggagaagctgtgactaaactctacgctgcggtgagatgtagcagtaatcagctcccagcgacgtgtgtagctggggctgccgctcgcaataatcactattgatttaaagctttacttagccttgatctgtaccctcgtagtcaataaggtcttgccacattttattagtgaggtggagaaacgtattatttgtttgttgtttttgcccttcccccaccccccaatattaaactgtgaaatttgtgatttgtttaaactctgggtgaatcatagcttagtttgcatgtccagctaatttgtttctatacattttgtttgattctctttctccttctctcagggcttttacaaaaaaatatatatatatggatcttctgaaaagttttttgaggtgcaagttttttctcttttttttttttttttttttttctcattgattaatggacatgatgctgagattcaatcactacatgaaacacctggctgtgaaaacaaaacaacccagagggctgtgttccaagcagcgctggggaagctacgtaacagtcggatgccagttttggaagattcaccatgcgttctgaccctctgttcgtctctttcctctcctctttcttcaagaaggaaattgatcctagtgatttcagcccatgcattaaacaggaaacaataataaatttgtagaattcatatttttctaaagggaacttaaaaactgctgctacatgttatgtacaaaactggtttatgccacatgaacagagaatcacaagtttggttttggtactttttgttcctctttgtattcagttgtatagaacttccaaattcagaatgagaagaaagctgttctgtatcaaaccatttaagcaataaatgttatattttaaaagc

SEQ ID NO: 25595 - DNA, 3834 bp, Homo sapiens
  source 1..3834: mol_type = unassigned DNA
gcctggccctggagacacgtctggagagctgttctcctaatatgggtagggtcgggcgtggagctggcagcggcgctgtgtgcgcctgcgcggggcgccgagacagggcgtgttcgctgttcagtgccggtgttgcagggagtgagggcagctggagtgcgttctgccgaagcttgtggttgcacgcccatcgtcttaggggctaccttccgtgaccatgtccaagtctctgaagaagttggtggaggagagccgggagaagaaccagcccgaggtggacatgagtgaccggggcatctccaacatgctggatgtcaacggcctctttaccttatcccatatcacacaactggtcctcagccataacaagctaacaatggtgccaccgaacatcgcagaactgaagaatttggaggtgctcaacttttttaataaccaaatcgaggagctgcccacacagatcagtagccttcagaaactcaaacacctgaaccttggcatgaacaggctgaacactttgccacgaggcttcggctccctgccagctcttgaggttctggacttgacgtacaacaacttgagcgaaaattctcttcctggaaacttcttctacctgaccaccctgcgtgcactctatctaagtgacaacgattttgaaatcctgccgccagatattgggaagctcacaaagttgcagatactcagccttagggataacgacctgatctcgctgcctaaggaaatcggggagcttacccagcttaaagagctccacattcaggggaaccgcctcaccgttctgcccccagaactaggaaacttggatttaactggccagaagcaggtattcaaagcagagaacaatccctgggtgacccccattgcagaccagttccagcttggcgtgtcccatgtttttgagtatatccgttctgagacatacaaatacctctacggcagacacatgcaggccaacccagaaccaccgaagaagaataatgacaaatcgaaaaagatcagccggaaacccctggcagccaagaacagataaggaagggattggcatcggctggccttccagcaccttctctctccaacacttcattctctcttgccctgtctctcaaataaacccaatgctgcgtgtgaggccttttttatttttcttttcactctctttctaatgcttcccaccttaccttttagattcttttgctaggtgggagattgttataaggtctttaaaccatttccatttgtttctttaacattaccaaaagcagggaacaaagctcttattcaactgcgaattccatagtgggctctggcttttcttgaatagatatcacaaggttgcttattatcaaaagaataattaaaatcatgtaaccatttaaatgtcactgttaacacttttcactctttctgttgattcacctaactcattattttgctttattaaaagtcttccttcaccaccgagatatgctaatttaacttacaaatgattttaataaaatcttgagtttgtatcacatgttacttattgactcagaataaaagaacagtctgatcttggggtataacacattttcatttacttttctcccccaaaatcatcttatccaattttattggttatacatgataaacttttcatgaaagaaatgcaaaattaaatcacagttcgtttcttctcacattaatttgtcaagttttttttttctttgaagactttctaaattaggaagcagaaaaacaaatctctaggagattctgccaaaggattttggaaagtagcattccttcgccgaagaaatggtgatttctgccaggggctggtagacaagaactgtgaaagagagagagaaaaaacctcaactgtgtattttgtcacggcggaaaatctgctcgcatcgaagcattcttctaagcgacttcgatgccaaggaagttgtgtaaatgtgcacgcgctacaccacacccagggtggaaaccacagttgcagagtcattaaacaatcaattgtttgtttaacatctgtgataggcagctttccttcttttcaacagtgatacctacgaaaatcaaaataaatgcaagctgaggttttgtgctcactgaaagggctgtcaaccccagaaggccgacacaaaaaaaatggtatgtgaagatgcaccgtcttttcaaatggcctgggagagtcaaatggcctgggagagggggcctgcccttctctgctgtgtcctttcggcttcccagttgagctcccaagaccaggacccactggggcatataaaatctctgctgtatcctttcggcttcccagttgagctcccaagaccaggacccactggggcatataaaaaagtcaaaaatcaaaatcaaacaacaagttctgagttacttaggaaacagacttcgcatttcaatcagagaggccacagagcaaggtctaaacttctggcttctagacaaattcctgatagaacatttaaatgtgggaagtggcttccccaggtcccatcccctgtttagggatagagttgatatcatttttataggtgccatgtatgcctctgcctgaatttttttaattgacttttgagcttttgagattgcacgagggagaacaaggcctttgctgttgtggataggaaagacttaacctaaaattaaaccagcaagaaagcattagtaaaaatctaacaatatgaagggctcttatgagtcatttttttcaaaagatgaaaactccagaaacgcacaggaacgaaatacctcccagaaacatgaagcaatcatcgaagactcactggtaatatttttaaaaagtatacagatcaaagcaaaaagaagccatgtgtaacaaagagaaatgtgcaaatattttttaaggcagtattaagtgcaagaggagtaacatgaaataaacattctttcacatggctactgggaatataaatttcgctccagaaaggccgtagcagtttgacgataggtggcaaaaccttaagattgtgtactggggcccagaatttttatttctaggaatgtatcctgaggaaattatccgagatccccacaaactgcaatgtttaggaattgtccttatagcattgcatacacaagaaaaacagagaaaagcctgatccctgtcagtggaaaaggggttcaatgaattacggtgtgtctgcatgaggcttttatgacattaaaaattgttgaacaacggccaggcacagtggctcatgcctgtaatcctaacactttgggaggccaaggtgggaagattgcctgagctcaggagtttgagaccagcctgggcaacacggtgaaaccccgtctctactaaaatacaaaaaattagccgggcgtcgcagcatgcgcctgtagtcccagctgctcaggaggctgaggcaggagaattgattgaacccgggaggcagaggttgcactgagctgagattaagccaccgcactccagcctgggcgacagagcaagattccgttcccaagaaaaaaaaattgttcaacaataagggcaaagggagagaatcataacatctgattaaacagaaaaagcaagatttttaaaactaactatataaggatggtcccagctgtgtcaaaaggaagcttgtttgtaatacgtgtgcataaaaattaaatagaggtgaacacaattattttaaggcagttaaattatctctgtattgtgaactaagactttctagaattttacttattcattctgtacttaaattttttctaatgaacacatatacttttgtaatcagaaaatattaaatgcatgtatttttcaaaatcaaa

SEQ ID NO: 25596 - DNA, 955 bp, Homo sapiens
  source 1..955: mol_type = unassigned DNA
ggcagcggcgctgtgtgcgcctgcgcggggcgccgagacagggcgtgttcgctgttcagtgccggtgttgcagggagtgagggcagctggagtgcgttctgccgaagcttgtggttgcacgcccatcgtcttaggggctaccttccgtgttaccttatcccatatcacacaactggtcctcagccataacaagctaacaatggtgccaccgaacatcgcagaactgaagaatttggaggtgctcaacttttttaataaccaaatcgaggagctgcccacacagatcagtagccttcagaaactcaaacacctgaaccttggcatgaacaggctgaacactttgccacgaggcttcggctccctgccagctcttgaggttctggacttgacgtacaacaacttgagcgaaaattctcttcctggaaacttcttctacctgaccaccctgcgtgcactctatctaagtgacaacgattttgaaatcctgccgccagatattgggaagctcacaaagttgcagatactcagccttagggataacgacctgatctcgctgcctaaggaaatcggggagcttacccagcttaaagagctccacattcaggggaaccgcctcaccgttctgcccccagaactaggaaacttggatttaactggccagaagcaggtattcaaagcagagaacaatccctgggtgacccccattgcagaccagttccagcttggcgtgtcccatgtttttgagtatatccgttctgagacatacaaatacctctacggcagacacatgcaggccaacccagaaccaccgaagaagaataatgacaaatcgaaaaagatcagccggaaacccctggcagccaagaacagataaggaagggattggcatcggctggccttccagcaccttctctctccaacacttcattctctcttgccctgtctctcaaataaa

SEQ ID NO: 25597 - DNA, 3919 bp, Homo sapiens
  source 1..3919: mol_type = unassigned DNA
gggcagctggagtgcgttctgccgaagcttgtggttgcacgcccatcgtcttaggggctaccttccgtggtgagtgtgtgcggtgttgcacttggggttgcttctcgctgcgtggccgcagcggggctgaacccttcccactccatcccctccccgcacccggaccagcccctgggacgccctcggacgcccacccgctccaaccctggggaagcctcagagtggcagcgaaggcctcttgcctttccgcctctgcgcttgctgtcatcgcccacgtgctttgttgttgttcggtgcagaccatgtccaagtctctgaagaagttggtggaggagagccgggagaagaaccagcccgaggtggacatgagtgaccggggcatctccaacatgctggatgtcaacggcctctttaccttatcccatatcacacaactggtcctcagccataacaagctaacaatggtgccaccgaacatcgcagaactgaagaatttggaggtgctcaacttttttaataaccaaatcgaggagctgcccacacagatcagtagccttcagaaactcaaacacctgaaccttggcatgaacaggctgaacactttgccacgaggcttcggctccctgccagctcttgaggttctggacttgacgtacaacaacttgagcgaaaattctcttcctggaaacttcttctacctgaccaccctgcgtgcactctatctaagtgacaacgattttgaaatcctgccgccagatattgggaagctcacaaagttgcagatactcagccttagggataacgacctgatctcgctgcctaaggaaatcggggagcttacccagcttaaagagctccacattcaggggaaccgcctcaccgttctgcccccagaactaggaaacttggatttaactggccagaagcaggtattcaaagcagagaacaatccctgggtgacccccattgcagaccagttccagcttggcgtgtcccatgtttttgagtatatccgttctgagacatacaaatacctctacggcagacacatgcaggccaacccagaaccaccgaagaagaataatgacaaatcgaaaaagatcagccggaaacccctggcagccaagaacagataaggaagggattggcatcggctggccttccagcaccttctctctccaacacttcattctctcttgccctgtctctcaaataaacccaatgctgcgtgtgaggccttttttatttttcttttcactctctttctaatgcttcccaccttaccttttagattcttttgctaggtgggagattgttataaggtctttaaaccatttccatttgtttctttaacattaccaaaagcagggaacaaagctcttattcaactgcgaattccatagtgggctctggcttttcttgaatagatatcacaaggttgcttattatcaaaagaataattaaaatcatgtaaccatttaaatgtcactgttaacacttttcactctttctgttgattcacctaactcattattttgctttattaaaagtcttccttcaccaccgagatatgctaatttaacttacaaatgattttaataaaatcttgagtttgtatcacatgttacttattgactcagaataaaagaacagtctgatcttggggtataacacattttcatttacttttctcccccaaaatcatcttatccaattttattggttatacatgataaacttttcatgaaagaaatgcaaaattaaatcacagttcgtttcttctcacattaatttgtcaagttttttttttctttgaagactttctaaattaggaagcagaaaaacaaatctctaggagattctgccaaaggattttggaaagtagcattccttcgccgaagaaatggtgatttctgccaggggctggtagacaagaactgtgaaagagagagagaaaaaacctcaactgtgtattttgtcacggcggaaaatctgctcgcatcgaagcattcttctaagcgacttcgatgccaaggaagttgtgtaaatgtgcacgcgctacaccacacccagggtggaaaccacagttgcagagtcattaaacaatcaattgtttgtttaacatctgtgataggcagctttccttcttttcaacagtgatacctacgaaaatcaaaataaatgcaagctgaggttttgtgctcactgaaagggctgtcaaccccagaaggccgacacaaaaaaaatggtatgtgaagatgcaccgtcttttcaaatggcctgggagagtcaaatggcctgggagagggggcctgcccttctctgctgtgtcctttcggcttcccagttgagctcccaagaccaggacccactggggcatataaaatctctgctgtatcctttcggcttcccagttgagctcccaagaccaggacccactggggcatataaaaaagtcaaaaatcaaaatcaaacaacaagttctgagttacttaggaaacagacttcgcatttcaatcagagaggccacagagcaaggtctaaacttctggcttctagacaaattcctgatagaacatttaaatgtgggaagtggcttccccaggtcccatcccctgtttagggatagagttgatatcatttttataggtgccatgtatgcctctgcctgaatttttttaattgacttttgagcttttgagattgcacgagggagaacaaggcctttgctgttgtggataggaaagacttaacctaaaattaaaccagcaagaaagcattagtaaaaatctaacaatatgaagggctcttatgagtcatttttttcaaaagatgaaaactccagaaacgcacaggaacgaaatacctcccagaaacatgaagcaatcatcgaagactcactggtaatatttttaaaaagtatacagatcaaagcaaaaagaagccatgtgtaacaaagagaaatgtgcaaatattttttaaggcagtattaagtgcaagaggagtaacatgaaataaacattctttcacatggctactgggaatataaatttcgctccagaaaggccgtagcagtttgacgataggtggcaaaaccttaagattgtgtactggggcccagaatttttatttctaggaatgtatcctgaggaaattatccgagatccccacaaactgcaatgtttaggaattgtccttatagcattgcatacacaagaaaaacagagaaaagcctgatccctgtcagtggaaaaggggttcaatgaattacggtgtgtctgcatgaggcttttatgacattaaaaattgttgaacaacggccaggcacagtggctcatgcctgtaatcctaacactttgggaggccaaggtgggaagattgcctgagctcaggagtttgagaccagcctgggcaacacggtgaaaccccgtctctactaaaatacaaaaaattagccgggcgtcgcagcatgcgcctgtagtcccagctgctcaggaggctgaggcaggagaattgattgaacccgggaggcagaggttgcactgagctgagattaagccaccgcactccagcctgggcgacagagcaagattccgttcccaagaaaaaaaaattgttcaacaataagggcaaagggagagaatcataacatctgattaaacagaaaaagcaagatttttaaaactaactatataaggatggtcccagctgtgtcaaaaggaagcttgtttgtaatacgtgtgcataaaaattaaatagaggtgaacacaattattttaaggcagttaaattatctctgtattgtgaactaagactttctagaattttacttattcattctgtacttaaattttttctaatgaacacatatacttttgtaatcagaaaatattaaatgcatgtatttttcaaaatcaaa

SEQ ID NO: 25598 - DNA, 1746 bp, Homo sapiens
  source 1..1746: mol_type = unassigned DNA
agcaagcggcctgtgcccagatcctgggagaaccccagccgagcccagcctagcccgagcccagcccgagcggagccggagccccaagcccgagccgcgcccagcccgagcagagccctccagccgctcaccccgcgtgccaccccagcgaccctcagccgctctctgcccttctctcggccccgcgcccgccctcgcggcccctctgcccaatgaaactggccgcgatgatcaagaagatgtgcccgagcgactcggagctgagtatcccggccaagaactgctatcgcatggtcatcctcggctcgtccaaggtgggcaagacggccatcgtgtcgcgcttcctcaccggccgcttcgaggacgcctacacgcctaccatcgaggacttccaccgcaagttctactccatccgcggcgaggtctaccagctcgacatcctcgacacgtccggcaaccacccgttccccgccatgcggcgcctctccatcctcacaggagacgttttcatcctggtgttcagtctggacaaccgcgactccttcgaggaggtgcagcggctcaggcagcagatcctcgacaccaagtcttgcctcaagaacaaaaccaaggagaacgtggacgtgcccctggtcatctgcggcaacaagggtgaccgcgacttctaccgcgaggtggaccagcgcgagatcgagcagctggtgggcgacgacccccagcgctgcgcctacttcgagatctcggccaagaagaacagcagcctggaccagatgttccgcgcgctcttcgccatggccaagctgcccagcgagatgagcccagacctgcaccgcaaggtctcggtgcagtactgcgacgtgctgcacaagaaggcgctgcggaacaagaagctgctgcgggccggcagcggcggcggcggcggcgacccgggcgacgcctttggcatcgtggcacccttcgcgcgccggcccagcgtacacagcgacctcatgtacatccgcgagaaggccagcgccggcagccaggccaaggacaaggagcgctgcgtcatcagctaggagccccgccgcgctggcgacacaacctaaggaggacctttttgttaagtcaaatccaacggcccggtgcgccccaggccgggagcgcgcgcggactggcgtctcccctcccggcgatccgcccccagcactggggaggcgccactgaaccgagaagggacggtcatctgctccggaaggaaagagaacgggccaagactgggactattccccacccccggtcccccattgaggcccgccacccccataactttgggagcgagggcccagccgagggtggatttatcttctcaaagacctaagagtgagcgcggggtgggggagggatgtgaagttatccagcctctgctaggcttcaagaaaccgtcatgcccgcttgagggtcaggacccacggggcattatcttgtctgtgattccgggttgctgtgacagccggtagagcctctgccctcccaaaactaagcgggggggcgtgggtcaaatcatagccaagtgacttgtttacatgtgagtgaaactgcacaaaggaacacaaaacaaaacttgcactttaacggtagttccggtgtcaacatggacacgaacaaaaccttacccaggtgtttatactgtgtgtgtctgaggtctttaaagttattgctttatttggttttttaatatacaataaaataatttaaaatggaaaa

SEQ ID NO: 25599 - DNA, 3412 bp, Homo sapiens
  source 1..3412: mol_type = unassigned DNA
gcgcggggagaaagaagccgtccctccggcgctgggagagctgcagagccgcgggcagagaaggaggccgcggccgagcccggcagcccgataccccccatccgagcgaccccctttggggcaggcggagaaggtggcataggcgaccaggagggttcgcccacctgggacacgcacccacagtcacctccaaaggaccccccctccccaagtctctaggagctgctccttcatcactggagtcgcccctacctctctgcccccagcccgagagccccaggcggggacccccggatcggacgtccccaagcctccgggcacctggctcagcaggaggcccccggctcggggcagggcagggccggcggcggcgagccggagcccgccccctgcccgggccccgccgagccctcggagcccacccatggggcacctgccccttgcgcctccttgcccggccgcgcccagcccggcgtcccgagcagcgcaggggaggatccccgcgcagtgacccgggagccaccacagactctgggaggctcggcggctggagcagcaggcagctccccgcagctcccggcgcttccaggcagctctctgagccgtgccagaggcccggcccgccattcccagccccgagccatgatgaagactttgtccagcgggaactgcacgctcagtgtgcccgccaaaaactcataccgcatggtggtgctgggtgcctctcgggtgggcaagagctccatcgtgtctcgcttcctcaatggccgctttgaggaccagtacacacccaccatcgaggacttccaccgtaaggtatacaacatccgcggcgacatgtaccagctcgacatcctggatacctctggcaaccaccccttccccgccatgcgcaggctgtccatcctcacaggggatgtcttcatcctggtgttcagcctggataaccgggagtccttcgatgaggtcaagcgccttcagaagcagatcctggaggtcaagtcctgcctgaagaacaagaccaaggaggcggcggagctgcccatggtcatctgtggcaacaagaacgaccacggcgagctgtgccgccaggtgcccaccaccgaggccgagctgctggtgtcgggcgacgagaactgcgcctacttcgaggtgtcggccaagaagaacaccaacgtggacgagatgttctacgtgctcttcagcatggccaagctgccacacgagatgagccccgccctgcatcgcaagatctccgtgcagtacggtgacgccttccaccccaggcccttctgcatgcgccgcgtcaaggagatggacgcctatggcatggtctcgcccttcgcccgccgccccagcgtcaacagtgacctcaagtacatcaaggccaaggtccttcgggaaggccaggcccgtgagagggacaagtgcaccatccagtgagcgagggatgctggggcggggcttggccagtgccttcagggaggtggccccagatgcccactgtgcgcatctccccaccgaggccccggcagcagtcttgttcacagaccttaggcaccagactggaggcccccgggcgctggcctccgcacattcgtctgccttctcacagctttcctgagtccgcttgtccacagctccttggtggtttcatctcctctgtgggaggacacatctctgcagcctcaagagttaggcagagactcaagttacaccttcctctcctggggttggaagaaatgttgatgccagaggggtgaggattgctgcgtcatatggagcctcctgggacaagcctcaggatgaaaaggacacagaaggccagatgagaaaggtctcctctctcctggcataacacccagcttggtttgggtggcagctgggagaacttctctcccagccctgcaactcttacgctctggttcagctgcctctgcaccccctcccacccccagcacacacacaagttggcccccagctgcgcctgacattgagccagtggactctgtgtctgaagggggcgtggccacacctcctagaccacgcccaccacttagaccacgcccacctcctgaccgcgttcctcagcctcctctcctaggtccctccgcccgacagttgtgctttgttgtggttgcagctgttttcgtgtcatgtatagtagtagaaatggaaatcattgtactgtaaaagcctagtgactccctccttggccaggccctcacccagttcagatccacggcctccacccgggacgccttcctcctctgctcccaaacagggtttccgtggcctgtttgcagctagacattgacctccgccattgagctccacggtttacagacaattgcacaagcgtggggtgggcaggccaggactgcttttttttaatgctcccatttcacagaggataccaccgagactcggaggggacacgatgagcaccaggccccacctttgtcccctagcaaattcagggtacagctccacctagaaccaggctgccctctactgtgctcgttcctcaagcatttattaagcacctactgggtgctgggttcactgtgtcctaggaaaccaagagggtccccagtcctggcctctgcccgcccctgctgccccaccaccttctgcacacacagcggtggggaggcggggaggagcagctgggacccagaactgagcctgggagggatccgacagaaaagctcagggcgggtcttctccttgtgcccgggattgggctatgctgggtaccaccatgtactcaggcatggtgggttttgaacccataaaccaaaggcccttgtcatcagctcttaacaagtatattttgtattttaatctctctaaacatattgaagttttagggccctaaggaaccttagtgatcttctattgggtctttctgaggttcagagagggtaagtaacttcctccaggtcacacagcaagtctgtgggtggcagaagcaagctagcgctgggcattcagtacataccacgatgtgctccctctcttgatgcttggcccctggggccttcagggctttgggacatcttgtcctcaaccctctccctagatcagtctgtgagggtccctgtagatattgtgtacaccatgcccatgtatatacaagtacacacagatgtacacacagatgtacacatgctccagccccagctctgcatacctgcacctgcaccccagccttggcccctgcctgcgtctgtgctcaaagcagcagctccaaccctgcctctgtccccttccccacccactgcctgagccttctgagcagaccaggtaccttggctgcaccggtgtgtggcccgctctcacccaggcacagccccgccaccatggatctccgtgtacactatcaataaaagtgggtttgttacaaagc

SEQ ID NO: 25600 - DNA, 2264 bp, Homo sapiens
  source 1..2264: mol_type = unassigned DNA
gcagtccctccgccgctagtcggagcgagcgcgagtgaggagacccccgccgggccactggcacttgcttctgcggcgagtcccacccacgaccgcagcccagcaactcgcaaacgcaacctgaagcctgggctgcgcagtgtgggagggcttcgcgatcttgggggacccattccgaacttgcagaggaccgtagctctcctggcctggagagtgtgaacaggattgtggactcttccaagattcacaatgatatggtgaatccaaagactggaaccaaaaagatttactcagtgctttagttttaacaacagtaaattgtctaccaacacccatcatggctaaaagtgcggaggtcaaactggcaatatttgggagagcaggcgtgggcaagtcagctcttgtagtgagatttctgaccaaacggttcatctgggaatatgatcccaccctcgaatcaacctaccgacaccaagcaaccatcgatgatgaagttgtttccatggagatactagacactgctggtcaggaagataccattcagagggaggggcacatgcgatggggggaaggctttgtgctggtctacgacattactgaccgaggaagttttgaggaagtgctgccacttaagaacatcctagatgagatcaaaaagcccaagaatgtgactctcatcttggttggaaacaaagctgacttggaccactccaggcaggttagcacagaagaaggagagaagctggccacagaattggcttgtgctttttacgagtgctctgcctgcactggagaagggaacatcacagagatattctatgaattgtgtcgagaggtgcgtcgccggaggatggtgcagggcaagacgaggcgacgcagctccaccacgcatgtcaagcaagccattaacaagatgctcaccaaaatcagtagttaggcagcccagctgaggtggaccaactaattggaaacactcttccccttctgttcccctttcaaaaataaaacaaaatattgcattctttgtttggattctgagaaatgtctgggcttcccattgtttctggcctctaataggttgggaagttttagcgtgttttatgcaatttcagtgctaacaatttcttcctttcctgcttgaataagatacactctaatggcatttgaacatgtaatcaccagagattctgaaatgactggtttatgttaagctatttttaggcatcttcaccttgctttaagtaggttgaagtttttgcaaaggcatttaaaaattcaatttcttgtcagatactacaaataattttcttaaaagtctaagatagcagaaaatacagtaaaaacacaggagaagaagctgagctattggaacaggaaatagaaggaactctagtttctgtttgaagtgaggattttctgaattatctaatatcatctaggttttctttaaaattttattttgttcttcagttcaagcatcttctcactaatgtttttcactataacagagaattcatttcaatttgagttggttctctcaatgatctattgatcattacaccctaactctccttccttggctcaaacaatattttccctataacaaaggcaataggacacaaaattcacatcctgctgggccttttttcatcaagtcagggtgatataaaaacattggaagtcttttcaccaaaccctgactttattgaatgctagtagaagatgtagaattagagacatctgatttgtttatcaccttagcagaaaaaccacagtccaaaagacaagcaaattaagaatggagcttaaccatgcctccattgggaagtctagactttgagccaggtacagtaagaaaaattagcctctgattcattaagtttgccacatgacttattttgatattttggatacattaactcacttaggagaattcagaaaagaatgggtgattaaagttcattacagctgaataaatgtgtctaaaacagactcttgtattctgaaagtacagtctacaactgataaaaccttatgattcttttctcccccattatgcccctatatatatcaagatttgggtactttattttagtagaaaatatatatcttttacatatgtatgtatttataaatgcatagatatatgtataaaaatttgtaagcgttagcggcattaattcaccaatgcatttggacaacttgatgtaactgactttattttatgtgactataataaaaagcataattttctcattctgtca

SEQ ID NO: 25601 - DNA, 655 bp, Homo sapiens
  source 1..655: mol_type = unassigned DNA
ttttagtagagacggggtttcactgtgttagccaggatggtctcgatctcctgacctcgtgatccgcccgcctcggcctcccaaagtgctgggattacaggcgtcagccaccgcgcccggcctataatttttttttttaactccttcactgttgttggcagaatttagtttcttcctgttacaaggattgaggtcgccatttccttgctggtagtcacctgaggactgttcccagattctagagactgcctgcataccttggcttatcaccttccactgcctgcataccttggcttatgccctttctcctgcatcttccaagccagcaatggaagaggtaaccatccatcacggttttcccagaacaggctgatttgcgtcttctgtcctggcataaggatcccttcactctcggaagtgttccggattgtggactcttccaagattcacaatgatatggtgaatccaaagactggaaccaaaaagatttactcagtgctttagttttaacaacagtaaattgtctaccaacacccatcatggctaaaagtgcggaggtcaaactggcaatatttgggagagcaggcgtgggcaagtcagctcttgtagtgagatttctgaccaaacggttcatctgggaatatgatcccaccct

SEQ ID NO: 25602 - DNA, 2134 bp, Homo sapiens
  source 1..2134: mol_type = unassigned DNA
attggagttgactaatatgaatgtatgttattcaacccaaagagacatgaagaggcccaaaagtgactctctccattgccccactgcatgtgtttgtacactgaatgcttacagatagatggtaaatgattgtggactcttccaagattcacaatgatatggtgaatccaaagactggaaccaaaaagatttactcagtgctttagttttaacaacagtaaattgtctaccaacacccatcatggctaaaagtgcggaggtcaaactggcaatatttgggagagcaggcgtgggcaagtcagctcttgtagtgagatttctgaccaaacggttcatctgggaatatgatcccaccctcgaatcaacctaccgacaccaagcaaccatcgatgatgaagttgtttccatggagatactagacactgctggtcaggaagataccattcagagggaggggcacatgcgatggggggaaggctttgtgctggtctacgacattactgaccgaggaagttttgaggaagtgctgccacttaagaacatcctagatgagatcaaaaagcccaagaatgtgactctcatcttggttggaaacaaagctgacttggaccactccaggcaggttagcacagaagaaggagagaagctggccacagaattggcttgtgctttttacgagtgctctgcctgcactggagaagggaacatcacagagatattctatgaattgtgtcgagaggtgcgtcgccggaggatggtgcagggcaagacgaggcgacgcagctccaccacgcatgtcaagcaagccattaacaagatgctcaccaaaatcagtagttaggcagcccagctgaggtggaccaactaattggaaacactcttccccttctgttcccctttcaaaaataaaacaaaatattgcattctttgtttggattctgagaaatgtctgggcttcccattgtttctggcctctaataggttgggaagttttagcgtgttttatgcaatttcagtgctaacaatttcttcctttcctgcttgaataagatacactctaatggcatttgaacatgtaatcaccagagattctgaaatgactggtttatgttaagctatttttaggcatcttcaccttgctttaagtaggttgaagtttttgcaaaggcatttaaaaattcaatttcttgtcagatactacaaataattttcttaaaagtctaagatagcagaaaatacagtaaaaacacaggagaagaagctgagctattggaacaggaaatagaaggaactctagtttctgtttgaagtgaggattttctgaattatctaatatcatctaggttttctttaaaattttattttgttcttcagttcaagcatcttctcactaatgtttttcactataacagagaattcatttcaatttgagttggttctctcaatgatctattgatcattacaccctaactctccttccttggctcaaacaatattttccctataacaaaggcaataggacacaaaattcacatcctgctgggccttttttcatcaagtcagggtgatataaaaacattggaagtcttttcaccaaaccctgactttattgaatgctagtagaagatgtagaattagagacatctgatttgtttatcaccttagcagaaaaaccacagtccaaaagacaagcaaattaagaatggagcttaaccatgcctccattgggaagtctagactttgagccaggtacagtaagaaaaattagcctctgattcattaagtttgccacatgacttattttgatattttggatacattaactcacttaggagaattcagaaaagaatgggtgattaaagttcattacagctgaataaatgtgtctaaaacagactcttgtattctgaaagtacagtctacaactgataaaaccttatgattcttttctcccccattatgcccctatatatatcaagatttgggtactttattttagtagaaaatatatatcttttacatatgtatgtatttataaatgcatagatatatgtataaaaatttgtaagcgttagcggcattaattcaccaatgcatttggacaacttgatgtaactgactttattttatgtga

SEQ ID NO: 25603 - DNA, 2060 bp, Homo sapiens
  source 1..2060: mol_type = unassigned DNA
gaattcccaaatttcttttgtttaaggattgtggactcttccaagattcacaatgatatggtgaatccaaagactggaaccaaaaagatttactcagtgctttagttttaacaacagtaaattgtctaccaacacccatcatggctaaaagtgcggaggtcaaactggcaatatttgggagagcaggcgtgggcaagtcagctcttgtagtgagatttctgaccaaacggttcatctgggaatatgatcccaccctcgaatcaacctaccgacaccaagcaaccatcgatgatgaagttgtttccatggagatactagacactgctggtcaggaagataccattcagagggaggggcacatgcgatggggggaaggctttgtgctggtctacgacattactgaccgaggaagttttgaggaagtgctgccacttaagaacatcctagatgagatcaaaaagcccaagaatgtgactctcatcttggttggaaacaaagctgacttggaccactccaggcaggttagcacagaagaaggagagaagctggccacagaattggcttgtgctttttacgagtgctctgcctgcactggagaagggaacatcacagagatattctatgaattgtgtcgagaggtgcgtcgccggaggatggtgcagggcaagacgaggcgacgcagctccaccacgcatgtcaagcaagccattaacaagatgctcaccaaaatcagtagttaggcagcccagctgaggtggaccaactaattggaaacactcttccccttctgttcccctttcaaaaataaaacaaaatattgcattctttgtttggattctgagaaatgtctgggcttcccattgtttctggcctctaataggttgggaagttttagcgtgttttatgcaatttcagtgctaacaatttcttcctttcctgcttgaataagatacactctaatggcatttgaacatgtaatcaccagagattctgaaatgactggtttatgttaagctatttttaggcatcttcaccttgctttaagtaggttgaagtttttgcaaaggcatttaaaaattcaatttcttgtcagatactacaaataattttcttaaaagtctaagatagcagaaaatacagtaaaaacacaggagaagaagctgagctattggaacaggaaatagaaggaactctagtttctgtttgaagtgaggattttctgaattatctaatatcatctaggttttctttaaaattttattttgttcttcagttcaagcatcttctcactaatgtttttcactataacagagaattcatttcaatttgagttggttctctcaatgatctattgatcattacaccctaactctccttccttggctcaaacaatattttccctataacaaaggcaataggacacaaaattcacatcctgctgggccttttttcatcaagtcagggtgatataaaaacattggaagtcttttcaccaaaccctgactttattgaatgctagtagaagatgtagaattagagacatctgatttgtttatcaccttagcagaaaaaccacagtccaaaagacaagcaaattaagaatggagcttaaccatgcctccattgggaagtctagactttgagccaggtacagtaagaaaaattagcctctgattcattaagtttgccacatgacttattttgatattttggatacattaactcacttaggagaattcagaaaagaatgggtgattaaagttcattacagctgaataaatgtgtctaaaacagactcttgtattctgaaagtacagtctacaactgataaaaccttatgattcttttctcccccattatgcccctatatatatcaagatttgggtactttattttagtagaaaatatatatcttttacatatgtatgtatttataaatgcatagatatatgtataaaaatttgtaagcgttagcggcattaattcaccaatgcatttggacaacttgatgtaactgactttattttatgtgactataataaaaagcataattttctcat

SEQ ID NO: 25604 - DNA, 1383 bp, Homo sapiens
  source 1..1383: mol_type = unassigned DNA
gcagtccctccgccgctagtcggagcgagcgcgagtgaggagacccccgccgggccactggcacttgcttctgcggcgagtcccacccacgaccgcagcccagcaactcgcaaacgcaacctgaagcctgggctgcgcagtgtgggagggcttcgcgatcttgggggacccattccgaacttgcagaggaccgtagctctcctggcctggagagtgtgaacaggattgtggactcttccaagattcacaatgatatggtgaatccaaagactggaaccaaaaagatttactcagtgctttagttttaacaacagtaaattgtctaccaacacccatcatggctaaaagtgcggaggtcaaactggcaatatttgggagagcaggcgtgggcaagtcagaatcaacctaccgacaccaagcaaccatcgatgatgaagttgtttccatggagatactagacactgctggtcaggaagataccattcagagggaggggcacatgcgatggggggaaggctttgtgctggtctacgacattactgaccgaggaagttttgaggaagtgctgccacttaagaacatcctagatgagatcaaaaagcccaagaatgtgactctcatcttggttggaaacaaagctgacttggaccactccaggcaggttagcacagaagaaggagagaagctggccacagaattggcttgtgctttttacgagtgctctgcctgcactggagaagggaacatcacagagatattctatgaattgtgtcgagaggtgcgtcgccggaggatggtgcagggcaagacgaggcgacgcagctccaccacgcatgtcaagcaagccattaacaagatgctcaccaaaatcagtagttaggcagcccagctgaggtggaccaactaattggaaacactcttccccttctgttcccctttcaaaaataaaacaaaatattgcattctttgtttggattctgagaaatgtctgggcttcccattgtttctggcctctaataggttgggaagttttagcgtgttttatgcaatttcagtgctaacaatttcttcctttcctgcttgaataagatacactctaatggcatttgaacatgtaatcaccagagattctgaaatgactggtttatgttaagctatttttaggcatcttcaccttgctttaagtaggttgaagtttttgcaaaggcatttaaaaattcaatttcttgtcagatactacaaataattttcttaaaagtctaagatagcagaaaatacagtaaaaacacaggagaagaagctgagctattggaacaggaaatagaaggaactctagtttctgtttgaagtgaggattttctgaattatctaatatcatctagg

SEQ ID NO: 25605 - DNA, 3194 bp, Homo sapiens
  source 1..3194: mol_type = unassigned DNA
gcgctccggagggagagctggggctggaggttcctaccccctcggcggcccgcatctgcccccgcgcgcccgccctgagcccgccccgactgggcaggcgggggagcccctacttctctccccccgggcgggggagccggggggcagcgccggagcccggggggagctcagccccgccgaccggccggccagggcagggggcagctaggacggccccggtccaggtggaggccgcagagggcccagggcaagcagaggcagcaatggttggtcctgacggtggctgagcccccagcccctggaatatgcagcccgggggagccccagacagcggcaaggacgaggtggcggagtggggcgggaggcatggtctccacctaccgggtggccgtgctgggggcgcgaggtgtgggcaagagtgccatcgtgcgccagttcttgtacaacgagttcagcgaggtctgcgtccccaccaccgcccgccgcctttacctgcctgctgtcgtcatgaacggccacgtgcacgacctccagatcctcgactttccacccatcagcgccttccctgtcaatacgctccaggagtgggcagacacctgctgcaggggactccggagtgtccacgcctacatcctggtctacgacatctgctgctttgacagctttgagtacgtcaagaccatccgccagcagatcctggagacgagggtgatcggaacctcagagacgcccatcatcatcgtgggcaacaagcgggacctgcagcgcggacgcgtgatcccgcgctggaacgtgtcgcacctggtacgcaagacctggaagtgcggctacgtggaatgctcggccaagtacaactggcacatcctgctgctcttcagcgagctgctcaagagcgtcggctgcgcccgttgcaagcacgtgcacgctgccctgcgcttccagggcgcgctgcgccgcaaccgctgcgccatcatgtgacgcctgcgcgcccctcgggctgcaccggcactggccgagcggagggcggggccgtactgcggggctggggcggggagcgggcgggaaatggaactgtgacggtcccggcctgaggcccctgcagccacgcacctcccggtgagaagcagagcgcgagagggagccctccgtaactgcccagccctgccccttgcccccgtggcttcctgggacagccgccttcagtgctgtatttagtgcagtgcccggcccgacccgcgggggtgccacagccttttgggatgggggtgagcgtgcaatggaggctgggggtggcgaggtgccgccttggccgggcccccacgtgtcttctccagaatgtgtctgtctttgcctggtgtcttcctttcccgtgtccgcccaccccagcgtctgttggtacttacctgtctcacctaccctccagtcccctcccagctccgctcacagggctctcatttcgtccatccccttgtcgcagatcctggcagcttctttgtgaggccaggccttctgactgtcagcaccaccggcacagggcagagatgcgggtggcccaaggaccacgatcaaggggtccgggggaccgaggtcccagatcagtgaggggagaaggttgagctctccggcttccagggagacctccccgcccagcagcccccagagacacaacaacctaccttccagccttaactcgatggtccgtccctgccaggtgcccctcactcttcctgaccccaaagccagatcaccccctgggttaaaactttttttcttttttttttttggacagagtgtggaaagggagccccccaaaggatagcttctttttcatgatgccaggctccagtcctttattcccttctgcatactgcaatctgatctgtcagactggggaatgttgggttctggggtctggtcgtgggcaggatggtgcccagaagggggttaggttgtcccagtgaaaattctgttgccccgtctcaaccccatctgactaccccagactctgcctgcctcagatctcagactatcctgattaatctggggaagaacagagccagggaaagaatggtggggacccctgtacttgggggagacacacctgcatcttcctcctgccacagatggaggccctcaggatctgacaccctcttgtcccaacaccagtcagccctataccctaactcactccaccccattttctccggctgcctggccgggtttctacctctcgtcaccggagctgatcactgtcagttttgtaccgatttagaaataacaataataatgaagattctaggaatggcatgagggattgatgggggacttggagggagggacaagtggtgccctgtcccctgctcccctggccaaagaaagctgtccttgaggctgagccctcagccctggcctggtggggggacagcaaggtcccttgttataagaggggcagagaggacaactccgctttggccaacctagccaaggctgcagcatatagaccaggaaatcaggtagcccagactggtgatggagcagagtctgggggaagggtcgtgggtggggaatttatcaccaacatccattgtagggggaatctatgattctgcttccccagcggattcccactctgtccaccaagtggggggtagcacagcctcacagcaaccgccctgaccttgggcagtctagtgttcctgcattctagtccctgctgtgctgcaggactttgggcaagtgacctgccctctgtgagcctccctctgacacagaggaggtggctccccttccccacaccttagagtggctgggagggtaacaaagagggcctgcccctttagtctcctgcacccctgccccctggttcaccagagggagcggatgaaggatggcagcatctcacatgccccatcaccaactctgaggcacctggggtgggggggcggagcccaggcctctggctgctcccctgtgggagccattggaatgtatcccctgacaggcccccttccgcctccacctcaacccaggtcttggatttcaggtccctccacccccattctgagtctctgtccttctccttccacccgctcccagggtttcccaccacagggtctggaagtgtgtgtgacgcccattgagctgttacccgaagtcagattaaaaatcagggagtgttttccctcgtttctgta

SEQ ID NO: 25606 - DNA, 1543 bp, Homo sapiens
  source 1..1543: mol_type = unassigned DNA
gggcctcccaaagtgctgggattacaggcgtaagccaccgcgcccagccccttagcaccttttaaaaataaaaagggcagcgttttacagcaatctgtcccattgttgcagaaacatccaactgattgcactttttcttcttctctcgtcaactcgtaactcctatctcaagttcacccacaggtctagtgactccggctggctgctgcggggcgaggagactcgcagaatgcctgactagaggccactcgcgcgctctggacggtggccgtatctccagggtctgagccccggagccgcagtcctgccgcagagcgcctggagccgcgagcagctagcagcccggcgaagcgcacagcctcggcgatagtcagctccgcggcctctgctcccgcccctcccggccgctccgggaaggggcggagacgaggaggagctgggacggccgccgcgctcccgggcgcaccaagccctttaaaagccgcgggccttgacagttctgcaggcagccgccgcggtcccggacctctagtcccgcactcccagctggcgagccggctccgggtgcggcgaggcccagccctctcggattgcgcgccggaccccgggacgcgctccatgcggccgctcagcatgtccgggcactttctgctcgcacccatccccgagtcctcctcggactacctactgcccaaggacatcaaactggcggtgctgggcgccggccgcgtgggcaagagcgcaatgatcgtgcgcttcctgaccaagagattcattggagactatgaaccgaatacaggcaagctgtattcacggctggtctatgtcgagggggaccagctctccctgcagatccaggatactcccgggggcgtccagatccaagacagcctcccccaggtcgtcgattccctgtccaaatgcgtgcagtgggccgagggttttctgctggtctattccatcacagactatgacagctacttgtccatccgacccctttatcagcacatccggaaggtccaccctgactctaaagcccctgtcatcatcgtgggcaacaagggggaccttttgcatgcccggcaggtgcagacacaggacggtattcagctagccaatgagctgggcagcctgttccttgaaatttccactagcgaaaactacgaagatgtctgtgatgtgtttcagcatctctgcaaagaagtgagcaagatgcacggcctcagtggggaaagaagaagagcctccatcatccctcggccccgctctcccaacatgcaggacctgaagagacgcttcaagcaggctctgtctcccaaagtcaaagccccctctgcactggggtgaactatctcagacagatgcctctcctttttaatacgcatttgtgcagctaaaagactgggcttctcgctttttaatcacacattcagagtttatttttataaaaaaattgattttcaagtacatgtgtatttctgaaaattcaaacagtgattgcctagaagctggataaaattttgttttgttttattaaaagaac

SEQ ID NO: 25607 - DNA, 1993 bp, Homo sapiens
  source 1..1993: mol_type = unassigned DNA
aaaacagccggcgcgccgcgcgagtgcagtctgggtctggagcctgagccctgcggaacctcggcgctcggccccaccccgcccgtacctgcacttatttattgttgttatttcttaccgcggagccccgcagtcgggtcctcccgcccgctcccgcgcagcgctagcattctccagtccctcagtcccttcccgcgcggtgcgccgcagccgaggcgatgcgcctcattcagaacatgtgcaccatcgccgagtaccccgcgccgggcaacgccgcggcctccgactgctgtgtgggcgccgccggccgccgcctggtcaagatcgccgtggtgggcgccagcggcgtgggcaagaccgcactggtggtccggttcctcaccaaacgattcatcggtgactatgaaagaaatgcaggtaatctctatactagacaagttcagatagaaggtgaaaccctggctcttcaggttcaagacactccaggtattcaggtccatgagaacagcctgagctgcagtgaacagctgaataggtgcattcgctgggcagatgctgtggtgatcgttttctccatcactgactacaagagctatgaactcatcagccagctccaccagcacgtgcagcagctacacctgggcacccggctgcctgtggtggtcgtggccaacaaagctgacctgttgcacatcaaacaggttgaccctcagcttggactgcagctagccagcatgctaggctgctcattctatgaagtgtctgtcagtgaaaattataatgatgtctacagcgccttccacgtcctctgtaaagaggtcagtcacaaacagcagcctagcagtacacccgagaagcgaagaacctccctcattcccaggcccaagtcacccaacatgcaggacctgaagaggaggtttaagcaagccctctctgccaaagtgaggactgtcacctccgtctgaagcaggaggagcactcaagggggtttggtcttcccaggaagagggcctgaggttctcctagtgcaggaacgttgaatattggcaatgattcctggttccagaaagggctggagcagaagggccaagagggcctgtggaactgctacagaaaaggaagtgttgttctgagcagggggacaggattgatgaggcttgaaagagcccactgagccactctctgaatatgtgaaatgtactctgtgtcttttcctttagagtggggagggggcataatcgtttcggtttctgcattcaactaccttgtaaatggtggtccgttgcagtttcaccaaatgtattgatgtgatttacagtgggaatgaaagaacagattaagcattgataggctttcttttttcccccttttttcttttttctcttttcttctttcttttcctctttttccccaagaggaagaattgcttttctcttaccagtatgatttgtaactctggaacactattcttacagaatgcctttctaacctgaaggatacccagatttctttctttatgtacaagatggaaaatcccctacccctcaaaaacaggttgagtttatgggccagaatattttgtataccagacattggtaagctctcatggtttacaggaaggctctggttccccctcacaggatgagcatgctcagttgggcgtgtgtggaggagctgtgaacttcacgctcttcaaccccagactttgactgtatagttttttgtttttttaactgttccatcaggaaaaaaatgtgtcagttgattttggtgtgacttgtgtaaatggttcatggcaatgacgttgggttgcttcctaggcctggctgagttgtgcctaagggtggctgaaatactaaaacacttatcttacagcaagtgaacaggggctacctgccacatcccctccacagatgcactttaaaaagccactcatgctttggcttaaactgtaattaatttattttatgtacaataaatcgcatttgaaaaa

SEQ ID NO: 25608 - DNA, 1569 bp, Homo sapiens
  source 1..1569: mol_type = unassigned DNA
attcccctggtgggggtggacagacacgtcagcccccgcagcagcgtggaccgggggcgggagcgggggcgggtggaggcttaaataggcggctctggagccagagcccagtgcgggctgagaaggcggtggctgcagcagcagcggcggcggaaaccctaaagtccgagtccggactacgagtgcgtggcctcctaatccggatcctagtcctgagcgtgtctgtgtgcgagtggacggtcccggacgcgatgaccctgaacggcggcggcagcggagcgggcgggagccgcggtgggggccaggagcgcgagcgccgtcggggcagcacaccctggggccccgccccgccgctgcaccgccgcagcatgccggtggacgagcgcgacctgcaggcggcgctgaccccgggtgccctgacggcggccgcggccgggacggggacccagggtcccaggctggactggcccgaggactccgaggactcgctcagctcagggggcagcgactcagacgagagcgtttacaaggtgctgctgctgggggcgcccggcgtgggcaagagcgccctggcgcgcatcttcggcggtgtggaggacgggcctgaagcagaggcagcagggcacacctatgatcgctccattgtagtggacggagaagaggcatcactcatggtctacgacatttgggagcaggacgggggccgctggttgcccggccactgcatggccatgggggatgcctatgtcattgtgtactcagtgacggacaagggcagcttcgagaaggcctcagaactgcgggtccagctgcggcgtgcacggcaaacagatgatgtgcccatcatcctcgtgggcaacaagagcgacctggtgcgctctcgtgaggtctcggtggatgagggccgggcctgcgcggtggtctttgactgcaagttcattgagacatcagcggcattgcaccacaatgtccaggcgctgtttgaaggtgtcgtgcgccagatacgcctgcgcagggacagcaaagaagccaacgcacgacggcaagcaggcacccggaggcgagagagccttggcaaaaaggcgaagcgcttcttgggccgcatcgtagctcgtaacagccgcaagatggcctttcgcgccaaatccaagtcctgccacgacctctcggttctctaggtcccacccgctcccactatggtgggagacgaacggaagggttggtgggctggcccagccaactgccccgggtgcctcagagcaggctcagactctgggtccctcggagctgccagccgggcacccccaacctcatggtcatggacagatagacagtgctgccctgcgaagtggctctcaggggccagtgagggctgggcccacagagatgcatgcgcaggctcatatgcgtcccaagcagccgcagcgcagccgccgggcaggcctgcgtgccgggagaggactctgccttttttcacagcccgggtgtgcctgccctggagggaggctcttcagtgcggtagctatttgtttacatgcagatttttgtaataaaggctatttcctgata

SEQ ID NO: 25609 - DNA, 1476 bp, Homo sapiens
  source 1..1476: mol_type = unassigned DNA
cagtgcgggctgagaaggcggtggctgcagcagcagcggcggcggaaaccctaaagtccgagtccggactacgagtgcgtggcctcctaatccggatcctagtcctgagcgtgtctgtgtgcgagtggatcccctagacggtcccggacgcgatgaccctgaacggcggcggcagcggagcgggcgggagccgcggtgggggccaggagcgcgagcgccgtcggggcagcacaccctggggccccgccccgccgctgcaccgccgcagcatgccggtggacgagcgcgacctgcaggcggcgctgaccccgggtgccctgacggcggccgcggccgggacggggacccagggtcccaggctggactggcccgaggactccgaggactcgctcagctcagggggcagcgactcagacgagagcgtttacaaggtgctgctgctgggggcgcccggcgtgggcaagagcgccctggcgcgcatcttcggcggtgtggaggacgggcctgaagcagaggcagcagggcacacctatgatcgctccattgtagtggacggagaagaggcatcactcatggtctacgacatttgggagcaggacgggggccgctggttgcccggccactgcatggccatgggggatgcctatgtcattgtgtactcagtgacggacaagggcagcttcgagaaggcctcagaactgcgggtccagctgcggcgtgcacggcaaacagatgatgtgcccatcatcctcgtgggcaacaagagcgacctggtgcgctctcgtgaggtctcggtggatgagggccgggcctgcgcggtggtctttgactgcaagttcattgagacatcagcggcattgcaccacaatgtccaggcgctgtttgaaggtgtcgtgcgccagatacgcctgcgcagggacagcaaagaagccaacgcacgacggcaagcaggcacccggaggcgagagagccttggcaaaaaggcgaagcgcttcttgggccgcatcgtagctcgtaacagccgcaagatggcctttcgcgccaaatccaagtcctgccacgacctctcggttctctaggtcccacccgctcccactatggtgggagacgaacggaagggttggtgggctggcccagccaactgccccgggtgcctcagagcaggctcagactctgggtccctcggagctgccagccgggcacccccaacctcatggtcatggacagatagacagtgctgccctgcgaagtggctctcaggggccagtgagggctgggcccacagagatgcatgcgcaggctcatatgcgtcccaagcagccgcagcgcagccgccgggcaggcctgcgtgccgggagaggactctgccttttttcacagcccgggtgtgcctgccctggagggaggctcttcagtgcggtagctatttgtttacatgcagatttttgtaataaaggctatttcctgatagtcatg

SEQ ID NO: 25610 - DNA, 1057 bp, Homo sapiens
  source 1..1057: mol_type = unassigned DNA
tgtctccggccgatcgctcggcgctcgggtccgcggccgctgcggcgccgggcatttctccgcagctcggctcgcggccgcgcccgccgccgcccggcccgcgcccatgcaggccatcaagtgcgtggtggtcggcgacggcgccgtggggaagacatgcttgctgatcagctacacgaccaacgccttccccggagagtacatccccaccgtttttgacaactactctgccaacgtgatggtggacgggaaaccagtcaacttggggctgtgggacacagcgggtcaggaggactacgatcggctgcggccactctcctacccccaaactgacgtctttctgatctgcttctctctggtgagcccggcctccttcgagaatgttcgtgccaagtggtacccggaggtgcggcaccactgcccccacacgcccatcctcctggtgggcaccaagctggacctccgcgacgacaaggacaccattgagcggctgcgggacaagaagctggcacccatcacctacccacagggcctggccatggcccgggagattggctctgtgaaatacctggagtgctcagccctgacccagcggggcctgaagacagtgtttgacgaggcgatccgcgcggtgctctgcccgcccccagtgaagaagccggggaagaagtgcaccgtcttctagagccctggcccacccgagcctgagggctggcggggagcagccctggacgtgtccgctgttgtgttgagacgtgtggtgtccctgagtcggctgtggggagcggtgggggtgggccggggggaagcatggggatgaggctgggtggcaggatcctgtcctctctgccgcctcattctggggtgtggctccagccttccctggcccccgccggaggccgggagggagcagggtctccctcagggctgcaggggcaggtgcagggaagccccaggatgggcttccctggagggggagggtgggggggagttctgttccttgtgccccgaggtggggcagccccttctcattttatacaataaacattctccacct

SEQ ID NO: 25611 - DNA, 1648 bp, Homo sapiens
  source 1..1648: mol_type = unassigned DNA
cgccggaagtgggtggtggcggggacgcagcggctccctcccggaaagcgagcgtatctcccgagccgttgccactgacagccgcgggcgctcccatctgagtaagagccagcccgtccgcggcctctccagccccgggttcgcgctctcgactctcctgcctgcccagctgcgcggcggagcggagcgaggcgcggcctgcgagtccccggcagcccccgacccctccctcggcgctgcgtgtaggccgcgccctcaggcccagtccgcggtgccccggcgggtgatgccaaatacagccatgaagaaaaaggtgctgctgatggggaagagcgggtcggggaagaccagcatgaggtcgataatcttcgccaattacattgctcgcgacacccggcgcctgggggccaccattgacgtggaacactcccacgtccgattcctagggaacctggtgctgaacctgtgggactgtggcggtcaggacaccttcatggaaaattacttcaccagccagcgagacaatatcttccgtaacgtggaagttttgatttacgtgtttgacgtggagagccgcgaactggaaaaggacatgcattattaccagtcgtgtctggaggccatcctccagaactctcctgacgccaaaatcttctgcctggtgcacaaaatggatctggttcaggaggatcagcgtgacctgatttttaaagagcgagaggaagacctgaggcgtctgtctcgcccgctggagtgtgcttgttttcgaacgtccatctgggatgagacgctctacaaagcctggtccagcatcgtctaccagctgattcccaacgttcagcagctggagatgaacctcaggaattttgcccaaatcattgaggccgatgaagttctgctgttcgaaagagctacattcttggttatttcccactaccagtgcaaagagcagcgcgacgtccaccggtttgagaagatcagcaacatcatcaaacagttcaagctgagctgcagtaaattggccgcttccttccagagcatggaagttaggaattccaacttcgctgctttcatcgacatcttcacctcaaatacgtacgtgatggtggtcatgtcagatccgtcgatcccttctgcggccactctgatcaacattcgcaatgcccggaaacactttgagaagctggagagagtggatggccccaagcacagtctccttatgcgttgaatattgccaaatgctctttctgaaaatgctgaattgccttttttgtttgcatcctttatttttaatattcataatgtcgtgtgcttaaaagtgggctttgaagtgtgtgctgcttactcctttcatctttctccccgcttccccagtctttaaacattggacgctatttactcagctacccagtagagcttgaagctgacctttctgagaagttggtatggtgtaacactaaagtaggtggttcgtgtgtgttctcattacctggttatgatagatatgcacatcaaagcctttaccagtatcttcctgtattccgtatcagattgcaaagacggaatgttactattttatcagcaaggtattaaaatgcatttataaattcttcttggcttcattcatgaataaacgtgttagcaattt

SEQ ID NO: 25612 - DNA, 1573 bp, Homo sapiens
  source 1..1573: mol_type = unassigned DNA
cagctgaggcgttctccgcttagtgcctacggcatgggtcagctctttctgccacctccgccttcgcggtcctcacctctttgcgggtgaagttacctttgggtttccagaccttgggggcctgaggcccaaactcgggacgaacccctaacccacctctcttttcctgtcattctccaactcttactttgtaccacggaatcacttggccttaaagctagccagctcggccgtgccttgaggccaggttcgagagataaaggtaaccgtggggaaagcggccccccagtggacaaaggcggaggcaagaatagagcaggcctgagggccataggcgatgagaataggcagttgaggggtgaaaaagaaaacaaacaaacaacaacaacaaaccctgaagagtactgaagatttagaagggactggaaaggacttgttgcgcaatggaagaatctgactctgagaaaacgacggagaaagaaaatctggggccgagaatggatccaccactaggggaaccggaaggatcgcttgggtgggtgctaccaaatacagccatgaagaaaaaggtgctgttgatgggtaaaagtgggtctggtaagaccagcatgaggtctattatctttgcaaattatattgccagagacacacgtcgccttggcgcaacaatactagaccgtatacatagtcttcaaattaatagcagtttgagcacctactctctcgtagactctgttggaaatacaaagacatttgatgtagaacattctcatgttcgatttctgggaaacctggtattgaacctgtgggattgtggtgggcaagacaccttcatggaaaattatttcactagccaacgggacaacatcttccgaaatgtggaggttctgatttatgtctttgatgtggagagccgcgaactggaaaaggacatgcactattaccaatcatgcctggaggccattctgcagaattctccagatgccaaaatattttgcttggtacacaaaatggatctggtacaggaggatcaacgggacctgatttttaaagagcgagaagaagatttgaggcgtttgtctcgcccattggaatgttcttgtttccgaacatctatctgggatgaaaccctctataaggcttggtccagcatagtttatcagctgattcccaatgttcagcagctggaaatgaacctaaggaattttgctgaaattatcgaagctgatgaagtacttctttttgagagagctacttttctggtaatttctcactatcagtgtaaagagcagcgtgatgcccatagatttgagaaaataagcaacattattaagcagttcaagctgagctgcagcaagctggctgcctctttccagagtatggaagtcaggaactctaacttcgctgctttcattgacatctttacatccaacacttatgtgatggttgtgatgtctgatccgtccattccttctgcagctactctgatcaacatccgcaatgccaggaaacactttgaaaagctggaaagagtggatggaccaaagcagtgtcttctcatgcgctaaacatt

SEQ ID NO: 25613 - DNA, 2061 bp, Homo sapiens
  source 1..2061: mol_type = unassigned DNA
ggggtaaggcagatgcccacgtgatcctggcctgcagttgggtggctgcggtgagatacctgggttcctgaagggcgggtggttaggtcgtaactactgcccccgccggctgactctccgagcggccgggctcggaagccacgagccagctgaggcgttctccgcttagtgcctacggcatgggtcagctctttctgccacctccgccttcgcggtcctcacctctttgcgggtgaagttacctttgggtttccagaccttgggggcctgaggcccaaactcgggacgaacccctaacccacctctcttttcctgtcattctccaactcttactttgtaccacggaatcacttggccttaaagctagccagctcggccgtgccttgaggccaggttcgagagataaaggtaaccgtggggaaagcggccccccagtggacaaaggcggaggcaagaatagagcaggcctgagggccataggcgatgagaataggcagttgaggggtgaaaaagaaaacaaacaaacaacaacaacaaaccctgaagagtactgaagatttagaagggactggaaaggacttgttgcgcaatggaagaatctgactctgagaaaacgacggagaaagaaaatctggggccgagaatggatccaccactaggggaaccggaaggatcgcttgggtgggtgctaccaaatacagccatgaagaaaaaggtgctgttgatgggtaaaagtgggtctggtaagaccagcatgaggtctattatctttgcaaattatattgccagagacacacgtcgccttggcgcaacaattgatgtagaacattctcatgttcgatttctgggaaacctggtattgaacctgtgggattgtggtgggcaagacaccttcatggaaaattatttcactagccaacgggacaacatcttccgaaatgtggaggttctgatttatgtctttgatgtggagagccgcgaactggaaaaggacatgcactattaccaatcatgcctggaggccattctgcagaattctccagatgccaaaatattttgcttggtacacaaaatggatctggtacaggaggatcaacgggacctgatttttaaagagcgagaagaagatttgaggcgtttgtctcgcccattggaatgttcttgtttccgaacatctatctgggatgaaaccctctataaggcttggtccagcatagtttatcagctgattcccaatgttcagcagctggaaatgaacctaaggaattttgctgaaattatcgaagctgatgaagtacttctttttgagagagctacttttctggtaatttctcactatcagtgtaaagagcagcgtgatgcccatagatttgagaaaataagcaacattattaagcagttcaagctgagctgcagcaagctggctgcctctttccagagtatggaagtcaggaactctaacttcgctgctttcattgacatctttacatccaacacttatgtgatggttgtgatgtctgatccgtccattccttctgcagctactctgatcaacatccgcaatgccaggaaacactttgaaaagctggaaagagtggatggaccaaagcagtgtcttctcatgcgctaaacattgatgaatattgtttcacacaaaaattaaaagtttcctaattaatgttgtattcatatatgtaggctctgaaatgttgtgatgcttattgcttctgtatttcttctctactccctagtcttaatgtttaaccttgaatgctattaacttaaatagccattgaggagttagaagatgaattgttcatgaagtcggtgttacataaaagtaggtgatatgtaagttttctgataacaaggttctaatagtgtttaaatgtactggtaacctggttccaatagttgtgtttgcccaagcctttctcggcatcatcttgtattccttatcagatagtaagtaacctgtaagtttggagtattactgttttctcagcatgcattaaaaatattccttaacttcaattgtaaataaacttttggtgttaggga

SEQ ID NO: 25614 - DNA, 644 bp, Homo sapiens
  source 1..644: mol_type = unassigned DNA
agatgcccacgtgatcctggcctgcagttgggtggctgcggtgggtgctaccaaatacagccatgaagaaaaaggtgctgttgatgggtaaaagtgggtctggtaagaccagcatgaggtctattatctttgcaaattatattgccagagacacacgtcgccttggcgcaacaattgatgtagaacattctcatgttcgatttctgggaaacctggtattgaacctgtgggattgtggtgggcaagacaccttcatggaaaattatttcactagccaacgggacaacatcttccgaaatgtggaggttctgatttatgtctttgatgtggagagccgcgaactggaaaaggacatgcactattaccaatcatgcctggaggccattctgcagaattctccagatgccaaaatattttgcttggtacacaaaatggatctggtacaggaggatcaacgggacctgatttttaaagagcgagaagaagatttgaggcgtttgtctcgcccattggaatgttcttgtttccgaacatctatctgggatgaaaccctctataaggcttggtccagcatagtttatcagctgattcccaatgttcagcagctggaaatgaacctaaggaattttgctgaaattatcgaa

SEQ ID NO: 25615 - DNA, 2732 bp, Homo sapiens
  source 1..2732: mol_type = unassigned DNA
ggctgggcttcggctcggggcctatgagagccgggctccggggggcgggccggactgtggcggctgccgggggcggtggcggtggtggcggcggcggcggaggcggactggggaggcggcggcctggctcggcctggcctggcctgtcagggcgcgggcggcggcggctccagcaccatgtccctgcagtacggggcggaggagacgcccctcgccggcagttacggcgcggccgattcgtttccaaaggacttcggctacggcgtggaggaggaggaagaggaggcggcggcggcgggcggaggggttggggcaggggcaggcggtggctgtggtccggggggcgctgacagctccaagccgaggattctgctcatgggactccggcgcagcggcaagtcctccatccagaaggtggtgtttcataagatgtcacccaacgagaccctctttttggaaagtaccaacaagatttataaggatgacatttccaatagctcctttgtgaatttccagatatgggattttcctgggcaaatggacttttttgacccaacctttgactatgagatgatcttcaggggaacaggagcattgatatacgtcattgacgcacaggatgactacatggaggctttaacaagacttcacattactgtttctaaagcctacaaagttaacccagacatgaattttgaggtttttattcacaaagttgatggtctgtctgatgatcacaaaatagaaacacagagggacattcatcaaagggccaatgatgaccttgcagatgctgggctagaaaaactccatcttagcttttatctgactagtatctatgaccattcaatatttgaagcctttagtaaggtggtgcagaaactcattccacaactgccgaccttggaaaacctattaaatatctttatatcaaattcaggtattgaaaaagcttttctctttgatgttgtcagcaaaatctacattgcaacagacagttcccctgtggatatgcaatcttatgaactttgctgtgacatgatcgatgttgtaattgatgtgtcttgtatatatgggttaaaggaagatggaagtggaagtgcttatgacaaagaatctatggcaattatcaagctgaataatacaactgtcctttatttaaaggaggtgactaaatttttggcactggtctgcattctaagggaagaaagctttgaaagaaaaggtttaatagactacaacttccactgtttccgaaaagctattcatgaggtttttgaggtgggtgtgacttctcacaggagctgtggtcaccagactagtgcctccagtctgaaagcgctgacacacaatggcacgccacgaaacgccatctagtctgaatcccagcgtcggggctctgtgccagcttactcttcactccagggtcggatgccacgtgctacaggacatgggagctgctgcttgtgggaatctggtgcctgttccactagagacaaggggtagagtttctcatttggatgaaaaccccttcaactggtggtgtacaactgaagctactatatcttttttgaaaatggcaaaaaaaaaaaaaaaaaattctggagaccacagaactcaagtgtgtgtttctcctcttttgggtcccctttaagtagttgggatattttggacctggagataacaccagttacccatccttaccagggaatgttgccatcaattccagttgaaaataatagaaaagactgaatttttatatgcttcacttaggctttcatttgagtagactctaaaaattctgccttgcttaagttctaacactgcctctcagatttcagttttggacattgcacaactaagaccttttaaatgcatttgcttgctaactcggaagacacatagtctgcagcaagacattcctatattgaagaaatgagagaaaattttatgctgcatcaggtggagagcaaggctcaacggtggttgcattagttccctcggaagtattgaaaaaactttgaaatggaagaaaatttttgcacctatgttctgagtaccagatgtctgggttctttcttctgcattagataaatgatcatgctcagtgtaacaaagggaattaaaagttttcccacagtccccttctaggggagaaactcattgtgtcactgaaatgtttagcttactttaatcttgatatcagcctctacagaccttttattctaagctatcgagcttcttgattgcatttggttgaccacgagtgaccctaaggcattgggggactgtccactgggagttggagtgagcacgtggtgctgcaacaggcattgttttacatactttgtctctagtattctgacaccaagtgtcaactgtggtactttctttgcctaggatatgaattcataattgttgcttttgttgatggttgataccctttccattgatttaaacctaacacattatttctattccacatgcccagtagacatatattccaaagccactggaccacttgagtacataagtgccactgtttaatgcaatatgtatattcaggtctgtaaagctaacagtgtgacttggagtgcttcctgcaggtgattctgacttgagtatttacatggaccatggtgatatccaaaagaaaaatgctttttatatttatagattatttcattgaactatatatgaaatgggtatcaataaatgtatttactccaaaa

SEQ ID NO: 25616 - DNA, 4015 bp, Homo sapiens
  source 1..4015: mol_type = unassigned DNA
aggcttggcccccaccccgggacccccgccgtccccgggccggccggccggtgggcacgatgagccaggtgctggggaagccgcagccgcaggacgaggacgacgcggaggaggaggaggaggaggatgagctggtggggctagcggactacggagacgggcccgactcctccgacgccgatccggacagcggcacagaggagggagatggaagccctggccaggctccacctcacggtgaccagggcctacaaagtgaatactgacatcaacttcgaggtgtttattcataaagtggatggtctgtcagatgaccacaaaattgaaacccaaagagatattcaccagagggcaaacgatgaccttgcagatgctggattagaaaaaattcacctcagcttttatctgacaagcatatatgatcattcaatatttgaagcttttagcaaagttgttcagaaactgattccacaactcccaactctggagaatttgctgaacatctttatctcaaattctggaattgaaaaggcatttctatttgatgtggtcagtaaaatttatattgcaactgatagtactccggtggatatgcaaacctatgagctctgctgtgatatgatagatgtggttattgacatctcttgtatttatggtctcaaagaagatggagcaggaaccccctatgacaaggaatccacagccatcataaagcttaataatacaaccgtgctttatttaaaagaggtgacaaagttcctggctctcgtttgctttgtcagagaggaaagctttgaaagaaaagggctaattgactataattttcattgcttccggaaggccattcatgaagtttttgaggtgagaatgaaagtagtaaaatctcgaaaggttcagaatcggctgcagaagaaaaagagagccacccctaatgggacccctagagtgctgctgtaggtgaggtttcaggaatgtcttttgaaatcagaccttatccatgaggctgctgcgccatgttgcactaaaggaagaggaagaaggagattgggacacataccattgatttgttgttaaaaaaaaaaaattcctgcaaccctcttgatcttctcttttataaataaagtaagcactttgaagcaaaaacttgtatattaacagtgatgtgaaatccattgtcatttcattacacaaatgtaaacttttatggtctgtagtcaaaaaaatcccgtgtgagaactgccaggaattgtacatattttgcactttttcatgtttctcattgaactgaactttgataaaacgacttttctaagctttttttctgtacttggtgtcaaggacatgcatactgtagtccatatctatatggcaatcagaaattaatcaaaaagtgatgcattggtaatgactttttgtaaatttggaaatctttgctaccaattgttgagaaaaatcatttttcagtggagctggaacagattggagctacaagctccaggagcaataagaactgtcccctatttataatgggtgtaaacagttttgtagaataatgctagcaccagacttacctaaaaatttctatagcagtggctgtgcttccctgctcaacggtttttatgaagctgtttacctcaacacacatctctataatcactttatacagagaggttatttctttttgttgcattagtattcttttgaaactttgggaccagatttccaaaatggtgccgaacactggagagaagtaagaatgtcactgaattgtagggtttctggaggcttttctgtacctaccacccagggctaaagtaacatcagaggcctaaagttgttccaaaagtatgtgattggcaactgcagactaaaaaacatagatacaattctggacttttggccctgtgcgatggtctggtgtgctgcatttaaaatgcttattcaggaccagttctttattgctccatgaccatagtgaatagaacaaatcgcagaaccccaccatggagctcaatcctgttagtcacttttgtcacctccacatctccttctcactggtgataacatgcctcatgtactccacttgttcccaccttatgattaagccaagctcagcctgccaccagcatgctctgcaaggctgaagagtcatcctgaagacccctaaaggtcagtgggaaaaggatggctggagagacattacaattagctgtgtaattgtttctgtgaaattatttcacttatgtttactttagactaacaggaaattaagagtcctaaatctacccctatgccaaatcattccaagtagataattttacgtgcatctcaagggttagcaccctaaggcatgcttgtggggcattagaaaatgagatttttttttttttaaagcagagcctcctaagaacatcaaagttggtcctagcaaaatatataaagtccctaaagcaacttatacttgaaactttttttttttttttttttagaggggggcctcattctgttgcttgtgctggaatacattggtacaatcatagctcactgttacctcttgggctcaagggatccttccacctcagcctccctagtagctagaactacaggtgtgcacaaccacgcccggctaattcttaaattttgtttttgtagagacaggatctcactgtgttgcccaagatggtctcaaactcctggccccaagcaatcctcctgccttggcctcctcaaatgctgagattacaggcctgagctactgtgcccagcctaaactttcccacttctctctgtggcttctttccaacctctctccttcctctccccaagtcctgtttctttgaagctggtaactgaatttaagatgatatctggttggtgtttaaggtttgagcctcccaaggttctgtgcattttgaaaggagatttctaaaaataattaaggtgccctaactcctttcctcatgattcctactccgaaacctggatggttaggagcccagggctccctgatttccagagctatatcctgttggacctttgccaacagacctgacacttaggggttattgttataaatctaattctctaatattttttacatgttgtttcactttgaataagcaaatgaagaatcagttttctaatatgactttatcctcaagctagagacactagcctatttggtaaatcacacattacttaggtatatttattactataaccaggttggagcttccatgtttaagctgggtatatgatgggtttttgttaaaatgtgccttaaaaagcctattacttcaagagcaaatgattctttgggggaaaggcaaaaataattctatgacatagggcccaagttcatggtagtaagtgtactctttgattaatcacacgctaatatagattactgcctctaactttgtaagtgtggcaatgacttcttaattaaagaaagatgcaggagttatgtctaagcgttcagtttttcaaatctgtgttattggaaatgtcttcaagtcattttgcattgtatttttgatatgagaggcagcttattgcgatgtgtatggccatgtttcattctcaaatttaattctataaatacaaatcctaaatacatggctacagcaactgcactggaacatttttgcttggttttagggattgagaacttgccttgcaggtttccttcctcaaaaggagcagggcagtcctttccctgttgagtcaattagaatttttacatagaggtgagactgtgaattattttggttattttcagtgatgtagattagtgtgaatgaccagggtggaatgtttttgaaggaatataaagcaaaaactggttgacattcacaaactgttcttttgtgaacatattttggacccttaaatatgactaaaatcacagcaatattgttacatacgggttatatgccaactctgtttgaaatatactctggaaaaacagctgaattgtcttggttattaaagtatggtatgtattcaacttgta

SEQ ID NO: 25617 - DNA, 4900 bp, Homo sapiens
  source 1..4900: mol_type = unassigned DNA
ctctctctctctccctcctccgggaggaactgccgcgctccggctgactcctccgccggcgggcggggcgggggagggggcttcgggcgcgctgggaaccgcgggacccggacctgggcgccgcccgccgggggacgcgcggcccccgcttccgccgggccccgctgagctctagacaaacctccgcttcagaaataggctgcgggcggccggctaggaggcttggcccccaccccgggacccccgccgtccccgggccggccggccggtgggcacgatgagccaggtgctggggaagccgcagccgcaggacgaggacgacgcggaggaggaggaggaggaggatgagctggtggggctagcggactacggagacgggcccgactcctccgacgccgatccggacagcggcacagaggagggagttctggacttcagtgaccccttcagcactgaagtgaagccgagaatcctgctcatgggcctgaggagaagcggcaagtcgtctattcagaaagttgtctttcacaaaatgtctcccaacgaaactctgttcttggagagcactaataagatatgccgggaagatgtttccaacagctcctttgtcaattttcagatttgggacttcccaggacagattgacttttttgaccctacatttgactatgagatgatcttccggggaacaggagcactgatatttgtcattgactcacaggatgattacatggaagccctggccaggctccacctcacggtgaccagggcctacaaagtgaatactgacatcaacttcgaggtgtttattcataaagtggatggtctgtcagatgaccacaaaattgaaacccaaagagatattcaccagagggcaaacgatgaccttgcagatgctggattagaaaaaattcacctcagcttttatctgacaagcatatatgatcattcaatatttgaagcttttagcaaagttgttcagaaactgattccacaactcccaactctggagaatttgctgaacatctttatctcaaattctggaattgaaaaggcatttctatttgatgtggtcagtaaaatttatattgcaactgatagtactccggtggatatgcaaacctatgagctctgctgtgatatgatagatgtggttattgacatctcttgtatttatggtctcaaagaagatggagcaggaaccccctatgacaaggaatccacagccatcataaagcttaataatacaaccgtgctttatttaaaagaggtgacaaagttcctggctctcgtttgctttgtcagagaggaaagctttgaaagaaaagggctaattgactataattttcattgcttccggaaggccattcatgaagtttttgaggtgagaatgaaagtagtaaaatctcgaaaggttcagaatcggctgcagaagaaaaagagagccacccctaatgggacccctagagtgctgctgtaggtgaggtttcaggaatgtcttttgaaatcagaccttatccatgaggctgctgcgccatgttgcactaaaggaagaggaagaaggagattgggacacataccattgatttgttgttaaaaaaaaaaaattcctgcaaccctcttgatcttctcttttataaataaagtaagcactttgaagcaaaaacttgtatattaacagtgatgtgaaatccattgtcatttcattacacaaatgtaaacttttatggtctgtagtcaaaaaaatcccgtgtgagaactgccaggaattgtacatattttgcactttttcatgtttctcattgaactgaactttgataaaacgacttttctaagctttttttctgtacttggtgtcaaggacatgcatactgtagtccatatctatatggcaatcagaaattaatcaaaaagtgatgcattggtaatgactttttgtaaatttggaaatctttgctaccaattgttgagaaaaatcatttttcagtggagctggaacagattggagctacaagctccaggagcaataagaactgtcccctatttataatgggtgtaaacagttttgtagaataatgctagcaccagacttacctaaaaatttctatagcagtggctgtgcttccctgctcaacggtttttatgaagctgtttacctcaacacacatctctataatcactttatacagagaggttatttctttttgttgcattagtattcttttgaaactttgggaccagatttccaaaatggtgccgaacactggagagaagtaagaatgtcactgaattgtagggtttctggaggcttttctgtacctaccacccagggctaaagtaacatcagaggcctaaagttgttccaaaagtatgtgattggcaactgcagactaaaaaacatagatacaattctggacttttggccctgtgcgatggtctggtgtgctgcatttaaaatgcttattcaggaccagttctttattgctccatgaccatagtgaatagaacaaatcgcagaaccccaccatggagctcaatcctgttagtcacttttgtcacctccacatctccttctcactggtgataacatgcctcatgtactccacttgttcccaccttatgattaagccaagctcagcctgccaccagcatgctctgcaaggctgaagagtcatcctgaagacccctaaaggtcagtgggaaaaggatggctggagagacattacaattagctgtgtaattgtttctgtgaaattatttcacttatgtttactttagactaacaggaaattaagagtcctaaatctacccctatgccaaatcattccaagtagataattttacgtgcatctcaagggttagcaccctaaggcatgcttgtggggcattagaaaatgagatttttttttttttaaagcagagcctcctaagaacatcaaagttggtcctagcaaaatatataaagtccctaaagcaacttatacttgaaactttttttttttttttttttagaggggggcctcattctgttgcttgtgctggaatacattggtacaatcatagctcactgttacctcttgggctcaagggatccttccacctcagcctccctagtagctagaactacaggtgtgcacaaccacgcccggctaattcttaaattttgtttttgtagagacaggatctcactgtgttgcccaagatggtctcaaactcctggccccaagcaatcctcctgccttggcctcctcaaatgctgagattacaggcctgagctactgtgcccagcctaaactttcccacttctctctgtggcttctttccaacctctctccttcctctccccaagtcctgtttctttgaagctggtaactgaatttaagatgatatctggttggtgtttaaggtttgagcctcccaaggttctgtgcattttgaaaggagatttctaaaaataattaaggtgccctaactcctttcctcatgattcctactccgaaacctggatggttaggagcccagggctccctgatttccagagctatatcctgttggacctttgccaacagacctgacacttaggggttattgttataaatctaattctctaatattttttacatgttgtttcactttgaataagcaaatgaagaatcagttttctaatatgactttatcctcaagctagagacactagcctatttggtaaatcacacattacttaggtatatttattactataaccaggttggagcttccatgtttaagctgggtatatgatgggtttttgttaaaatgtgccttaaaaagcctattacttcaagagcaaatgattctttgggggaaaggcaaaaataattctatgacatagggcccaagttcatggtagtaagtgtactctttgattaatcacacgctaatatagattactgcctctaactttgtaagtgtggcaatgacttcttaattaaagaaagatgcaggagttatgtctaagcgttcagtttttcaaatctgtgttattggaaatgtcttcaagtcattttgcattgtatttttgatatgagaggcagcttattgcgatgtgtatggccatgtttcattctcaaatttaattctataaatacaaatcctaaatacatggctacagcaactgcactggaacatttttgcttggttttagggattgagaacttgccttgcaggtttccttcctcaaaaggagcagggcagtcctttccctgttgagtcaattagaatttttacatagaggtgagactgtgaattattttggttattttcagtgatgtagattagtgtgaatgaccagggtggaatgtttttgaaggaatataaagcaaaaactggttgacattcacaaactgttcttttgtgaacatattttggacccttaaatatgactaaaatcacagcaatattgttacatacgggttatatgccaactctgtttgaaatatactctggaaaaacagctgaattgtcttggttattaaagtatggtatgtattcaacttgtacagactggatgtaatttgtaatcaggtatagtccatgttttactttaagcagtacatcacttaataaccattgttaagccattgctttcaagaatgttaactgccaatttaaaagcatgtgtcctaggttcatgctttggtaaagctctcatttcaagtgtattcatagctaagctttctgggagcagaattgtctctttggtgaaaaggaagtacagcctttcctgtttctgaggttgcttaccatacatgtatgtcactgtttcattggccctgttacatccatttggtaaaatttatttgtcctgattaaccagctctcattttatggaaatgatgataaatctcactacttaaattta

SEQ ID NO: 25618 - DNA, 382 bp, Homo sapiens
  source 1..382: mol_type = unassigned DNA
atgctgagggacactatgaaatcttggaatgatagccagtcagatctgtgtagcactgaccaagaagaggaagaagagatgatttttggtgaaaatgaagatgatttggatgagatgatggatttaagtgatctgcctacctcactttttgcttgcagcgtccatgaagcagtgtttgaggcacgagagcagaaggagagaaatatgaacttcacgcgggaacagagtcgacacccagcgtggtggttcatgtctgtgaaagtgaaactgaagaggaagaagagacaaaaaaccccaaacagaaaattgcccagacgaggcgccccgaccctccgaccgcagcgttgaatgagccccagacctttgattgcgcgctgtgagg

SEQ ID NO: 25619 - DNA, 2778 bp, Homo sapiens
  source 1..2778: mol_type = unassigned DNA
cctagtcccagcccagggggccgctctcgccggcgtcgagggcgtggcggcgaggctgctgctgcaggcggctcccggctctgccttcggccccgcccgccgcccaccaggctcccagaggccccgcagctcgcgccgtccggctccccgcagccccgtcgggcagcccgggcccgtccgctgccctcccggctcccgtcctgcggcggcggggcgtgcaggtgaggccccacggcgcccggcctctccagcagtgggtgcctgatagacatcctaggactatacagaaggaaaaggcccactttgggggataatgctgagggacactatgaaatcttggaatgatagccagtcagatctgtgtagcactgaccaagaagaggaagaagagatgatttttggtgaaaatgaagatgatttggatgagatgatggatttaagtgatctgcctacctcactttttgcttgcagcgtccatgaagcagtgtttgaggcacgagagcagaaggaaagatttgaagcactcttcaccatctatgatgaccaggttacttttcagctgtttaaaagctttagaagagtcagaataaatttcagcaaacctgaagcggcagcaagagcgcgaatagaactccacgaaacagacttcaatgggcagaagctaaagctatattttgcacaggtgcagatgtccggcgaagtgcgggacaagtcctatctcctgccgccccagcctgtcaagcagttcctcatctcccctccagcctctcccccggtggggtggaagcagagcgaagatgcgatgcctgttataaattatgatttactctgtgctgtttccaaattgggaccaggagagaaatatgaacttcacgcgggaacagagtcgacacccagcgtggtggttcatgtctgtgaaagtgaaactgaagaggaagaagagacaaaaaaccccaaacagaaaattgcccagacgaggcgccccgaccctccgaccgcagcgttgaatgagccccagacctttgattgcgcgctgtgaggcccttggttgtggtgcgaggcggctgccctggtgggctctggccatggcgctctgtgcctgcggccgatgcgttgctgcgaacagcataggtgagactctgccgagtgaggtataggtcttctcaccacgcctgtactgcagacacggtcgtgtagagtagcagctgatttgacctgtcccagattttaagtgatattccaaaagggactttacattaaaggagaagcccccaagatgtggccacccttaaccatttttaaatagtaacaaattaggaaaacagctcccctcccctccagccatgtaagtcctcctgattctgtatcacatgagacaccaaaaactggaaatgtagtcacacccagtacagtaccatttttatgaatttaaaaatagtcttataattttaattgtttgtgggtatttttctactggtataaatagcttctaattaataaatcgatcaaaggttgttactcagtatacatgaaattttttgcaggaaaagaaaccagaaatacagaataattcatagaaatcatggttctcaagtatttgttcaattagctttggggaagaaatgccaaatccactttgaggatgagtcttacgacacagatccacccacatgttgctcttatctggaatttgggacaaagcaatgcacaggccctcattcctgatgtggcgccctccagacatggctgcccaggaaggacggccactttagaagtgggacgtatcaccagtaagcttgaatgattaggatcgcaggtggctactgcattctgccgttcgtgaccgtgttctagcctgtagaccacccagctaccttcattcaccagtttttatccttcaccttttccagtatcttgttaaccactagttcttgagttttttggctatgatgtgtacgtttatgtatgtcattcatggactttcaactagaaaaggtaatgataaggttttctgaagaccatttgtaaattgtccatttaaccatttttcagcttgctttgaaacaaaagtcacacctactatttttctatgaattagggaatgagggggagatcattcagttttacttttctttttgttgaaattttgtacccggattgcagttggcacttttcctaaaacagaattgtttcccacttaggtgtcagaatgtacctttgaacttccctaagaagcagcaggatctttttaactctctctggtctgtttagactttgaagtcccttctgtagaaaagtctcataactgagaaggctctgttttgggccgggtgggtctgctggcctccactcactgtgctgtttcctttgagtggcacacttgggaagctccggggcatgtgaaggagctgcaaacatgagaactaatgaaccaaggcggctgccaccaggaaggaacagaacgcaggcattcaaccatgacgtctgcacagtgttagtaacatgtcattgtggtttcgttctcactgtggtaaaatttatttctgagcacttaaactgtgttgcatacccctaattttttttttttctgtatcttccttgccctcaaataccctgaggtgataaactgttccagttgtagccaactaccactgctaggcctcaatgtaaattcagttgaaatttgcaattctatcagcaatttaatgtattgaattcagatcatcatttgtcattttaaccgacaaccacccaataaatttactctgcagttctgaa

SEQ ID NO: 25620 - DNA, 667 bp, Homo sapiens
  source 1..667: mol_type = unassigned DNA
cctgatagacatcctaggactatacagaaggaaaaggcccactttgggggataatgctgagggacactatgaaatcttggaatgatagccagtcagatctgtgtagcactgaccaagaagaggaagaagagatgatttttggtgaaaatgaagatgatttggatgagatgatggatttaagtgatctgcctacctcactttttgcttgcagcgtccatgaagcagtgtttgaggcacgagagcagaaggaaagatttgaagcactcttcaccatctatgatgaccaggttacttttcagctgtttaaaagctttagaagagtcagaataaatttcagcaaacctgaagcggcagcaagagcgcgaatagaactccacgaaacagacttcaatgggcagaagctaaagctatattttgcacaggagagaaatatgaacttcacgcgggaacagagtcgacacccagcgtggtggttcatgtctgtgaaagtgaaactgaagaggaagaagagacaaaaaaccccaaacagaaaattgcccagacgaggcgccccgaccctccgaccgcagcgttgaatgagccccagacctttgattgcgcgctgtgaggcccttggttgtggtgcgaggcggctgccctggtgggctctggccatggcgctctgtgc

SEQ ID NO: 25621 - DNA, 416 bp, Homo sapiens
  source 1..416: mol_type = unassigned DNA
gtataacagaaaaatgaaccaagcactgtaagagctaagtccacctgacaactttgtcttgaagaaaagattaatgaaagccacagtgagatacactgtcactccctgccccgcttccgcagggcccctttccagattggagatttctggcacgataaatgatgggtgcctgatagacatcctaggactatacagaaggaaaaggcccactttgggggataatgctgagggacactatgaaatcttggaatgatagccagtcagatctgtgtagcactgaccaagaagaggaagaagagatgatttttggtgaaaatgaagatgatttggatgagatgatggatttaagtgatctgcctacctcactttttgcttgcagcgtccatgaagcagtgtttgaggcacgagagcagaag

SEQ ID NO: 25622 - DNA, 2746 bp, Homo sapiens
  source 1..2746: mol_type = unassigned DNA
cctagtcccagcccagggggccgctctcgccggcgtcgagggcgtggcggcgaggctgctgctgcaggcggctcccggctctgccttcggccccgcccgccgcccaccaggctcccagaggccccgcagctcgcgccgtccggctccccgcagccccgtcgggcagcccgggcccgtccgctgccctcccggctcccgtcctgcggcggcggggcgtgcaggtgaggccccacggcgcccggcctctccagcagtgggtgcctgatagacatcctaggactatacagaaggaaaaggcccactttgggggataatgctgagggacactatgaaatcttggaatgatagccagtcagatctgtgtagcactgaccaagaagaggaagaagagatgatttttggtgaaaatgaagatgatttggatgagatgatggatttaagtgatctgcctacctcactttttgcttgcagcgtccatgaagcagtgtttgaggcacgagagcagaaggaaagatttgaagcactcttcaccatctatgatgaccaggttacttttcagctgtttaaaagctttagaagagtcagaataaatttcagcaaacctgaagcggcagcaagagcgcgaatagaactccacgaaacagacttcaatgggcagaagctaaagctatattttgcacagtcctatctcctgccgccccagcctgtcaagcagttcctcatctcccctccagcctctcccccggtggggtggaagcagagcgaagatgcgatgcctgttataaattatgatttactctgtgctgtttccaaattgggaccaggagagaaatatgaacttcacgcgggaacagagtcgacacccagcgtggtggttcatgtctgtgaaagtgaaactgaagaggaagaagagacaaaaaaccccaaacagaaaattgcccagacgaggcgccccgaccctccgaccgcagcgttgaatgagccccagacctttgattgcgcgctgtgaggcccttggttgtggtgcgaggcggctgccctggtgggctctggccatggcgctctgtgcctgcggccgatgcgttgctgcgaacagcataggtgagactctgccgagtgaggtataggtcttctcaccacgcctgtactgcagacacggtcgtgtagagtagcagctgatttgacctgtcccagattttaagtgatattccaaaagggactttacattaaaggagaagcccccaagatgtggccacccttaaccatttttaaatagtaacaaattaggaaaacagctcccctcccctccagccatgtaagtcctcctgattctgtatcacatgagacaccaaaaactggaaatgtagtcacacccagtacagtaccatttttatgaatttaaaaatagtcttataattttaattgtttgtgggtatttttctactggtataaatagcttctaattaataaatcgatcaaaggttgttactcagtatacatgaaattttttgcaggaaaagaaaccagaaatacagaataattcatagaaatcatggttctcaagtatttgttcaattagctttggggaagaaatgccaaatccactttgaggatgagtcttacgacacagatccacccacatgttgctcttatctggaatttgggacaaagcaatgcacaggccctcattcctgatgtggcgccctccagacatggctgcccaggaaggacggccactttagaagtgggacgtatcaccagtaagcttgaatgattaggatcgcaggtggctactgcattctgccgttcgtgaccgtgttctagcctgtagaccacccagctaccttcattcaccagtttttatccttcaccttttccagtatcttgttaaccactagttcttgagttttttggctatgatgtgtacgtttatgtatgtcattcatggactttcaactagaaaaggtaatgataaggttttctgaagaccatttgtaaattgtccatttaaccatttttcagcttgctttgaaacaaaagtcacacctactatttttctatgaattagggaatgagggggagatcattcagttttacttttctttttgttgaaattttgtacccggattgcagttggcacttttcctaaaacagaattgtttcccacttaggtgtcagaatgtacctttgaacttccctaagaagcagcaggatctttttaactctctctggtctgtttagactttgaagtcccttctgtagaaaagtctcataactgagaaggctctgttttgggccgggtgggtctgctggcctccactcactgtgctgtttcctttgagtggcacacttgggaagctccggggcatgtgaaggagctgcaaacatgagaactaatgaaccaaggcggctgccaccaggaaggaacagaacgcaggcattcaaccatgacgtctgcacagtgttagtaacatgtcattgtggtttcgttctcactgtggtaaaatttatttctgagcacttaaactgtgttgcatacccctaattttttttttttctgtatcttccttgccctcaaataccctgaggtgataaactgttccagttgtagccaactaccactgctaggcctcaatgtaaattcagttgaaatttgcaattctatcagcaatttaatgtattgaattcagatcatcatttgtcattttaaccgacaaccacccaataaatttactctgcagttctg

SEQ ID NO: 25623 - DNA, 658 bp, Homo sapiens
  source 1..658: mol_type = unassigned DNA
aaggaaaaggcccactttgggggataatgctgagggacactatgaaatcttggaatgatagccagtcagatctgtgtagcactgaccaagaagaggaagaagagatgatttttggtgaaaatgaagatgatttggatgagatgatggatttaagtgatctgcctacctcactttttgcttgcagcgtccatgaagcagtgtttgaggcacgagagcagaaggtgcagatgtccggcgaagtgcgggacaagtcctatctcctgccgccccagcctgtcaagcagttcctcatctcccctccagcctctcccccggtggggtggaagcagagcgaagatgcgatgcctgttataaattatgatttactctgtgctgtttccaaattgggaccaggagagaaatatgaacttcacgcgggaacagagtcgacacccagcgtggtggttcatgtctgtgaaagtgaaactgaagaggaagaagagacaaaaaaccccaaacagaaaattgcccagacgaggcgccccgaccctccgaccgcagcgttgaatgagccccagacctttgattgcgcgctgtgaggcccttggttgtggtgcgaggcggctgccctggtgggctctggccatggcgctctgtgcctgcggccgatgcgttgctg

SEQ ID NO: 25624 - DNA, 4079 bp, Homo sapiens
  source 1..4079: mol_type = unassigned DNA
agttgtcttgccgggactgtccatcttttcccgccgttcactggcttttggaggagggtcagagttcacgccgctctctggaaataactgctcaaagccagaagttgcggggactagtggtcgcggacgtccttccggtcctaaatcttaaggggcaaaggacatactctgggactgttaactaggccctggaggcgggaagaggatgtgtgggtggggtcaggggtgagaggtcagagggccgcgaagtgggcggagcgagccggagtcggatggcggctacggcggctcattgttttccgctgcaggggtgctgaaggggggacgcgggtcggacgcgtccggctgtggaagagagcggcggccgctcacaacatgcacagcctggcgacggctgcgcctgtgcctactacactggcacaagtggatagagaaaagatctatcagtggatcaatgagctgtccagtcctgagactagggaaaatgctttgctggagctaagtaagaagcgagaatctgttcctgaccttgcacccatgctgtggcattcatttggtactattgcagcacttttacaggaaattgtaaatatttatccatctatcaacccacccaccttgacagcacaccagtctaacagagtttgcaatgctctggcattactgcaatgtgtagcatcacatccagaaaccaggtcagcgtttctcgcagcacacatcccactttttttgtacccctttttgcacactgtcagcaaaacacgtccctttgagtatctccggctcaccagccttggagttattggggccctggtgaaaacagatgaacaagaagtaatcaactttttattaacaacagaaattatccctttatgtttgcgaattatggaatctggaagtgaactttctaaaacagttgccacattcatcctccagaagatcttgttagatgacactggtttggcttatatatgtcagacgtatgagcgtttctcccatgttgccatgatcttgggtaagatggtcctgcagctatccaaagagccttctgcccgtctgctgaagcatgtagtgagatgttaccttcgactttcagataaccccagggcacgtgaagcactcagacagtgcctccctgaccagctgaaagacacaaccttcgcccaggtgctaaaagatgacaccaccacgaaacgctggcttgcacaactggtgaagaacctgcaagagggccaggtcaccgatccccggggtatccccctgccccctcagtgatccttccctgttccctcccactactcccccaagttggggaaaggagggggaacctacgagaaaaacagctcaggttttatcaccgactgggaatagacaacctcaatgctgaaccgcactggagaaaaggggcaaggtacccctgctgaggtgtatgggctgccatctcaggctgtcttgaggacctgggctccctctgctactcccaggaaatgggctcctgacacagcagtctgccaccacagccccaggagggtgtcaacaccagcaaatgctgtatttgcagcatgtccaagatgacccttctcccctacctctacctagccactggcagggaggggagacagtggtgatagcagcagcactctaggcatggtgaacgcctgggaccaagccatgtggcgttttttattttgcctttctggaagactcaagatatgtctcttcattctctctcagtatttgtttactttggtttttttgtttttaatctcagagagaggtgtgtttagtgggcacaagctgtaatattcagcaaaactttgtcgactggcactgtttacaagtctgttagctgcataagctcaataaaaagttggtctgggcattacatcccctctggcaggccaatagctgcatcaagctgttgggagaaatgggagggcaggggaaagatgtaaagccaaagtacagcaggaacccaccacctgtttcccttccttctcccattctactcccagtccggaatgccacgaggaccttaaccttgtttctggctttagctgctagttttcccaaatctcagtgctttccctttttgaacttcccttctattaaacttaaaacagatgtcttaattaatcaggctgtcttggaagggtattgtattgggagacaaggggcggtggtggacctcaccttcaatccaagttttcaaagatattttctcaataactctaaaagggaggtgcttgggattaaggtgacagtccacttgatccttttctttgttttagtgtgaatttcagcagctccatctgtcttcatgattgtacttgagcagtattagctgtatgagttaattttattcagattgaagatggagggctgggttctgctcactcagtcttttttttttttttttttttttttttttgaccattctcttttagtctatgggaattacagggttgccgctaaaatattcacttgttcatatcgtgtcagagatttcctcttctctggagcttaggtggctcttcacaatccataggcttgaatctgcaacctagtgtaaactgccttgctttccccggttctttcccctgctagcacctgctttctcatccctatctccagtcaaagatgggattgcttaatccaactctggagagggaccaagtcttttctgcccacatctcacacaattgaggtgtctgaacaagcttggggagggtctataaggggtaggctcaaaaaaaaaaaaacccatttgcagaggcagttttgccaacacaagggctctttcaagccgactttcacaaagagagccggacttgttagttggcttctgtctctttagagccaagaaaatagtaattaagtggcctagatataggaagggcagaataagcacttactccccctgccttccaagatgaagaggagaagcaggccaaccctcaataattgcaagcctgaagagaagtgatcttagagaaagcagagaacagaatggactggatagacatcttgactctattcagcccgtagtctgtgatctggagagtccagttaaggtaacccagatttttgacaaccgccttcctgctgagccaaagttttctcattacccctccactggggaagcagctgaggcccagggccttgctccctgggaaattctcttctctccatctttcggtgcattggccatgttactgtgccaaagtgtcttaattcttgtcccatctattctcagctggccttggaacccacataggagttggtgggggagggatggaatgggtattattcattgtagttgatcctggtgtgtgtattatataaagagacccctccccttattttgtgttttccatccctctcccttaacaggattgaaataaaacatgcttctgtttttgtaaaaataatttttcctttacactggagattttattctatcagtatatgggtaactaggcactttggtcaggtgatccttgtcatgcctgcttctcccctctgtctacctacacaacacacacacacacacacacacagccctgctaagatggcagtagtggttcttttgtgaacatgttttttggggagactccatctgaggtacaaaagctgtttgggaggctgggagggggatgatgccccttacctgataaaagtatgttttactgggacagaacttcactcctggccatattggccagaacttagtgccagtgtagggagagacttccatagtgacaaggtaatgcttgaaacatcttacgaactttgatgttcatttcctcaagttcaaggcttggagcacatctccaggattgtttccatgcctggctgtcagtgggacacagctgccctatgcttccacgttcttttttcaagagccttagagggcctgtggcctgtttcactggtggaacaggagcagcattggtagccttcagagcatgccttgcttactaactacatattattcctctgctcattgttcctgctgcttaaaggctaggaaaagggggatatacaaagttgttgctttcaaaaactcagagaaaaaa

SEQ ID NO: 25625 - DNA, 1621 bp, Homo sapiens
  source 1..1621: mol_type = unassigned DNA
agttgtcttgccgggactgtccatcttttcccgccgttcactggcttttggaggagggtcagagttcacgccgctctctggaaataactgctcaaagccagaagttgcggggactagtggtcgcggacgtccttccggtcctaaatcttaaggggcaaaggacatactctgggactgttaactaggccctggaggcgggaagaggatgtgtgggtggggtcaggggtgagaggtcagagggccgcgaagtgggcggagcgagccggagtcggatggcggctacggcggctcattgttttccgctgcaggggtgctgaaggggggacgcgggtcggacgcgtccggctgtggaagagagcggcggccgctcacaacatgcacagcctggcgacggctgcgcctgtgcctactacactggcacaagtggatagagaaaagatctatcagtggatcaatgagctgtccagtcctgagactagggaaaatgctttgctggagctaagtaagaagcgagaatctgttcctgaccttgcacccatgctgtggcattcatttggtactattgcagcacttttacaggaaattgtaaatatttatccatctatcaacccacccaccttgacagcacaccagtctaacagagtttgcaatgctctggcattactgcaatgtgtagcatcacatccagaaaccaggtcagcgtttctcgcagcacacatcccactttttttgtacccctttttgcacactgtcagcaaaacacgtccctttgagtatctccggctcaccagccttggagttattgtagagacggggtttcaccatgttggccaggctgatcttgaactcccgacctcaagtgatctgcccgcctcggcctcccaaagtgctgggattacaggggccctggtgaaaacagatgaacaagaagtaatcaactttttattaacaacagaaattatccctttatgtttgcgaattatggaatctggaagtgaactttctaaaacagttgccacattcatcctccagaagatcttgttagatgacactggtttggcttatatatgtcagacgtatgagcgtttctcccatgttgccatgatcttgggtaagatggtcctgcagctatccaaagagccttctgcccgtctgctgaagcatgtagtgagatgttaccttcgactttcagataaccccagggcacgtgaagcactcagacagtgcctccctgaccagctgaaagacacaaccttcgcccaggtgctaaaagatgacaccaccacgaaacgctggcttgcacaactggtgaagaacctgcaagagggccaggtcaccgatccccggggtatccccctgccccctcagtgatccttccctgttccctcccactactcccccaagttggggaaaggagggggaacctacgagaaaaacagctcaggttttatcaccgactgggaatagacaacctcaatgctgaaccgcactggagaaaaggggcaaggtacccctgctgaggtgtatgggctgccatctcaggctgtcttgaggacctgggctccctctgctactcccaggaaatgggctcctgacacagcagtctgccaccacagcccca

SEQ ID NO: 25626 - DNA, 3259 bp, Homo sapiens
  source 1..3259: mol_type = unassigned DNA
gtccttccggtcctaaatcttaaggggcaaaggacatactctgggactgttaactaggccctggaggcgggaagaggatgtgtgggtggggtcaggggtgagaggtcagagggccgcgaagtgggcggagcgagccggagtcggatggcggctacggcggctcattgttttccgctgcaggggtgctgaaggggggacgcgggtcggacgcgtccggctgtggaagagagcggcggccgctcacaacatgcacagcctggcgacggctgcgcctgtgcctactacactggcacaagtggatagagaaaagatctatcagtggatcaatgagctgtccagtcctgagactagggaaaatgctttgctggagctaagtaagaagcgagaatctgttcctgaccttgcacccatgctgtggcattcatttggtactattgcagcacttttacaggaaattgtaaatatttatccatctatcaacccacccaccttgacagcacaccagtctaacagagtttgcaatgctctggcattactgcaatgtgtagcatcacatccagaaaccaggtcagcgtttctcgcagcacacatcccactttttttgtacccctttttgcacactgtcagcaaaacacgtccctttgagtatctccggctcaccagccttggagttattggggccctggtgaaaacagatgaacaagaagtaatcaactttttattaacaacagaaattatccctttatgtttgcgaattatggaatctggaagtgaactttctaaaacagttgccacattcatcctccagaagatcttgttagatgacactggtttggcttatatatgtcagacgtatgagcgtttctcccatgttgccatgatcttgggtaagatggtcctgcagctatccaaagagccttctgcccgtctgctgaagcatgtagtgagatgttaccttcgactttcagataaccccagggcacgtgaagcactcagacagtgcctccctgaccagctgaaagacacaaccttcgcccaggtgctaaaagatgacaccaccacgaaacgctggcttgcacaactggtgaagaacctgcaagagggccaggtcaccgatccccggggtatccccctgccccctcagtgatccttccctgttccctcccactactcccccaagttggggaaaggagggggaacctacgagaaaaacagctcaggttttatcaccgactgggaatagacaacctcaatgctgaaccgcactggagaaaaggggcaaggtacccctgctgaggtgtatgggctgccatctcaggctgtcttgaggacctgggctccctctgctactcccaggaaatgggctcctgacacagcagtctgccaccacagccccaggagggtgtcaacaccagcaaatgctgtatttgcagcatgtccaagatgacccttctcccctacctctacctagccactggcagggaggggagacagtggtgatagcagcagcactctaggcatggtgaacgcctgggaccaagccatgtggcgttttttattttgcctttctggaagactcaagatatgtctcttcattctctctcagtatttgtttactttggtttttttgtttttaatctcagagagaggtgtgtttagtgggcacaagctgtaatattcagcaaaactttgtcgactggcactgtttacaagtctgttagctgcataagctcaataaaaagttggtctgggcattacatcccctctggcaggccaatagctgcatcaagctgttgggagaaatgggagggcaggggaaagatgtaaagccaaagtacagcaggaacccaccacctgtttcccttccttctcccattctactcccagtccggaatgccacgaggaccttaaccttgtttctggctttagctgctagttttcccaaatctcagtgctttccctttttgaacttcccttctattaaacttaaaacagatgtcttaattaatcaggctgtcttggaagggtattgtattgggagacaaggggcggtggtggacctcaccttcaatccaagttttcaaagatattttctcaataactctaaaagggaggtgcttgggattaaggtgacagtccacttgatccttttctttgttttagtgtgaatttcagcagctccatctgtcttcatgattgtacttgagcagtattagctgtatgagttaattttattcagattgaagatggagggctgggttctgctcactcagtcttttttttttttttttttttttttttttgaccattctcttttagtctatgggaattacagggttgccgctaaaatattcacttgttcatatcgtgtcagagatttcctcttctctggagcttaggtggctcttcacaatccataggcttgaatctgcaacctagtgtaaactgccttgctttccccggttctttcccctgctagcacctgctttctcatccctatctccagtcaaagatgggattgcttaatccaactctggagagggaccaagtcttttctgcccacatctcacacaattgaggtgtctgaacaagcttggggagggtctataaggggtaggctcaaaaaaaaaaaaacccatttgcagaggcagttttgccaacacaagggctctttcaagccgactttcacaaagagagccggacttgttagttggcttctgtctctttagagccaagaaaatagtaattaagtggcctagatataggaagggcagaataagcacttactccccctgccttccaagatgaagaggagaagcaggccaaccctcaataattgcaagcctgaagagaagtgatcttagagaaagcagagaacagaatggactggatagacatcttgactctattcagcccgtagtctgtgatctggagagtccagttaaggtaacccagatttttgacaaccgccttcctgctgagccaaagttttctcattacccctccactggggaagcagctgaggcccagggccttgctccctgggaaattctcttctctccatctttcggtgcattggccatgttactgtgccaaagtgtcttaattcttgtcccatctattctcagctggccttggaacccacataggagttggtgggggagggatgtgtattatataaagagacccctccccttattttgtgttttccatccctctcccttaacaggattgaaataaaacatgcttctgtttttgt

SEQ ID NO: 25627 - DNA, 1129 bp, Homo sapiens
  source 1..1129: mol_type = unassigned DNA
ttttccgctgcaggggtgctgaaggggggacgcgggtcggacgcgtccggctgtggaagagagcggcggccgctcacaacatgcacagcctggcgacggctgcgcctgtgcctactacactggcacaagtggatagagaaaagatctatcagtggatcaatgagctgtccagtcctgagactagggaaaatgctttgctggagctaagtaagaagcgagaatctgttcctgaccttgcacccatgctgtggcattcatttggtactattgcagcacttttacaggaaattgtaaatatttatccatctatcaacccacccaccttgacagcacaccagtctaacagagtttgcaatgctctggcattactgcaatgtgtagcatcacatccagaaaccaggtcagcgtttctcgcagcacacatcccactttttttgtacccctttttgcacactgtcagcaaaacacgtccctttgagtatctccggctcaccagccttggagttattggggccctggtgaaaacagatgaacaagaagtaatcaactttttattaacaacagaaattatccctttatgtttgcgaattatggaatctggaagtgaactttctaaaacagttgccacattcatcctccagaagatcttgttagatgacactggtttggcttatatatgtcagacgtatgagcgtttctcccatgttgccatgatcttgggtaagatggtcctgcagctatccaaagagccttctgcccgtctgctgaagcatgtagtgagatgttaccttcgactttcagataaccccaggttttcagatttgactttctgctggtcatcttttcaaagaaaatgaaacgtttaaaagttcatctgataatactgctaccatagttttgttttcactgctcatctcttattaaggtttttaaccataaaactgaagcaatttctgtaaagacacaaattgataacttagtatagaattaaaattcattaagttatcataagtttgatgatatccttgttaatgtactgatttttgaattattttatttgccataatccatatatttctaacatgagtattttgacagtatttaataaatcagaaagctgtttgaatgg

SEQ ID NO: 25628 - DNA, 1485 bp, Homo sapiens
  source 1..1485: mol_type = unassigned DNA
tccctgggactgcgtcactggtgcgcgccgcgggtcagggcgcaatggcggcgctgggcggggatgggctgcgactgctgtcggtgtcgcggccggagcggccgcccgagtcggcggcgctgggcggcctgggccccgggctgtgctgctgggtgtcagtgttctcctgcctcagcctcgcctgctcctacgtgggcagcctctacgtctggaagagcgaactgcccagggaccatcccgcggtcatcaagcgacgcttcaccagcgtcctggtggtgtccagtctctcacccctgtgcgtgctgctctggagggaactcacaggcatccagccaggcacatccctgctcaccctgatgggcttcaggctggagggcattttcccagcggcgctgctgcccctgttgctgaccatgattcttttcctgggcccactgatgcagctctctatggattgcccttgtgacctggcagatgggctgaaggttgtcctggccccccgctcctgggcccgctgcctcacagacatgcgttggctgcggaaccaagtgatcgccccgctgacagaggagctggtgttccgggcctgtatgctgcccatgttagcaccgtgcatgggcctgggccctgctgtgttcacctgcccgctcttttttggagttgcccattttcaccatattattgagcagctgcgtttccgccagagcagcgtggggaacatcttcttgtctgctgcgttccagttctcctacacagctgtcttcggtgcctacactgctttcctcttcatccgcacaggacacctgattgggccggttctctgccattccttctgcaattacatgggtttcccagctgtttgcgcggccttggagcacccacagaggcggcccctgctggcaggctatgccctgggtgtgggactcttcctgcttctgctccagcccctcacggaccccaagctctacggcagccttcccctttgtgtgcttttggagcgggcaggggactcagaggctcccctgtgctcctgacctatgctcctggatacgctatgaactctcaccggctccccagccctccccaccaaggggtactgcaggggaagggctggctggggtccccgagatctcaggaatttttgtaggggattgaagccagagctagttgcgtcccagggaccaagagaaagaagcagatatccaaagggtgcagccccttttgaaaggggtgtttacgagcagctgtgagtgaggggacaaggggcaggtcccaggagccacacactcccttcctcactttggactgctgcttctcttagctcctctgcctctgaaaagctgctcggggttttttatttataaaacctctccccaccccccaccccccaacttcctgggttttctcattgtctttttgcatcagtactttgtattgggatattaaagagatttaacttgggtaacatggccttgggcctttggg

SEQ ID NO: 25629 - DNA, 1379 bp, Homo sapiens
  source 1..1379: mol_type = unassigned DNA
cgccgcgggtcagggcgcaatggcggcgctgggcggggatgggctgcgactgctgtcggtgtcgcggccggagcggccgcccgagtcggcggcgctgggcggcctgggccccgggctgtgctgctgggtgtcagtgttctcctgcctcagcctcgcctgctcctacgtgggcagcctctacgtctggaagagcgaactgcccagggaccatcccgcggtcatcaagcgacgcttcaccagcgtcctggtggtgtccagtctctcacccctgtgcgtgctgctctggagggaactcacaggcatccagccaggcacatccctgctcaccctgatgggcttcaggctggagggcattttcccagcggcgctgctgcccctgttgctgaccatgattcttttcctgggcccactgatgcagctctctatggattgcccttgtgacctggcagatgggctgaaggttgtcctggccccccgctcctgggcccgctgcctcacagacatgcgttggctgcggaaccaagtgatcgccccgctgacagaggagctggtgttccgggcctgtatgctgcccatgttagcaccgtgcatgggcctgggccctgctgtgttcacctgcccgctcttttttggagttgcccattttcaccatattattgagcagctgcgtttccgccagagcagcgtggggaacatcttcttgtctgctggacacctgattgggccggttctctgccattccttctgcaattacatgggtttcccagctgtttgcgcggccttggagcacccacagaggcggcccctgctggcaggctatgccctgggtgtgggactcttcctgcttctgctccagcccctcacggaccccaagctctacggcagccttcccctttgtgtgcttttggagcgggcaggggactcagaggctcccctgtgctcctgacctatgctcctggatacgctatgaactctcaccggctccccagccctccccaccaaggggtactgcaggggaagggctggctggggtccccgagatctcaggaatttttgtaggggattgaagccagagctagttgcgtcccagggaccaagagaaagaagcagatatccaaagggtgcagccccttttgaaaggggtgtttacgagcagctgtgagtgaggggacaaggggcaggtcccaggagccacacactcccttcctcactttggactgctgcttctcttagctcctctgcctctgaaaagctgctcggggttttttatttataaaacctctccccaccccccaccccccaacttcctgggttttctcattgtctttttgcatcagtactttgtattgggatattaaagagatttaacttgggtaaca

SEQ ID NO: 25630 - DNA, 1405 bp, Homo sapiens
  source 1..1405: mol_type = unassigned DNA
atagccgtttctctgttcttcctctttgcgttgctctgcgggcgctacgctggctccaccgccttctctgccgttcaaaccccgcggttgtccttaccctagcgagggtaggggggtcgggtgccatcgtctttccgacggagtggatatttgtccctccttgaaccacatggtacctaaaggagccaccatgttggtgataccccccggactgagcgaggaagaggaggctctgcagaagaaattcaacaagctcaagaaaaagaaaaaggcattgctggctctgaagaagcaaagtagcagcagcacaaccagccaaggtggtgtcaaacgctcactatcagagcagcctgtcatggacacagccacagcaacagagcaggcaaagcagctggtgaagtcaggagccatcagtgccatcaaggctgagaccaagaactcaggcttcaagcgttctcgaacccttgaggggaagttaaaggaccccgagaagggaccagtccccactttccagccgttccagaggagcatatctgctgatgatgacctgcaagagtcatccagacgtccccagaggaaatctctgtatgagagctttgtgtcttctagtgatcgacttcgagaactaggaccagatggagaagaggcagagggcccaggggctggtgatggtccccctcgaagctttgactggggctatgaagaacgcagtggtgcccactcctcagcctcccctccccgaagccgcagccgggaccgcagccatgagaggaaccgggacagagaccgagatcgggagcgggatcgagaccgggatcgagacagagacagagagcgggacagggatcgggatcgggatcgagatcgagaccgggaacgggacagggatcgggagcgggatcgagaccgagaccgagagggtcctttccgcaggtcggattcattccctgaacggcgagcccctaggaaagggaatactctctatgtatatggagaagacatgacacccacccttctccgtggggccttctctccttttggaaacatcattgacctctccatggacccacccagaaactgtgccttcgtcacctatgaaaagatggagtcagcagatcaggccgttgctgagctcaacgggacccaggtggagtctgtacagctcaaagtcaacatagcccgaaaacagcccatgctggatgccgctactggcaagtctgtctggggctccctcgctgtccagaacagccctaagggttgccaccgggacaagaggacccagattgtctacagtgatgacgtctacaaggaaaaccttgtggatggcttctagggaacagagctggattccttgtgcctcatatgccccaatgctggtctcagtaaaacactgaggtggaagctt

SEQ ID NO: 25631 - DNA, 1584 bp, Homo sapiens
  source 1..1584: mol_type = unassigned DNA
aagtagaggcaacttccggtacagccccgccgagagcgtgaactatcgctgcggaggggcagacctggaccggtggaaggccgggcggaagtgcgcgcctggggccgccttggttaccgcgttttccgctcctcgctacgtcatcgttgtgagcccgctatcagcggccagcgcgggcgcggccggagaccgtggggcccccggttgccgccccctcgggagccaccatgttggtgataccccccggactgagcgaggaagaggaggctctgcagaagaaattcaacaagctcaagaaaaagaaaaaggcattgctggctctgaagaagcaaagtagcagcagcacaaccagccaaggtggtgtcaaacgctcactatcagagcagcctgtcatggacacagccacagcaacagagcaggcaaagcagctggtgaagtcaggagccatcagtgccatcaaggctgagaccaagaactcaggcttcaagcgttctcgaacccttgaggggaagttaaaggaccccgagaagggaccagtccccactttccagccgttccagaggagcatatctgctgatgatgacctgcaagagtcatccagacgtccccagaggaaatctctgtatgagagctttgtgtcttctagtgatcgacttcgagaactaggaccagatggagaagaggcagagggcccaggggctggtgatggtccccctcgaagctttgactggggctatgaagaacgcagtggtgcccactcctcagcctcccctccccgaagccgcagccgggaccgcagccatgagaggaaccgggacagagaccgagatcgggagcgggatcgagaccgggatcgagacagagacagagagcgggacagggatcgggatcgggatcgagatcgagaccgggaacgggacagggatcgggagcgggatcgagaccgagaccgagagggtcctttccgcaggtcggattcattccctgaacggcgagcccctaggaaagggaatactctctatgtatatggagaagacatgacacccacccttctccgtggggccttctctccttttggaaacatcattgacctctccatggacccacccagaaactgtgccttcgtcacctatgaaaagatggagtcagcagatcaggccgttgctgagctcaacgggacccaggtggagtctgtacagctcaaagtcaacatagcccgaaaacagcccatgctggatgccgctactggcaagtctgtctggggctccctcgctgtccagaacagccctaagggttgccaccgggacaagaggacccagattgtctacagtgatgacgtctacaaggaaaaccttgtggatggcttctagggaacagagctggattccttgtgcctcatatgccccaatgctggtctcagtaaaacactgaggtggaagcttacacatctccctcagcctctggtttttcagcacttgggattggggttaaacctttaaaaacggctgtcaggtttgatctcagtgtaacaacatggccagtgcctgttccccactcccttgccccaaaaggatctggaacaca

SEQ ID NO: 25632 - DNA, 1566 bp, Homo sapiens
  source 1..1566: mol_type = unassigned DNA
gtacagccccgccgagagcgtgaactatcgctgcggaggggcagacctggaccggtggaaggccgggcggaagtgcgcgcctggggccgccttggttaccgcgttttccgctcctcgctacgtcatcgttgtgagcccgctatcagcggccagcgcgggcgcggccggagaccgtggggcccccggttgccgccccctcgggagccaccatgttggtgataccccccggactgagcgaggaagaggaggctctgcagaagaaattcaacaagctcaagaaaaagaaaaaggcattgctggctctgaagaagcaaagtagcagcagcacaaccagccaaggtggtgtcaaacgctcactatcagagcagcctgtcatggacacagccacagcaacagagcaggcaaagcagctggtgaagtcaggagccatcagtgccatcaaggctgagaccaagaactcaggcttcaagcgttctcgaacccttgaggggaagttaaaggaccccgagaagggaccagtccccactttccagccgttccagaggagcatatctgctgatgatgacctgcaagagtcatccagacgtccccagaggaaatctctgtatgagagctttgtgtcttctagtgatcgacttcgagaactaggaccagatggagaagaggcagagggcccaggggctggtgatggtccccctcgaagctttgactggggctatgaagaacgcagtggtgcccactcctcagcctcccctccccgaagccgcagccgggaccgcagccatgagaggaaccgggacagagaccgagatcgggagcgggatcgagaccgggatcgagacagagacagagagcgggacagggatcgggatcgggatcgagatcgagaccgggaacgggacagggatcgggagcgggatcgagaccgagaccgagagggtcctttccgcaggtcggattcattccctgaacggcgagcccctaggaaagggaatactctctatgtatatggagaagacatgacacccacccttctccgtggggccttctctccttttggaaacatcattgacctctccatggacccacccagaaactgtgccttcgtcacctatgaaaagatggagtcagcagatcaggccgttgctgagctcaacgggacccaggtggagtctgtacagctcaaagtcaacatagcccgaaaacagcccatgctggatgccgctactggcaagtctgtctggggctccctcgctgtccagaacagccctaagggttgccaccgggacaagaggacccagattgtctacagtgatgacgtctacaaggaaaaccttgtggatggcttctagggaacagagctggattccttgtgcctcatatgccccaatgctggtctcagtaaaacactgaggtggaagcttacacatctccctcagcctctggtttttcagcacttgggattggggttaaacctttaaaaacggctgtcaggtttgatctcagtgtaacaacatggccagtgcctgttccccactcccttgccccaaaaggatctggaacaca

SEQ ID NO: 25633 - DNA, 1566 bp, Homo sapiens; identical to SEQ ID NO: 25632
  source 1..1566: mol_type = unassigned DNA

SEQ ID NO: 25634 - DNA, 914 bp, Homo sapiens
  source 1..914: mol_type = unassigned DNA
gtcttgggccctgcccctgaactaggagccaccatgttggtgataccccccggactgagcgaggaagaggaggctctgcagaagaaattcaacaagctcaagaaaaagaaaaaggcattgctggctctgaagaagcaaagtagcagcagcacaaccagccaaggtggtgtcaaacgctcactatcagagcagcctgtcatggacacagccacagcaacagagcaggcaaagcagctggtgaagtcaggagccatcagtgccatcaaggctgagaccaagaactcaggcttcaagcgttctcgaacccttgaggggaagttaaaggaccccgagaagggaccagtccccactttccagccgttccagaggagcatatctgctgatgatgacctgcaagagtcatccagacgtccccagaggaaatctctgtatgagagctttgtgtcttctagtgatcgacttcgagaactaggaccagatggagaagaggcagagggcccaggggctggtgatggtccccctcgaagctttgactggggctatgaagaacgcagtggtgcccactcctcagcctcccctccccgaagccgcagccgggaccgcagccatgagaggaaccgggacagagaccgagatcgggagcgggatcgagaccgggatcgagacagagacagagagcgggacagggatcgggatcgggatcgagatcgagaccgggaacgggacagggatcgggagcgggatcgagaccgagaccgagagggtcctttccgcaggtcggattcattccctgaacggcgagcccctaggaaagggaatactctctatgtatatggagaagacatgacacccacccttctccgtggggccttctctccttttggaaacatcattgacctctccatggacccacc

SEQ ID NO: 25635 - DNA, 765 bp, Homo sapiens
  source 1..765: mol_type = unassigned DNA
ttttctcatagccgtttctctgttcttcctctttgcgttgctctgcgggcgctacgctggctccaccgccttctctgccgttcaaaccccgcggttgtccttaccctagcgagggtaggggggtcgggtgccatcgtctttccgacggagtggatatttgtccctccttgaaccacatggtacctaaaggtgctggtgtctgtgatccctggagacaggagggaatgctggatgatcccgaccagcgggagcttggacagcagcctggtttaagcaaggggagccaccatgttggtgataccccccggactgagcgaggaagaggaggctctgcagaagaaattcaacaagctcaagaaaaagaaaaaggcattgctggctctgaagaagcaaagtagcagcagcacaaccagccaaggtggtgtcaaacgctcactatcagagcagcctgtcatggacacagccacagcaacagagcaggcaaagcagctggtgaagtcaggagccatcagtgccatcaaggctgagaccaagaactcaggcttcaagcgttctcgaacccttgaggggaagttaaaggaccccgagaagggaccagtccccactttccagccgttccagaggagcatatctgctgatgatgacctgcaagagtcatccagacgtccccagaggaaatctctgtatgagagctttgtgtcttctagtgatcgacttcgagaactaggaccagatggagaagaggcagagggcccaggggctggt

SEQ ID NO: 25636 - DNA, 847 bp, Homo sapiens
  source 1..847: mol_type = unassigned DNA
agccaaagacaagagtaggcagacctgaaggggtggggttgggtacagtgtggacggcgtgtgaaccccgggtggtaacagtggagaaagatgtcttgggccctgcccctgaactaggagccaccatgttggtgataccccccggactgagcgaggaagaggaggctctgcagaagaaattcaacaagctcaagaaaaagaaaaaggcattgctggctctgaagaagcaaagtagcagcagcacaaccagccaaggtggtgtcaaacgctcactatcagagcagcctgtcatggacacagccacagcaacagagcaggcaaagcagctggtgaagtcaggagccatcagtgccatcaaggctgagaccaagaactcaggcttcaagcgttctcgaacccttgaggggaagttaaaggaccccgagaagggaccagtccccactttccagccgttccagaggagcatatctgctgatgatgacctgcaagagtcatccagacgtccccagaggaaatctctgtatgagagtgatcgacttcgagaactaggaccagatggagaagaggcagagggcccaggggctggtgatggtccccctcgaagctttgactggggctatgaagaacgcagtggtgcccactcctcagcctcccctccccgaagccgcagccgggaccgcagccatgagaggaaccgggacagagaccgagatcgggagcgggatcgagaccgggatcgagacagagacagagagcgggacagggatcgggatcgggatcgagatcgagaccgggaacgggacagggatcgggagcgggatcgagaccgagaccgagagggtccttt

SEQ ID NO: 25637 - DNA, 765 bp, Homo sapiens; identical to SEQ ID NO: 25635
  source 1..765: mol_type = unassigned DNA

SEQ ID NO: 25638 - DNA, 765 bp, Homo sapiens; identical to SEQ ID NO: 25635
  source 1..765: mol_type = unassigned DNA

SEQ ID NO: 25639 - DNA, 1075 bp, Homo sapiens
  source 1..1075: mol_type = unassigned DNA
cccgctatcagcggccagcgcgggcgcggccggagaccgtggggcccccggttgccgccccctcgggagccaccatgttggtgataccccccggactgagcgaggaagaggaggctctgcagaagaaattcaacaagctcaagaaaaagaaaaaggcattgctggctctgaagaagcaaagtagcagcagcacaaccagccaaggtggtgtcaaacgctcactatcagagcagcctgtcatggacacagccacagcaacagagcaggcaaagcagctggtgaagtcaggagccatcagtgccatcaaggctgagaccaagaactcaggcttcaagcgttctcgaacccttgaggggaagttaaaggaccccgagaagggaccagtccccactttccagccgttccagaggagcatatctgctgatgatgacctgcaagagtcatccagacgtccccagaggaaatctctgtatgagagtgatcgacttcgagaactaggaccagatggagaagaggcagagggcccaggggctggtgatggtccccctcgaagctttgactggggctatgaagaacgcagtggtgcccactcctcagcctcccctccccgaagccgcagccgggaccgcagccatgagaggaaccgggacagagaccgagatcgggagcgggatcgagaccgggatcgagacagagacagagagcgggacagggatcgggatcgggatcgagatcgagaccgggaacgggacagggatcgggagcgggatcgagaccgagaccgagagggtcctttccgcaggtcggattcattccctgaacggcgagcccctaggaaagggaatactctctatgtatatggagaagacatgacacccacccttctccgtggggccttctctccttttggaaacatcattgacctctccatggacccacccagaaactgtgccttcgtcacctatgaaaagatggagtcagcagatcaggccgttgctgagctcaacgggacccaggtggagtctgtacagctcaaagtcaacatagcccgaaaacagcccatgctggatgccgc

SEQ ID NO: 25640 - DNA, 847 bp, Homo sapiens; identical to SEQ ID NO: 25636
  source 1..847: mol_type = unassigned DNA

SEQ ID NO: 25641 - DNA, 765 bp, Homo sapiens; identical to SEQ ID NO: 25635
  source 1..765: mol_type = unassigned DNA

SEQ ID NO: 25642 - DNA, 1075 bp, Homo sapiens; identical to SEQ ID NO: 25639
  source 1..1075: mol_type = unassigned DNA

SEQ ID NO: 25643 - DNA, 765 bp, Homo sapiens; identical to SEQ ID NO: 25635
  source 1..765: mol_type = unassigned DNA

SEQ ID NO: 25644 - DNA, 1566 bp, Homo sapiens; identical to SEQ ID NO: 25632
  source 1..1566: mol_type = unassigned DNA

SEQ ID NO: 25645 - DNA, 914 bp, Homo sapiens; identical to SEQ ID NO: 25634
  source 1..914: mol_type = unassigned DNA

SEQ ID NO: 25646 - DNA, 847 bp, Homo sapiens; identical to SEQ ID NO: 25636
  source 1..847: mol_type = unassigned DNA

SEQ ID NO: 25647 - DNA, 914 bp, Homo sapiens; identical to SEQ ID NO: 25634
  source 1..914: mol_type = unassigned DNA

SEQ ID NO: 25648 - DNA, 1075 bp, Homo sapiens; identical to SEQ ID NO: 25639
  source 1..1075: mol_type = unassigned DNA

SEQ ID NO: 25649 - DNA, 1075 bp, Homo sapiens; identical to SEQ ID NO: 25639
  source 1..1075: mol_type = unassigned DNA

SEQ ID NO: 25650 - DNA, 1075 bp, Homo sapiens; identical to SEQ ID NO: 25639
  source 1..1075: mol_type = unassigned DNA

SEQ ID NO: 25651 - DNA, 1202 bp, Homo sapiens
  source 1..1202: mol_type = unassigned DNA
gagcccgctatcagcggccagcgcgggcgcggccggagaccgtggggcccccggttgccgccccctcgggagccaccatgttggtgataccccccggactgagcgaggaagaggaggctctgcagaagaaattcaacaagctcaagaaaaagaaaaaggcattgctggctctgaagaagcaaagtagcagcagcacaaccagccaaggtggtgtcaaacgctcactatcagagcagcctgtcatggacacagccacagcaacagagcaggcaaagcagctggtgaagtcaggagccatcagtgccatcaaggctgagaccaagaactcaggcttcaagcgttctcgaacccttgaggggaagttaaaggaccccgagaagggaccagtccccactttccagccgttccagaggagcatatctgctgatgatgacctgcaagagtcatccagacgtccccagaggaaatctctgtatgagagctttgactggggctatgaagaacgcagtggtgcccactcctcagcctcccctccccgaagccgcagccgggaccgcagccatgagaggaaccgggacagagaccgagatcgggagcgggatcgagaccgggatcgagacagagacagagagcgggacagggatcgggatcgggatcgagatcgagaccgggaacgggacagggatcgggagcgggatcgagaccgagaccgagagggtcctttccgcaggtcggattcattccctgaacggcgagcccctaggaaagggaatactctctatgtatatggagaagacatgacacccacccttctccgtggggccttctctccttttggaaacatcattgacctctccatggacccacccagaaactgtgccttcgtcacctatgaaaagatggagtcagcagatcaggccgttgctgagctcaacgggacccaggtggagtctgtacagctcaaagtcaacatagcccgaaaacagcccatgctggatgccgctactggcaagtctgtctggggctccctcgctgtccagaacagccctaagggttgccaccgggacaagaggacccagattgtctacagtgatgacgtctacaaggaaaaccttgtggatggcttctagggaacagagctggattccttgtgcctcatatgccccaatgctggtctcagtaaaacactgaggtggaagctt

SEQ ID NO: 25652 - DNA, 1566 bp, Homo sapiens; identical to SEQ ID NO: 25632
  source 1..1566: mol_type = unassigned DNA

SEQ ID NO: 25653 - DNA, 847 bp, Homo sapiens; identical to SEQ ID NO: 25636
  source 1..847: mol_type = unassigned DNA

SEQ ID NO: 25654 - DNA, 1075 bp, Homo sapiens; identical to SEQ ID NO: 25639
  source 1..1075: mol_type = unassigned DNA

SEQ ID NO: 25655 - DNA, 914 bp, Homo sapiens; identical to SEQ ID NO: 25634
  source 1..914: mol_type = unassigned DNA

SEQ ID NO: 25656 - DNA, 914 bp, Homo sapiens; identical to SEQ ID NO: 25634
  source 1..914: mol_type = unassigned DNA

SEQ ID NO: 25657 - DNA, 914 bp, Homo sapiens; identical to SEQ ID NO: 25634
  source 1..914: mol_type = unassigned DNA

SEQ ID NO: 25658 - DNA, 847 bp, Homo sapiens; identical to SEQ ID NO: 25636
  source 1..847: mol_type = unassigned DNA

SEQ ID NO: 25659 - DNA, 1566 bp, Homo sapiens; identical to SEQ ID NO: 25632
  source 1..1566: mol_type = unassigned DNA

SEQ ID NO: 25660 - DNA, 765 bp, Homo sapiens; identical to SEQ ID NO: 25635
  source 1..765: mol_type = unassigned DNA

SEQ ID NO: 25661 - DNA, 1405 bp, Homo sapiens; identical to SEQ ID NO: 25630
  source 1..1405: mol_type = unassigned DNA

SEQ ID NO: 25662 - DNA, 1405 bp, Homo sapiens; identical to SEQ ID NO: 25630
  source 1..1405: mol_type = unassigned DNA

SEQ ID NO: 25663 - DNA, 1405 bp, Homo sapiens; identical to SEQ ID NO: 25630
  source 1..1405: mol_type = unassigned DNA

SEQ ID NO: 25664 - DNA, 1405 bp, Homo sapiens; identical to SEQ ID NO: 25630
  source 1..1405: mol_type = unassigned DNA

SEQ ID NO: 25665 - DNA, 1405 bp, Homo sapiens; identical to SEQ ID NO: 25630
  source 1..1405: mol_type = unassigned DNA

SEQ ID NO: 25666 - DNA, 7300 bp, Homo sapiens
  source 1..7300: mol_type = unassigned DNA
gcagcgtcctgtgttggaatgtgcggctgccgcgagctcgcggcgcagcagcggagcgagcgccgccgaggcccggggccccagaccctggcggcggctgccgcagccgagacggcagggcgaggcccggaggcctgagcaccctctgcagccccactcctgggccttcttggtccacgacggccccagcacccaactttaccaccctcccccacctctcccccgaaactccagcaacaaagaaaagtagtcggagaaggagcggcgactcagggtcgcccgcccctcctcaccgaggaaggccgaatacagttatggccacccaggtaatggggcagtcttctggaggaggagggctgtttaccagcagtggcaacattggaatggccctgcctaacgacatgtatgacttgcatgacctttccaaagctgaactggccgcacctcagcttattatgctggcaaatgtggccttaactggggaagtaaatggcagctgctgtgattacctggtcggtgaagaaagacagatggcagaactgatgccggttggggataacaacttttcagatagtgaagaaggagaaggacttgaagagtctgctgatataaaaggtgaacctcatggactggaaaacatggaactgagaagtttggaactcagcgtcgtagaacctcagcctgtatttgaggcatcaggtgctccagatatttacagttcaaataaagatcttccccctgaaacacctggagcggaggacaaaggcaagagctcgaagaccaaaccctttcgctgtaagccatgccaatatgaagcagaatctgaagaacagtttgtgcatcacatcagagttcacagtgctaagaaattttttgtggaagagagtgcagagaagcaggcaaaagccagggaatctggctcttccactgcagaagagggagatttctccaagggccccattcgctgtgaccgctgcggctacaatactaatcgatatgatcactatacagcacacctgaaacaccacaccagagctggggataatgagcgagtctacaagtgtatcatttgcacatacacaacagtgagcgagtatcactggaggaaacatttaagaaaccattttccaaggaaagtatacacatgtggaaaatgcaactatttttcagacagaaaaaacaattatgttcagcatgttagaactcatacaggagaacgcccatataaatgtgaactttgtccttactcaagttctcagaagactcatctaactagacatatgcgtactcattcaggtgagaagccatttaaatgtgatcagtgcagttatgtggcctctaatcaacatgaagtaacccgccatgcaagacaggttcacaatgggcctaaacctcttaattgcccacactgtgattacaaaacagcagatagaagcaacttcaaaaaacatgtagagctacatgtgaacccacggcagttcaattgccctgtatgtgactatgcagcttccaagaagtgtaatctacagtatcacttcaaatctaagcatcctacttgtcctaataaaacaatggatgtctcaaaagtgaaactaaagaaaaccaaaaaacgagaggctgacttgcctgataatattaccaatgaaaaaacagaaatagaacaaacaaaaataaaaggggatgtggctggaaagaaaaatgaaaagtccgtcaaagcagagaaaagagatgtctcaaaagagaaaaagccttctaataatgtgtcagtgatccaggtgactaccagaactcgaaaatcagtaacagaggtgaaagagatggatgtgcatacaggaagcaattcagaaaaattcagtaaaactaagaaaagcaaaaggaagctggaagttgacagccattctttacatggtcctgtgaatgatgaggaatcttcaacaaaaaagaaaaagaaggtagaaagcaaatccaaaaataatagtcaggaagtgccaaagggtgacagcaaagtggaggagaataaaaagcaaaatacttgcatgaaaaaaagtacaaagaagaaaactctgaaaaataaatcaagtaagaaaagcagtaagcctcctcagaaggaacctgttgagaagggatctgctcagatggaccctcctcagatggggcctgctcccacagaggcggttcagaaggggcccgttcaggtggagccgccacctcccatggagcatgctcagatggagggtgcccagatacggcctgctcctgacgagcctgttcagatggaggtggttcaggaggggcctgctcagaaggagctgctgcctcccgtggagcctgctcagatggtgggtgcccaaattgtacttgctcacatggagctgcctcctcccatggagactgctcagacggaggttgcccaaatggggcctgctcccatggaacctgctcagatggaggttgcccaggtagaatctgctcccatgcaggtggtccagaaggagcctgttcagatggagctgtctcctcccatggaggtggtccagaaggagcctgttcagatagagctgtctcctcccatggaggtggtccagaaggaacctgttaagatagagctgtctcctcccatagaggtggtccagaaggagcctgttcagatggagttgtctcctcccatgggggtggttcagaaggagcctgctcagagggagccacctcctcccagagagcctccccttcacatggagccaatttccaaaaagcctcctctccgaaaagataaaaaggaaaagtctaacatgcagagtgaaagggcacggaaggagcaagtccttattgaagttggcttagtgcctgttaaagatagctggcttctaaaggaaagtgtaagcacagaggatctctcaccaccatcaccaccactgccaaaggaaaatttaagagaagaggcatcaggagaccaaaaattactcaacacaggtgaaggaaataaagaagcccctcttcagaaagtaggagcagaagaggcagatgagagcctacctggtcttgctgctaatatcaacgaatctacccatatttcatcctctggacaaaacttgaatacgccagagggtgaaactttaaatggtaaacatcagactgacagtatagtttgtgaaatgaaaatggacactgatcagaacacaagagagaatctcactggtataaattcaacagttgaagaaccagtttcaccaatgcttcccccttcagcagtagaagaacgtgaagcagtgtccaaaactgcactggcatcacctcctgctacaatggcagcaaatgagtctcaggaaattgatgaagatgaaggcatccacagccatgaaggaagtgacctaagtgacaacatgtcagagggtagtgatgattctggattgcatggggctcggccagttccacaagaatctagcagaaaaaatgcaaaggaagccttggcagtcaaagcggctaagggagattttgtttgtatcttctgtgatcgttctttcagaaagggaaaagattacagcaaacacctcaatcgccatttggttaatgtgtactatcttgaagaagcagctcaagggcaggagtaatgaaactttgaacaaggtttcagttcttagtttgtaaggtatattacattttatattcatttatgatagcagacaaccttttaagattgctttaattagtatctgatgttgatttttaagtggcattcttttccttaggactttttatgtatacctgttgattgttgtgtaaattttagtaaatctaagagagtgtactaaaccagcaggtatctgttagcttatgtgtttaattgaaattagaaggctaagatggtataacagcattttattgctttgtccagctacaacttgtcatttttttctccatgtcttatcttcctgtttcactttagtttattcttcgttttttattgagatctataaaaaattggcttacttaatagcaaattacttgaagaatttgcctgctttatataaagttagcactttaagatttttttttttagagatgagaagacatttaaattgaagaaaaattcccccagcaatagacagtctatcagtccaagtatttacttcctgagttttgatcaatattttttatttgtgtatgttaatcgtcataaaaacagtgattttggtgtgttttttattttggtgctttaatggcttaagatgttgcacattttttttttcttttggtttctgtttatgtttttttgcctatgcagttaaatttttcctagaaatagcatttgtgttgaacagtaacactttatacatatatatatgcatgtttattttgtttggcgtctttggagggatgcttttagacttgtttgcaaaagggcagttttctttttctttgctgcagttgtctattttgcagaataatagtgtgtgcaagtttgtgagcaaatgaaatatgcaggttcaatctattgattttgatttttacatcttatatctatgccagaatctgtatttcatataacttatttatttcgaatggatgtagtaaattcacagctatcagttttgattttgcaataaataaaccactaggttgcatgtcgaacaaatttttatctcaaataccaaccatcagttttttttttcatgtgttttggtacagctaattcctaattgtagagtgttaaatgtttgaggagaaccttttctcatagatggttggtgttcatatggctactttacaataaagagaactgtaagtgatatttggaaactacaaacctggaattaggagatataattattccttcaagttttatagaatatcacttgggagattccaaagccatagctattacgcggcaaacctaggataagaaaggtagtatgagtgctggtagaccagctgcaactttcctatacagtgaaaaaggctggtgaaacaagtacagtccagattttttaaaatcatactttctcagggatctccacaaactggtgggtgtcctggctgtctgtgtgatagcctctttctataggtgaggcctcaaatgaattgcagctatcctggtgttcctatgagggcactttgtatgaaaaagggcatgtactccaaaacatttttgtaggttctttggccagttgccaaagagtgtgaaagaatccaatagaggatttttcttactgatagcagtcattcattgcagtaaaataaaatatgatcccattagggaatcttgaattctgacctcccatactccgttttgaaataaccactttatatttcattttttaaaaatctgatgatctctttgaggcaggtttcagatttggcagtacaacatgaaagattaggaaaagcattaataacgtgtgggtggaaagcttgttaaaaatctgagagtgaagtttgagttaaaagttgtttgaacatggcattgactgggaggccaaagatttaaagaagcggaagattcttctcttaagacatgaggagtaagttgtgtgataatggtatgtgttttgtgtgcatgaatggacattgtaaatgttgaattctaggctccgacaatcattgtcaacagaagatcaagctgcaaatatttatgttttaaaacttaaattataaagctagttaagtctttctaatgactagttttaatgttcatgggtacattttacctaagttaccgtttacattgtatagaaaaagatacatcttaagcacagattggttattaggaattagtttggggaagaggtttttttgtggattctttcatactgcaaagaaaaaccatttgccttttggggaattgagctaacttctaatctagtcttaagactagaatgctaaaaacaaaaacatgaaggaaattaaaaccccttattattaaattgatttgtaaaaacattgttactggaaatttattggacttgaggccttcctccagaaaataaggacttgattgtcaggcctatattaggttctgaaccttaatgccatgtatttgtacttactaaaaattgtttcaatgaaaagtacattagcagtatgaacttctggtccagttggaagtttttccatttgaaaaatgtgatgtttgcatggaactgtttgaaacttttttattttctagtccccctcccccacactggatagaatttagcctagaattttccctttggataaaagaacaaaaattgaacatgttatttgtaaattgatgtttagtaattagtgataaacttgaaatactagcatatattataagccttaatcttaggtagtcttatgaaaatgaatctcttaactatcttttgaacctgtattcacattggttttcaagatattttaagttatattttttcctcttttcagagctgcttcttattctggggctacttttttttttagttgtgtaattcacaaagggctgcatttttttttttttttaataaggcttataactatggctggatcttttgctctagtcttctaagaagggccattttattttttagagtcacttctaaagtcatgtggtaattaactttggagactgttttgcgtatgagtgctgatacaaattaaaacccaagtagacctcattgcatgtcaccctatgaatgttgacaatggaaggaataccttgcctgtagtatactgtcacttctggattgataagctgaggaagaaagttaagtttcttttttacataagtcagaaaaacttacagctggtgttcctagtttcctggttgacctcagcagatgaagtgaacagatagtgttaattcagattgaagaaattatctgaatcttggtttgtgtagatttacaatctacatgcaatattaactaaatcagatagcttttacagtttcacatgtgtacataggttccctcccggtcccttccatatccattagttattgaactttctaaactggcattgaaacattacaacaatgttttgttgcaccaattttataaacttaagcagtgcaatacgtgttacttttctgaggcaaaccaaaggtaaatttctcaaggttcttgctgccttctttagcagcatttgatggaagatcttttatacatttgtaatagataaaaataaaccagattgcaaatccttttttaaaatcctaaaccatgtaccaagtttttggtccaaattatgtaggataagttaaacttaaattgcattctattaaccaatatgagtgtatttctgtaagcatagttatgttgaaataaagttttaaaaacca

SEQ ID NO: 25667 - DNA, 3225 bp, Homo sapiens
  source 1..3225: mol_type = unassigned DNA
atggccacccaggtaatggggcagtcttctggaggaggagggctgtttaccagcagtggcaacattggaatggccctgcctaacgacatgtatgacttgcatgacctttccaaagctgaactggccgcacctcagcttattatgctggcaaatgtggccttaactggggaagtaaatggcagctgctgtgattacctggtcggtgaagaaagacagatggcagaactgatgccggttggggataacaacttttcagatagtgaagaaggagaaggacttgaagagtctgctgatataaaaggtgaacctcatggactggaaaacatggaactgagaagtttggaactcagcgtcgtagaacctcagcctgtatttgaggcatcaggtgctccagatatttacagttcaaataaagatcttccccctgaaacacctggagcggaggacaaaggcaagagctcgaagaccaaaccctttcgctgtaagccatgccaatatgaagcagaatctgaagaacagtttgtgcatcacatcagagttcacagtgctaagaaattttttgtggaagagagtgcagagaagcaggcaaaagccagggaatctggctcttccactgcagaagagggagatttctccaagggccccattcgctgtgaccgctgcggctacaatactaatcgatatgatcactatacagcacacctgaaacaccacaccagagctggggataatgagcgagtctacaagtgtatcatttgcacatacacaacagtgagcgagtatcactggaggaaacatttaagaaaccattttccaaggaaagtatacacatgtggaaaatgcaactatttttcagacagaaaaaacaattatgttcagcatgttagaactcatacaggtaagagaccttcaggtgagaagccatttaaatgtgatcagtgcagttatgtggcctctaatcaacatgaagtaacccgccatgcaagacaggttcacaatgggcctaaacctcttaattgcccacactgtgattacaaaacagcagatagaagcaacttcaaaaaacatgtagagctacatgtgaacccacggcagttcaattgccctgtatgtgactatgcagcttccaagaagtgtaatctacagtatcacttcaaatctaagcatcctacttgtcctaataaaacaatggatgtctcaaaagtgaaactaaagaaaaccaaaaaacgagaggctgacttgcctgataatattaccaatgaaaaaacagaaatagaacaaacaaaaataaaaggggatgtggctggaaagaaaaatgaaaagtccgtcaaagcagagaaaagagatgtctcaaaagagaaaaagccttctaataatgtgtcagtgatccaggtgactaccagaactcgaaaatcagtaacagaggtgaaagagatggatgtgcatacaggaagcaattcagaaaaattcagtaaaactaagaaaagcaaaaggaagctggaagttgacagccattctttacatggtcctgtgaatgatgaggaatcttcaacaaaaaagaaaaagaaggtagaaagcaaatccaaaaataatagtcaggaagtgccaaagggtgacagcaaagtggaggagaataaaaagcaaaatacttgcatgaaaaaaagtacaaagaagaaaactctgaaaaataaatcaagtaagaaaagcagtaagcctcctcagaaggaacctgttgagaagggatctgctcagatggaccctcctcagatggggcctgctcccacagaggcggttcagaaggggcccgttcaggtggagccgccacctcccatggagcatgctcagatggagggtgcccagatacggcctgctcctgacgagcctgttcagatggaggtggttcaggaggggcctgctcagaaggagctgctgcctcccgtggagcctgctcagatggtgggtgcccaaattgtacttgctcacatggagctgcctcctcccatggagactgctcagacggaggttgcccaaatggggcctgctcccatggaacctgctcagatggaggttgcccaggtagaatctgctcccatgcaggtggtccagaaggagcctgttcagatggagctgtctcctcccatggaggtggtccagaaggagcctgttcagatagagctgtctcctcccatggaggtggtccagaaggaacctgttaagatagagctgtctcctcccatagaggtggtccagaaggagcctgttcagatggagttgtctcctcccatgggggtggttcagaaggagcctgctcagagggagccacctcctcccagagagcctccccttcacatggagccaatttccaaaaagcctcctctccgaaaagataaaaaggaaaagtctaacatgcagagtgaaagggcacggaaggagcaagtccttattgaagttggcttagtgcctgttaaagatagctggcttctaaaggaaagtgtaagcacagaggatctctcaccaccatcaccaccactgccaaaggaaaatttaagagaagaggcatcaggagaccaaaaattactcaacacaggtgaaggaaataaagaagcccctcttcagaaagtaggagcagaagaggcagatgagagcctacctggtcttgctgctaatatcaacgaatctacccatatttcatcctctggacaaaacttgaatacgccagagggtgaaactttaaatggtaaacatcagactgacagtatagtttgtgaaatgaaaatggacactgatcagaacacaagagagaatctcactggtataaattcaacagttgaagaaccagtttcaccaatgcttcccccttcagcagtagaagaacgtgaagcagtgtccaaaactgcactggcatcacctcctgctacaatggcagcaaatgagtctcaggaaattgatgaagatgaaggcatccacagccatgaaggaagtgacctaagtgacaacatgtcagagggtagtgatgattctggattgcatggggctcggccagttccacaagaatctagcagaaaaaatgcaaaggaagccttggcagtcaaagcggctaagggagattttgtttgtatcttctgtgatcgttctttcagaaagggaaaagattacagcaaacacctcaatcgccatttggttaatgtgtactatcttgaagaagcagctcaagggcaggagtaa

SEQ ID NO: 25668 - DNA, 1727 bp, Homo sapiens
  source 1..1727: mol_type = unassigned DNA
ggcggcggcggcggcgcggactgggtgcgcggcgcagcgtcctgtgttggaatgtgcggctgccgcgagctcgcggcgcagcagcggagcgagcgccgccgaggcccggggccccagaccctggcggcggctgccgcagccgagacggcagggcgaggcccggaggcctgagcaccctctgcagccccactcctgggccttcttggtccacgacggccccagcacccaactttaccaccctcccccacctctcccccgaaactccagcaacaaagaaaagtagtcggagaaggagcggcgactcagggtcgcccgcccctcctcaccgaggaaggccgaatacagttatggccacccaggtaatggggcagtcttctggaggaggagggctgtttaccagcagtggcaacattggaatggccctgcctaacgacatgtatgacttgcatgacctttccaaagctgaactggccgcacctcagcttattatgctggcaaatgtggccttaactggggaagtaaatggcagctgctgtgattacctggtcggtgaagaaagacagatggcagaactgatgccggttggggataacaacttttcagatagtgaagaaggagaaggacttgaagagtctgctgatataaaaggtgaacctcatggactggaaaacatggaactgagaagtttggaactcagcgtcgtagaacctcagcctgtatttgaggcatcaggtgctccagatatttacagttcaaataaagatcttccccctgaaacacctggagcggaggacaaaggcaagagctcgaagaccaaaccctttcgctgtaagccatgccaatatgaagcagaatctgaagaacagtttgtgcatcacatcagagttcacagtgctaagaaattttttgtggaagagagtgcagagaagcaggcaaaagccagggaatctggctcttccactgcagaagagggagatttctccaagggccccattcgctgtgaccgctgcggctacaatactaatcgatatgatcactatacagcacacctgaaacaccacaccagagctggggataatgagcgagtctacaagtgtatcatttgcacatacacaacagtgagcgagtatcactggaggaaacatttaagaaaccattttccaaggaaagtatacacatgtggaaaatgcaactatttttcagacagaaaaaacaattatgttcagcatgttagaactcatacaggagaacgcccatataaatgtgaactttgtccttactcaagttctcagaagactcatctaactagacatatgcgtactcattcaggtgagaagccatttaaatgtgatcagtgcagttatgtggcctctaatcaacatgaagtaacccgccatgcaagacaggttcacaatgggcctaaacctcttaattgcccacactgtgattacaaaacagcagatagaagcaacttcaaaaaacatgtagagctacatgtgaacccacggcagttcaattgccctgtatgtgactatgcagcttccaagaagtgtaatctacagtatcacttcaaatctaagcatcctacttgtcctaataaaacaatggatgtctcaaaagtgaaactaaagaaaaccaaaaaacgagaggctgacttgcctgataatattaccaatgaaaaaacagaaatagaacaaacaaaaaaaaaaaaaaaaaaaaaaaaaaag

SEQ ID NO: 25669 - DNA, 6246 bp, Homo sapiens
  source 1..6246: mol_type = unassigned DNA
gcctacgcgctggtgggccgtgggaagatggcggacggaaagggagacgccgccgctgtcgccggggctggggctgaggctccggcggtagcgggagccggagatggagtcgagactgagtccatggttcggggtcatcgccccgtatctccagcgccgggagcctcgggactgcggccgtgtctgtggcagctggagacagagctgagggagcaagaggtgtcggaggtctcatctttgaactactgccggagcttctgccagaccttattgcaatatgcaagcaacaagaatgcatcagaacatattgtgtatcttctggaggtatatcgacttgccatccaaagctttgccagtgcacgtccatacttaactactgaatgtgaagatgtcctcttagtgcttggcagattagtactgagttgtttcgaattactgctttcagtgtctgaaagtgaactgccatgtgaagtctggctaccattccttcagtctctacaggagtcacatgatgcattattggaatttgggaataataacctacaaatattggttcatgttaccaaggaaggggtgtggaaaaacccagttcttcttaaaattctgtctcaacagccagtagaaacggaggaagtcaataaattgattgcacaagaaggaccttcctttctgcaaatgcgaataaaacatttgttgaaatctaactgcatcccccaggctactgctttatcaaaactatgtgcagaatctaaagaaatttcaaatgtgtcatcttttcagcaagcctatatcacatgtttatgttctatgctccctaatgaagatgctattaaggagattgcaaaggtcgactgcaaggaagtactagacatcatttgtaatctggaatctgaggggcaggataacacagcatttgttctttgtacgacttaccttacccagcagctccaaactgcaagtgtatattgttcttgggaactgactcttttttggagtaaactgcaaagaagaattgacccttctttagatacttttttggagcgctgtcgtcagtttggtgtcatagctaaaacgcagcagcatttattttgcctcattagagttatacaaactgaagcacaagatgctggtcttggggtgtcaattttactgtgtgtcagagctcttcaactcagatcaagtgaagatgaggaaatgaaggcatcagtttgtaaaacaattgcctgtcttttaccagaagatttagaagttagacgagcctgtcagcttacagaattcttaattgaacccagtttggatggatttaatatgttagaagaactatatttgcaaccagatcaaaaatttgatgaagaaaatgcaccggttccaaattctcttcgatgtgagctcttactagctttaaaagcccactggccttttgatcctgagttttgggactggaaaactttaaaacgacactgccaccaacttttaggacaagaagcctcagattctgatgatgatttaagtggctatgaaatgtccattaatgacacagatgttttagagtcatttctcagtgactatgatgagggtaaagaagataaacaatatagaagaagagatttgacagatcagcataaggagaaaagagacaaaaaacctattggctcttctgaaagatatcagaggtggcttcagtacaagtttttctgtttgttatgtaagcgggaatgtatagaggctagaattcttcatcattctaagatgcatatggaagatggaatttacacctgtccagtttgtattaaaaaatttaagagaaaagaaatgtttgttcctcatgtgatggagcatgttaaaatgccaccaagcagaagggaccgctctaaaaagaaattactgttaaaaggctctcaaaagggtatttgtcctaagagcccctctgcaatcccagagcaaaaccattcattgaatgaccaagccaaaggagagtctcatgaatatgtcacattcagcaaattagaagattgccacctgcaagacagagatttgtatccatgtcccggtacagactgttcccgtgtgtttaagcaatttaaatacttaagtgtgcatcttaaagctgaacaccaaaataatgatgaaaatgccaagcactacttggatatgaaaaatagaagagagaagtgtacttactgtcgacgacattttatgtctgcttttcaccttcgagagcacgaacaagtgcattgtgggcctcagccttatatgtgtgtatctatagattgctatgctaggtttggatcagtaaatgaactacttaaccataaacaaaagcatgacgatctgcgttacaaatgtgaattaaatggctgtaatattgttttcagtgacttgggacagctttaccaccatgaagcacaacactttagggatgcatcttacacatgcaacttccttggctgtaaaaagttctattactccaaaattgaataccagaatcacctctcaatgcataatgttgaaaattcaaatggagacataaagaaatcagtgaaacttgaggagtctgcaacaggtgaaaagcaagattgtattaatcagccccatctacttaaccaaactgataaatcacatttacctgaagatcttttctgtgcagaatcagctaattctcaaatagatacagaaactgcagaaaacctgaaagaaaacagtgacagtaattctagtgatcagttaagtcatagctcttcagcttcaatgaatgaagagctaattgacacactagatcactctgaaactatgcaggatgtattgttatctaatgagaaagtctttgggccctccagtttaaaagaaaaatgttccagtatggcagtttgttttgacgggactaagtttacctgtggttttgatggctgtggttccacatacaaaaatgcaagaggaatgcagaaacatttacggaaggttcatccataccatttcaagcccaaaaagataaagacgaaagatctgtttccctctttgggtaatgaacataatcagacaactgaaaagttggatgcagaacctaaaccctgctcagatacaaacagtgactccccagatgaaggtctagatcacaatattcacattaaatgtaaacgagaacatcaaggttattcctcagaatcctccatttgtgcttctaaaaggccctgtacagaggataccatgttggaacttctgttacgcttgaaacatttaagcttgaaaaactcaataacacatggatctttctcagggtcattgcaggggtacccatccagtggtgctaagtctcttcagtcagtttcatctatctcagaccttaattttcagaatcaagatgaaaacatgccaagtcagtaccttgcacagttggcggctaagccgtttttctgtgagcttcaaggatgcaaatatgaatttgtgaccagagaggctctgttaatgcattatcttaaaaagcataattattcaaaagaaaaagtccttcagttaaccatgttccaacatcggtattccccatttcagtgtcatatttgccaaaggtcatttacaagaaaaacacaccttaggattcattataaaaataaacatcaaattggcagtgacagagcaactcacaaactattagataatgaaaagtgtgatcatgaaggcccatgttcagtagataggttgaaaggtgattgttctgcagaacttggaggtgatcccagtagtaactctgagaaaccacactgtcatcctaaaaaggatgaatgtagttctgaaacagatttggaatcatcttgtgaagaaacagaaagtaaaacatctgacatttcatcaccaataggcagccatagagaagaacaagaaggaagagagggcagaggtagcaggcgaactgttgctaaaggaaatctgtgttatattttgaataaataccacaaaccattccattgtattcataaaacttgcaactcctcattcaccaatctaaaaggcttaattcgccattacagaactgtacatcagtacaacaaagaacagttatgtttggagaaagacaaagcaagaaccaaaagggaacttgtcaaatgtaaaaagatatttgcttgcaaatataaggaatgtaataaacgcttcctgtgttccaaagctcttgctaagcactgtagtgattctcataacctagaccatattgaagagcctaaagtactttccgaagctggatctgcagcaaggttttcttgtaaccagcctcagtgccctgctgttttttatacattcaacaagttgaagcaccacttgatggaacagcataatattgaaggggaaatacattcagattatgaaattcattgtgatcttaatggctgtggccagattttcacccatcgcagtaattactcacaacatgtatattaccgacataaagactattatgatgatttgtttagaagccagaaagtagcaaatgagagactactaaggagtgaaaaggtatgtcaaacagctgatactcaggggcatgaacatcagaccaccaggagatcatttaatgctaagtctaaaaaatgtggcttaatcaaagaaaagaaagccccaataagttttaaaaccagagctgaggccctccatatgtgtgtggagcactctgagcacacacagtacccctgcatggttcaaggatgcttatctgtggtgaagttggagagcagcattgtgaggcattacaaacgcactcatcagatgagtagtgcctatttagagcaacagatggagaatcttgttgtttgcgttaagtacggtaccaaaattaaggaggaacccccttctgaagcagatccctgtataaagaaagaagaaaatagaagctgtgaatcagagcgcacagaacacagccattccccgggtgacagtagtgcacccatccagaacactgattgctgtcattcaagtgaaagggatggaggtcagaaagggtgcatagaaagcagctcagtatttgatgcagatactctgctctacaggggaactttgaaatgtaatcatagttccaaaaccacttccctagaacagtgtaatatagttcagcctcctcctccttgtaaaatagaaaattccatacctaatcccaatgggactgaaagtgggacttatttcacaagtttccagctgcctttaccaaggatcaaagaatcagaaactaggcagcatagttcagggcaagaaaacactgtaaaaaatccaacccatgtcccaaaagagaattttaggaaacattcacagccccggtcatttgatttgaagacttacaaacctatgggatttgaatcttcatttctgaaatttattcaggaaagtgaagagaaagaagatgattttgatgattgggagccttcagagcacttaacattaagtaattcttcacagtccagtaatgatttaacagggaatgttgtggcaaataatatggtgaatgacagtgaacctgaagttgacatacctcattcttccagtgactctacaattcatgagaacctgactgcaatcccacctttaatagtagctgaaacaacaacagttccttccttggaaaacctgagggttgtattggacaaagcattaacagactgtggagagcttgccttaaaacagcttcattatcttcggccagtggtggttcttgaaagatctaagttttccacaccaattttagacttatttccaacaaaaaagacagatgagctttgtgtaggaagttcataagtagcaattttgttttagtaacagactggctccaacactgcaacatggggacatttgccaactcgaacaaaggctgagaagcagccacaccgttgtttagggtagaataggctgtgtatttacatgaatgtataatatctatgtcagcagtattggctgagtccattagctctccagttggtttaatgattgggtttatttttgtttgtttgtttattaaaaaaatggaactgtacacttgtttggtgctaattaatacatcaaaatatactggggcttcctttttcaaattaagtgtgcatgattgtatatggaacaaatactaaggtcccagggtgggagggctagggaaagggatatggagttcttacttgacttgaatgtgcacctgagggtgctttgtgtaatatattgtacactacagcatcttatattttttgagttgagtttcaataaattacaatttttcaccca

SEQ ID NO: 25670 - DNA, 5297 bp, Homo sapiens
  source 1..5297: mol_type = unassigned DNA
atgttttaccatgatcttttttatagggaactgactcttttttggagtaaactgcaaagaagaattgacccttctttagatacttttttggagcgctgtcgtcagtttggtgtcatagctaaaacgcagcagcatttattttgcctcattagagttatacaaactgaagcacaagatgctggtcttggggtgtcaattttactgtgtgtcagagctcttcaactcagatcaagtgaagatgaggaaatgaaggcatcagtttgtaaaacaattgcctgtcttttaccagaagatttagaagttagacgagcctgtcagcttacagaattcttaattgaacccagtttggatggatttaatatgttagaagaactatatttgcaaccagatcaaaaatttgatgaagaaaatgcaccggttccaaattctcttcgatgtgagctcttactagctttaaaagcccactggccttttgatcctgagttttgggactggaaaactttaaaacgacactgccaccaacttttaggacaagaagcctcagattctgatgatgatttaagtggctatgaaatgtccattaatgacacagatgttttagagtcatttctcagtgactatgatgagggtaaagaagataaacaatatagaagaagagatttgacagatcagcataaggagaaaagagacaaaaaacctattggctcttctgaaagatatcagaggtggcttcagtacaagtttttctgtttgttatgtaagcgggaatgtatagaggctagaattcttcatcattctaagatgcatatggaagatggaatttacacctgtccagtttgtattaaaaaatttaagagaaaagaaatgtttgttcctcatgtgatggagcatgttaaaatgccaccaagcagaagggaccgctctaaaaagaaattactgttaaaaggctctcaaaagggtatttgtcctaagagcccctctgcaatcccagagcaaaaccattcattgaatgaccaagccaaaggagagtctcatgaatatgtcacattcagcaaattagaagattgccacctgcaagacagagatttgtatccatgtcccggtacagactgttcccgtgtgtttaagcaatttaaatacttaagtgtgcatcttaaagctgaacaccaaaataatgatgaaaatgccaagcactacttggatatgaaaaatagaagagagaagtgtacttactgtcgacgacattttatgtctgcttttcaccttcgagagcacgaacaagtgcattgtgggcctcagccttatatgtgtgtatctatagattgctatgctaggtttggatcagtaaatgaactacttaaccataaacaaaagcatgacgatctgcgttacaaatgtgaattaaatggctgtaatattgttttcagtgacttgggacagctttaccaccatgaagcacaacactttagggatgcatcttacacatgcaacttccttggctgtaaaaagttctattactccaaaattgaataccagaatcacctctcaatgcataatgttgaaaattcaaatggagacataaagaaatcagtgaaacttgaggagtctgcaacaggtgaaaagcaagattgtattaatcagccccatctacttaaccaaactgataaatcacatttacctgaagatcttttctgtgcagaatcagctaattctcaaatagatacagaaactgcagaaaacctgaaagaaaacagtgacagtaattctagtgatcagttaagtcatagctcttcagcttcaatgaatgaagagctaattgacacactagatcactctgaaactatgcaggatgtattgttatctaatgagaaagtctttgggccctccagtttaaaagaaaaatgttccagtatggcagtttgttttgacgggactaagtttacctgtggttttgatggctgtggttccacatacaaaaatgcaagaggaatgcagaaacatttacggaaggttcatccataccatttcaagcccaaaaagataaagacgaaagatctgtttccctctttgggtaatgaacataatcagacaactgaaaagttggatgcagaacctaaaccctgctcagatacaaacagtgactccccagatgaaggtctagatcacaatattcacattaaatgtaaacgagaacatcaaggttattcctcagaatcctccatttgtgcttctaaaaggccctgtacagaggataccatgttggaacttctgttacgcttgaaacatttaagcttgaaaaactcaataacacatggatctttctcagggtcattgcaggggtacccatccagtggtgctaagtctcttcagtcagtttcatctatctcagaccttaattttcagaatcaagatgaaaacatgccaagtcagtaccttgcacagttggcggctaagccgtttttctgtgagcttcaaggatgcaaatatgaatttgtgaccagagaggctctgttaatgcattatcttaaaaagcataattattcaaaagaaaaagtccttcagttaaccatgttccaacatcggtattccccatttcagtgtcatatttgccaaaggtcatttacaagaaaaacacaccttaggattcattataaaaataaacatcaaattggcagtgacagagcaactcacaaactattagataatgaaaagtgtgatcatgaaggcccatgttcagtagataggttgaaaggtgattgttctgcagaacttggaggtgatcccagtagtaactctgagaaaccacactgtcatcctaaaaaggatgaatgtagttctgaaacagatttggaatcatcttgtgaagaaacagaaagtaaaacatctgacatttcatcaccaataggcagccatagagaagaacaagaaggaagagagggcagaggtagcaggcgaactgttgctaaaggaaatctgtgttatattttgaataaataccacaaaccattccattgtattcataaaacttgcaactcctcattcaccaatctaaaaggcttaattcgccattacagaactgtacatcagtacaacaaagaacagttatgtttggagaaagacaaagcaagaaccaaaagggaacttgtcaaatgtaaaaagatatttgcttgcaaatataaggaatgtaataaacgcttcctgtgttccaaagctcttgctaagcactgtagtgattctcataacctagaccatattgaagagcctaaagtactttccgaagctggatctgcagcaaggttttcttgtaaccagcctcagtgccctgctgttttttatacattcaacaagttgaagcaccacttgatggaacagcataatattgaaggggaaatacattcagattatgaaattcattgtgatcttaatggctgtggccagattttcacccatcgcagtaattactcacaacatgtatattaccgacataaagactattatgatgatttgtttagaagccagaaagtagcaaatgagagactactaaggagtgaaaaggtatgtcaaacagctgatactcaggggcatgaacatcagaccaccaggagatcatttaatgctaagtctaaaaaatgtggcttaatcaaagaaaagaaagccccaataagttttaaaaccagagctgaggccctccatatgtgtgtggagcactctgagcacacacagtacccctgcatggttcaaggatgcttatctgtggtgaagttggagagcagcattgtgaggcattacaaacgcactcatcagatgagtagtgcctatttagagcaacagatggagaatcttgttgtttgcgttaagtacggtaccaaaattaaggaggaacccccttctgaagcagatccctgtataaagaaagaagaaaatagaagctgtgaatcagagcgcacagaacacagccattccccgggtgacagtagtgcacccatccagaacactgattgctgtcattcaagtgaaagggatggaggtcagaaagggtgcatagaaagcagctcagtatttgatgcagatactctgctctacaggggaactttgaaatgtaatcatagttccaaaaccacttccctagaacagtgtaatatagttcagcctcctcctccttgtaaaatagaaaattccatacctaatcccaatgggactgaaagtgggacttatttcacaagtttccagctgcctttaccaaggatcaaagaatcagaaactaggcagcatagttcagggcaagaaaacactgtaaaaaatccaacccatgtcccaaaagagaattttaggaaacattcacagccccggtcatttgatttgaagacttacaaacctatgggatttgaatcttcatttctgaaatttattcaggaaagtgaagagaaagaagatgattttgatgattgggagccttcagagcacttaacattaagtaattcttcacagtccagtaatgatttaacagggaatgttgtggcaaataatatggtgaatgacagtgaacctgaagttgacatacctcattcttccagtgactctacaattcatgagaacctgactgcaatcccacctttaatagtagctgaaacaacaacagttccttccttggaaaacctgagggttgtattggacaaagcattaacagactgtggagagcttgccttaaaacagcttcattatcttcggccagtggtggttcttgaaagatctaagttttccacaccaattttagacttatttccaacaaaaaagacagatgagctttgtgtaggaagttcataagtagcaattttgttttagtaacagactggctccaacactgcaacatggggacatttgccaactcgaacaaaggctgagaagcagccacaccgttgtttagggtagaataggctgtgtatttacatgaatgtataatatctatgtcagcagtattggctgagtccattagctctccagttggtttaatgattgggtttatttttgtttgtttgtttattaaaaaaatggaactgtacacttgtttggtgctaattaatacatcaaaatatactggggcttcctttttcaaattaagtgtgcatgattgtatatggaacaaatactaaggtcccagggtgggagggctagggaaagggatatggagttcttacttgacttgaatgtgcacctgagggtgctttgtgtaatatattgtacactacagcatcttatattttttgagttgagtttcaataaattacaatttttcaccc

SEQ ID NO: 25671 - DNA, 2402 bp, Homo sapiens
  source 1..2402: mol_type = unassigned DNA
actagaggcgagaaccggagcccattggtcggaacacctcacaatggaccccagcggcgcgcaaaatccttatgattggtttgctggctgcctcgggagaccctgttgccaggatacttggcgttcccgacccgacccccgttccccattggctgtcagggcaaaagccgccatctaatgaggagcgaggtgcggtgccccgaagcgctcgcttcccgcggtgcgatctagtcctgcagtaggcggcccggggccacaccgcggccgcccaagccagtgcaaggcccaggggcctgacatcgctcccagcgctcgaggaccgaggcctgctgtggaggacaccgtgctccctcgggacctgctctggattccggcccggacgtccccttggagctctgcatctccaacctggaacccaacccagaagtctcaagtttgacgcatcacgtggcgtgcggatccactgagggtccacagagaggggcgcccatctcctgcgtctcagttatcctggtgttgggaattctgtgccctaaagaattccgactcagatccgaacggggatctggtggaatcgagggtgaaagaccagagggacaatgttctactatcccaacgtgcttcagcgccacaccggctgctttgccaccatctggctggcggcgactcgcggcagccggttggtgaagcgcgaatacctgagggtgaatgtggtgaaaacctgcgaggaaatcctcaattacgtgctggtacgagtgcaacccccgcagcccggcctgccgcggccccgcttctccctctatctctcagcccaacttcagatcggtgtgatccgcgtctattctcaacaatgccagtacctcgtggaggacatccagcacatcttggagcgcctccaccgtgcccagctgcagatccgaatagatatggagactgagctacccagcctgctgcttcctaaccacctggccatgatggagaccctagaagatgctccagatcccttttttgggatgatgtctgtggatcccagacttcctagtcctttcgatatccctcagattcgacacctcttagaggctgcaatcccagagagagttgaagagatccctcctgaagttcctacagagcccagggagccagagaggattccggtcactgtgctgccacctgaggccatcacgatcctggaggcagagcccatacggatgctggagattgagggtgaacgggagctcccagaggtcagccgccgagaactggacctgctgatcgcagaggaagaagctatcttgttagaaatcccgcggctcccacctccagctcctgcagaggtggaaggaataggagaggcactgggtcctgaggagctgaggctgacaggctgggaacctggggccctactcatggaggtgacccccccggaggagctgcgtctgccagccccacccagcccagagaggaggcccccagtccccccacctcctcgccgccgccgtcgtcgccggttactgttctgggacaaggagactcagatctccccggagaaattccaggaacaactgcaaaccagagcccactgctgggaatgtcctatggtgcagccgcccgagaggaccatcagaggccctgcggagttgttcagaaccccaactctctctggctggctaccccctgaactactgggtctctggacccattgtgcccagccacccccaaaagccctcaggcgagagctgcctgaggaggcagccgctgaggaggaaaggagaaagattgaagttccaagtgagattgaggtcccgagggaggccctggagcccagtgttccccttatggtgtctttagagatctccctagaggcagctgaagaggagaagtcccgcatcagcctcatcccaccagaagaacggtgggcctggcctgaggtggaggcgccagaagctcctgcattgcccgtggtgcctgaactccctgaggtgcccatggagatgcctttggtgctgcccccagagctcgagctgctctcactggaagcagtgcacagggcagtggcactggagctgcaggctaacagggagcccgacttcagcagcctggtgtcacctctcagcccccgcaggatggctgcccgggtcttctacctgctcctggtgctctcagcgcaacagattcttcacgtgaaacaagaaaagccatatggtcgcctcctgatccagccggggcccagattccactgaggttagagtccatttacaaagctgccaggaaaccggccacttctagtaaaccacgtcgtgcctcactgggtcctgcttacctcatttctgaatgtgcatttccagccttcttgctctcagagctattgttcaagcagaaaacaagctgcttttattacagta

SEQ ID NO: 25672 - DNA, 2307 bp, Homo sapiens
  source 1..2307: mol_type = unassigned DNA
acaatggaccccagcggcgcgcaaaatccttatgattggtttgctggctgcctcgggagaccctgttgccaggatacttggcgttcccgacccgacccccgttccccattggctgtcagggcaaaagccgccatctaatgaggagcgaggtgcggtgccccgaagcgctcgcttcccgcggtgcgatctagtcctgcagtaggcggcccggggccacaccgcggccgcccaagccagtgcaaggcccaggggcctgacatcgctcccagcgctcgaggaccgaggcctgctgtggaggacaccgtgctccctcgggacctgctctggattccggcccggacgtccccttggagctctgcatctccaacctggaacccaacccagaagtctcaagtttgacgcatcacgtggcgtgcggatccactgagggtccacagagaggggcgcccatctcctgcgtctcagttatcctggtgttgggaattctgtgccctaaagaattccgactcagatccgaacggggatctggtggaatcgagggtgaaagaccagagggacaatgttctactatcccaacgtgcttcagcgccacaccggctgctttgccaccatctggctggcggcgactcgcggcagccggttggtgaagcgcgaatacctgagggtgaatgtggtgaaaacctgcgaggaaatcctcaattacgtgctggtacgagtgcaacccccgcagcccggcctgccgcggccccgcttctccctctatctctcagcccaacttcagatcggtgtgatccgcgtctattctcaacaatgccagtacctcgtggaggacatccagcacatcttggagcgcctccaccgtgcccagctgcagatccgaatagatatggagactgagctacccagcctgctgcttcctaaccacctggccatgatggagaccctagaagatgctccagatcccttttttgggatgatgtctgtggatcccagacttcctagtcctttcgatatccctcagattcgacacctcttagaggctgcaatcccagagagagttgaagagatccctcctgaagttcctacagagcccagggagccagagaggattccggtcactgtgctgccacctgaggccatcacgatcctggaggcagagcccatacggatgctggagattgagggtgaacgggagctcccagaggtcagccgccgagaactggacctgctgatcgcagaggaagaagctatcttgttagaaatcccgcggctcccacctccagctcctgcagaggtggaaggaataggagaggcactgggtcctgaggagctgaggctgacaggctgggaacctggggccctactcatgaggaggcccccagtccccccacctcctcgccgccgccgtcgtcgccggttactgttctgggacaaggagactcagatctccccggagaaattccaggaacaactgcaaaccagagcccactgctgggaatgtcctatggtgcagccgcccgagaggaccatcagaggccctgcggagttgttcagaaccccaactctctctggctggctaccccctgaactactgggtctctggacccattgtgcccagccacccccaaaagccctcaggcgagagctgcctgaggaggcagccgctgaggaggaaaggagaaagattgaagttccaagtgagattgaggtcccgagggaggccctggagcccagtgttccccttatggtgtctttagagatctccctagaggcagctgaagaggagaagtcccgcatcagcctcatcccaccagaagaacggtgggcctggcctgaggtggaggcgccagaagctcctgcattgcccgtggtgcctgaactccctgaggtgcccatggagatgcctttggtgctgcccccagagctcgagctgctctcactggaagcagtgcacagggcagtggcactggagctgcaggctaacagggagcccgacttcagcagcctggtgtcacctctcagcccccgcaggatggctgcccgggtcttctacctgctcctggtgctctcagcgcaacagattcttcacgtgaaacaagaaaagccatatggtcgcctcctgatccagccggggcccagattccactgaggttagagtccatttacaaagctgccaggaaaccggccacttctagtaaaccacgtcgtgcctcactgggtcctgcttacctcatttctgaatgtgcatttccagccttcttgctctcagagctattgttcaagcagaaaacaagctgcttttattac

SEQ ID NO: 25673 - DNA, 635 bp, Homo sapiens
  source 1..635: mol_type = unassigned DNA
aaaagccgccatctaatgaggagcgaggtgcggtgccccgaagcgctcgcttcccgcggtgcgatctagtcctgcagtaggcggcccggggccacaccgcggccgcccaagccagtgcaaggcccaggggcctgacatcgctcccagcgctcgaggaccgaggcctgctgtggaggacaccgtgctccctcgggacctgctctggattccggcccggacgtccccttggagctctgcatctccaacctggaacccaacccagaagtctcaagtttgacgcatcacgtggcgtgcggatccactgagggtccacagagaggggcgcccatctcctgcgtctcagttatcctgaattccgactcagatccgaacggggatctggtggaatcgagggtgaaagaccagagggacaatgttctactatcccaacgtgcttcagcgccacaccggctgctttgccaccatctggctggcggcgactcgcggcagccggttggtgaagcgcgaatacctgagggtgaatgtggtgaaaacctgcgaggaaatcctcaattacgtgctggtacgagtgcaacccccgcagcccggcctgccgcggccccgcttctccctctatctctcagcccaacttcaga

SEQ ID NO: 25674 - DNA, 2328 bp, Homo sapiens
  source 1..2328: mol_type = unassigned DNA
atctaatgaggagcgaggtgcggtgccccgaagcgctcgcttcccgcggtgcgatctagtcctgcagtaggcggcccggggccacaccgcggccgcccaagccagtgcaaggcccaggggcctgacatcgctcccagcgctcgaggaccgaggcctgctgtggaggacaccgtgctccctcgggacctgctctggattccggcccggacgtccccttggagctctgcatctccaacctggaacccaacccagaagtctcaagtttgacgcatcacgtggcgtgcggatccactgagggtccacagagaggggcgcccatctcctgcgtctcagttatcctggtaattgtgtatctgcccattgttcgttgcctcattaacttggctttctaggtgcacccaccttgccaccagagaagtccaaatcctgacttctctccaaggtgttgggaattctgtgccctaaagaattccgactcagatccgaacggggatctggtggaatcgagggtgaaagaccagagggacaatgttctactatcccaacgtgcttcagcgccacaccggctgctttgccaccatctggctggcggcgactcgcggcagccggttggtgaagcgcgaatacctgagggtgaatgtggtgaaaacctgcgaggaaatcctcaattacgtgctggtacgagtgcaacccccgcagcccggcctgccgcggccccgcttctccctctatctctcagcccaacttcagatcggtgtgatccgcgtctattctcaacaatgccagtacctcgtggaggacatccagcacatcttggagcgcctccaccgtgcccagctgcagatccgaatagatatggagactgagctacccagcctgctgcttcctaaccacctggccatgatggagaccctagaagatgctccagatcccttttttgggatgatgtctgtggatcccagacttcctagtcctttcgatatccctcagattcgacacctcttagaggctgcaatcccagagagagttgaagagatccctcctgaagttcctacagagcccagggagccagagaggattccggtcactgtgctgccacctgaggccatcacgatcctggaggcagagcccatacggatgctggagattgagggtgaacgggagctcccagaggtcagccgccgagaactggacctgctgatcgcagaggaagaagctatcttgttagaaatcccgcggctcccacctccagctcctgcagaggtggaaggaataggagaggcactgggtcctgaggagctgaggctgacaggctgggaacctggggccctactcatggaggtgacccccccggaggagctgcgtctgccagccccacccagcccagagaggaggcccccagtccccccacctcctcgccgccgccgtcgtcgccggttactgttctgggacaaggagactcagatctccccggagaaattccaggaacaactgcaaaccagagcccactgctgggaatgtcctatggtgcagccgcccgagaggaccatcagaggccctgcggagttgttcagaaccccaactctctctggctggctaccccctgaactactgggtctctggacccattgtgcccagccacccccaaaagccctcaggcgagagctgcctgaggaggcagccgctgaggaggaaaggagaaagattgaagttccaagtgagattgaggtcccgagggaggccctggagcccagtgttccccttatggtgtctttagagatctccctagaggcagctgaagaggagaagtcccgcatcagcctcatcccaccagaagaacggtgggcctggcctgaggtggaggcgccagaagctcctgcattgcccgtggtgcctgaactccctgaggtgcccatggagatgcctttggtgctgcccccagagctcgagctgctctcactggaagcagtgcacagggcagtggcactggagctgcaggctaacagggagcccgacttcagcagcctggtgtcacctctcagcccccgcaggatggctgcccgggtcttctacctgctcctggtgctctcagcgcaacagattcttcacgtgaaacaagaaaagccatatggtcgcctcctgatccagccggggcccagattccactgaggttagagtccatttacaaagctgccaggaaaccggccacttctagtaaaccacgtcgtgcctcactgggtcctgcttacctcatttctgaatgtgcatttccagccttcttgctctcagagctattgttcaagcagaaaacaagctgcttttattaca

SEQ ID NO: 25675 - DNA, 1321 bp, Homo sapiens
  source 1..1321: mol_type = unassigned DNA
tttctcatgggtgggcagccttggctgtctgccggaacgtaaagagcatggagcaaggacatgggaatccgaatcccgctgaggtcccaggaccacttcatccttcttccctgtgcctctcctccccagcatgagcacagcagcctgatggagaaggattttccaatgttagaactggaaagaacacctgtagcctgtctccaccgtttacagtggtgctggaagtgaaaagatgtgttccaggtcacaggcaggtagacagcggagccagactgaaattcactcctcctgatttggagtttagagctcttctttggcaacattttgatgaataaaatcacaagttctgtgtcttttgaaattccttgtggagcctagtgccatcctctgaacttggagccaactgacctttgtccttggggcagagacatggttcatgggcccaatccaggtcctcaaagggagggcaggtctgagtccttgccctctgaagtcagaaacctcatctcccactacagacctgccagggcccaggagagctcgacccacccaggcacaccatagccccagagatggctggggacacagaagtgtggaagcaaatgtttcaggagttaatgcgggaggtgaagccatggcacaggtggaccctgagaccagacaagggccttcttcccaacgtcctgaagccaggctggatgcaataccagcagtggaccttcgccaggttccagtgctcctcctgctctcgtaactgggcctctgcccaagttctggtccttttccacatgaactggagtgaggagaagtccaggggccaggtgaagatgagggtgtttacccagagatgtaagaagtgcccccaacctctgtttgaggaccctgagttcacacaagagaacatctcaaggatcctgaaaaacctggtgttccgaattctgaagaaatgctatagaggaagatttcagttgatagaggaggttcctatgatcaaggacatctctcttgaagggccacacaatagtgacaactgtgaggcatgtctgcagggcttctgtgctgggcccatacaggttacaagcctccccccatctcagaccccaagagtacactccatttacaaggtggaggaggtagttaagccctgggcctcaggagagaatgtctattcctacgcatgccaaaaccacatctgtaggaacttaagcattttctgctgttgtgtcattctcattgttatcgtggtgattgttgtaaaaactgctatatgagccttggaaacatgaagctaagtcagaaaaaaaatcagatacaaaaagtc

SEQ ID NO: 25676 - DNA, 1554 bp, Homo sapiens
  source 1..1554: mol_type = unassigned DNA
gtccatacacagaaacagaaactgaaccgaacaccgaaactgaaactgtttgtctcttcctgagaaacgagcaaacctgaaagctactctctcagcttcagagggaaaaaatggttgtagatttctggacttgggagcagacatttcaagaactaatccaagaggcaaaaccccgggccacatggacgctgaagttggatggcaaccttcagctagactgcctggctcaagggtggaagcaataccaacagagagcatttggctggttccggtgttcctcctgccagcgaagttgggcttccgcccaagtgcagattctgtgccacacgtactgggagcactggacatcccagggtcaggtgcgtatgaggctctttggccaaaggtgccagaagtgctcctggtcccaatatgagatgcctgagttctcctcggatagcaccatgaggattctgagcaacctggtgcagcatatactgaagaaatactatggaaatggcacgaggaagtctccagaaatgccagtaatcctggaagtgtccctggaaggatcccatgacacagccaattgtgaggcatgcactttgggcatctgtggacagggcttaaaaagctgcatgacaaagccgtccaaatccctactcccccacctaaagactgggaattcctcacctggaattggtgctgtgtacctcgcaaaccaagccaagaaccagtcagctgaggcaaaagaggctaaggggagtgggtatgagaaattagggcccagtcgagacccagatccactgaacatctgtgtctttattttgctgcttgtatttattgtagtcaaatgctttacatcagaatgatgaaaataggcttgccactttctcttattttaattccatggtagtcaatgaactggctgccactttaatataactgaaaattcattttgagaccaagcaggatcaagtttgtagaataaacactggtttcctagccatcctctgaaaacagtatgaaacatgaccaagtacataatggatttagtaataaatattgtcgaattgctaaaaagtcttcaatcattcattcactaagtcactcagtgatatcaatatacttagctcagaaagtgtgggaggctgaataatggtgtctcccaacatatgcatgacttaatccccagaacctgtaaacatgttactttacatggtagaatggactttgcggatgtaattaaggaccttgaaatggttagattatttcatattgtccgggtggataagaaccaggattttgtaacagggaggcaacaagctcaaaatcagaaaaaagagatttgtcaatggaacaagaggttgaagtgctttgaagttggaggaagaggtcacaggcaaaaaagtacaggcagcctttagaaacccaaaaggacaaaggaacagattctcccctggagtctgcagaaggaaccagccctgcctgcacatggctttagcccagtgacactgattttggacatctgaccttcagaactgcttgctcataaacttgtcttgttttaatgca

SEQ ID NO: 25677 - DNA, 910 bp, Homo sapiens
  source 1..910: mol_type = unassigned DNA
gcggccgccgcctcccaccgctcccgcgcccgctcccgcccccggcgcgtctcctccgggcccgcgccgcggcgggctcagtcctcagcggggcgcgtggcgagcggactcgactcggcaccgctgtgcaccatggcccgggccctgtgccgcctcccgcggcgcggcctctggctgctcctggcccatcacctcttcatgaccactgcctgccaggaggctaactacggtgccctcctccgggagctctgcctcacccagttccaggtagacatggaggccgtcggggagacgctgtggtgtgactggggcaggaccatcaggagctacagggagctggccgactgcacctggcacatggcggagaagctgggctgcttctggcccaatgcagaggtggacaggttcttcctggcagtgcatggccgctacttcaggagctgccccatctcaggcagggccgtgcgggacccgcccggcagcatcctctaccccttcatcgtggtccccatcacggtgaccctgctggtgacggcactggtggtctggcagagcaagcgcactgagggcattgtgtaggcggggcccaggctgcccgcgggtgcacccaggctgcagggtgaggccaggcaggcctgggtaggggcagcttctggagccttgggacagagcaggcccacaatgccccccttcttccagccaagaagagctcacaggagtccagagtagccgaggctctggtattaacctggaagcccccctggctggaggccaccgccaccctaggaagggggcagggacgtgaccttgacttacctctggaaagggtcccagcctagactgcttaccccatagccacatttgtggatgagtggtttgtgattaaaagggatgttcttgaacttggaaa

SEQ ID NO: 25678 - DNA, 650 bp, Homo sapiens
  source 1..650: mol_type = unassigned DNA
ggagagcgggcattctggaaagcgtgggcccatcacctcttcatgaccactgcctgccaggaggctaactacggtgccctcctccgggagctctgcctcacccagttccaggtagacatggaggccgtcggggagacgctgtggtgtgactggggcaggaccatcaggagctacagggagctggccgactgcacctggcacatggcggagaagctgggctgcttctggcccaatgcagaggtggacaggttcttcctggcagtgcatggccgctacttcaggagctgccccatctcaggcagggccgtgcgggacccgcccggcagcatcctctaccccttcatcgtggtccccatcacggtgaccctgctggtgacggcactggtggtctggcagagcaagcgcactgagggcattgtgtaggcggggcccaggctgcccgcgggtgcacccaggctgcagggtgaggccaggcaggcctgggtaggggcagcttctggagccttgggacagagcaggcccacaatgccccccttcttccagccaagaagagctcacaggagtccagagtagccgaggctctggtattaacctggaagcccccctggctggaggccaccgccaccctaggaagggggcagggacgtgac

SEQ ID NO: 25679 - DNA, 857 bp, Homo sapiens
  source 1..857: mol_type = unassigned DNA
gcagctgccagagtgccaccaaagcaaacctcatctcaagactctgtggccaggccctcacaacctcctgccaggctctcgctacctacccatcaacagcaagactcccaggccatctcaatccccccaaagagccctgttcctccagccccacggcttctgttcacctgccgtgctgtccccgcctctgcccacccactcatcctgcagatctggagcagcattccagggcctgcccatcacctcttcatgaccactgcctgccaggaggctaactacggtgccctcctccgggagctctgcctcacccagttccaggtagacatggaggccgtcggggagacgctgtggtgtgactggggcaggaccatcaggagctacagggagctggccgactgcacctggcacatggcggagaagctgggctgcttctggcccaatgcagaggtggacaggttcttcctggcagtgcatggccgctacttcaggagctgccccatctcaggcagggccgtgcgggacccgcccggcagcatcctctaccccttcatcgtggtccccatcacggtgaccctgctggtgacggcactggtggtctggcagagcaagcgcactgagggcattgtgtaggcggggcccaggctgcccgcgggtgcacccaggctgcagggtgaggccaggcaggcctgggtaggggcagcttctggagccttgggacagagcaggcccacaatgccccccttcttccagccaagaagagctcacaggagtccagagtagccgaggctctggtattaacctggaagcccccctggctggaggccaccgccaccctaggaagggggcagggacgtgac

SEQ ID NO: 25680 - DNA, 734 bp, Homo sapiens
  source 1..734: mol_type = unassigned DNA
agtcctcagcggggcgcgtggcgagcggactcgactcggcaccgctgtgcaccatggcccgggccctgtgccgcctcccgcggcgcggcctctggctgctcctgggcaggatagcctgaggcacgcttgcttcactcccaggcagaatggccactgagaaatccggcccatcacctcttcatgaccactgcctgccaggaggctaactacggtgccctcctccgggagctctgcctcacccagttccaggtagacatggaggccgtcggggagacgctgtggtgtgactggggcaggaccatcaggagctacagggagctggccgactgcacctggcacatggcggagaagctgggctgcttctggcccaatgcagaggtggacaggttcttcctggcagtgcatggccgctacttcaggagctgccccatctcaggcagggccgtgcgggacccgcccggcagcatcctctaccccttcatcgtggtccccatcacggtgaccctgctggtgacggcactggtggtctggcagagcaagcgcactgagggcattgtgtaggcggggcccaggctgcccgcgggtgcacccaggctgcagggtgaggccaggcaggcctgggtaggggcagcttctggagccttgggacagagcaggcccacaatgccccccttcttccagccaagaagagctcacaggagtccagagtagccgaggctctggtattaacctgg

SEQ ID NO: 25681 - DNA, 781 bp, Homo sapiens
  source 1..781: mol_type = unassigned DNA
ggatataggcgcccccacacccgggcccggctcagcgccgccgccgctcctcgcctccttgctgcacgatggcctcgctccgggtggagcgcgccggcggcccgcgtctccctaggacccgagtcgggcggccggcagcgctccgcctcctcctcctgctgggcgctgtcctgaatccccacgaggccctggctcagcctcttcccaccacaggcacaccagggtcagaaggggggacggtgaagaactatgagacagctgtccaattttgctggaatcattataaggatcaaatggatcctatcgaaaaggattggtgcgactgggccatgattagcaggccttatagcaccctgcgagattgcctggagcactttgcagagttgtttgacctgggcttccccaatcccttggcagagaggatcatctttgagactcaccagatccactttgccaactgctccctggtgcagcccaccttctctgaccccccagaggatgtactcctggccatgatcatagcccccatctgcctcatccccttcctcatcactcttgtagtatggaggagtaaagacagtgaggcccaggcctagggggccacgagcttctcaacaaccatgttactccacttccccacccccaccaggcctccctcctcccctcctactcccttttctcactctcatccccaccacagatccctggattgctgggaatggaagccaggtggggtcatggcacaagttctgtaatcttcaaaataaaactttttttttgt

SEQ ID NO: 25682 - DNA, 1323 bp, Homo sapiens
  source 1..1323: mol_type = unassigned DNA
agcgggaccgagcgtgacccagctgcggccggccagccatggagactggagcgctgcggcgcccgcaacttctcccgttgctgctgctgctctgcggtgggtgtcccagagcaggcggctgcaacgagacaggcatgttggagaggctgcccctgtgtgggaaggctttcgcagacatgatgggcaaggtggacgtctggaagtggtgcaacctgtccgagttcatcgtgtactatgagagtttcaccaactgcaccgagatggaggccaatgtcgtgggctgctactggcccaaccccctggcccagggcttcatcaccggcatccacaggcagttcttctccaactgcaccgtggacagggtccacttggaggaccccccagacgaggttctcatcccgctgatcgttatacccgtcgttctgactgtcgccatggctggcctggtggtgtggcgcagcaaacgcaccgacacgctgctgtgagggtcccggtgagatggagtgggtcacacctggcaagctggaagaaagttccctggggatgggagagcgggtgggtgctgccaatctccagctactgtggccacaccccacctggtcatgggcagacccctcccttcctgggctgacctgctccctcgaggccagcctgctccctggctgaggctcaggctatccgcccaagctctttgctcattctagggccagtggaggaaaatgtgataaggccagagcttgtgtgctgggcacagaaatcacctgctgcatcctgtgctccgcaggctgggccggagcctctgcccgcaggtttctatgctgtttcttagcacagaatccagcctagccttagccgcagtctaggccctgcttggactaggactccttgcttgaccccatctctggttcctgccctggctcctgcaccagccccagctcctgcctacatccaggcagaaagataggcaggggctcttggaagacgttccgtgctgtgacctccgagccctcctggtgggaagacagctggaaaggctgggaggagaagggaggggctgggggttcccaggagccatgcgtggcctgcagagtccattccatcatgatgctgtgcccgctatgggctgtgtccatgaccagaggctggagtgggggtgtgttagagcccctcaccgggacttgctgtgcggatggggcctgggcctccttcctacaggggctcctctgtgggtgaggggccctctggaatggcatcccatgagcttgtggcctctatctgctaccatctgtgttttatctgagtaaagttaccttacttctggaa

SEQ ID NO: 25683 - DNA, 559 bp, Homo sapiens
  source 1..559: mol_type = unassigned DNA
atggagactggagcgctgcggcgcccgcaacttctcccgttgctgctgctgctctgcggtgggtgtcccagagcaggcggctgcaacgagacaggcatgttggagaggctgcccctgtgtgggaaggctttcgcagacatgatgggcaaggtggacgtctggaagtggtgcaacctgtccgagttcatcgtgtactatgagagtttcaccaactgcaccgagatggaggccaatgtcgtgggctgctactggcccaaccccctggcccagggcttcatcaccggcatccacaggcagttcttctccaactgcaccgtggacagggtccacttggaggaccccccagacgaggttctcatcccgctgatcgttatacccgtcgttctgactgtcgccatggctggcctggtggtgtggcgcagcaaacgcaccgacacgctgctgtgagggtcccgatgtggaaattgaggctcagaaatgtaaggggacttgctgaagagtggtcttttatattttcctggcctgctgccctactgaatccagccctgagaggtgacaa

SEQ ID NO: 25684 - DNA, 543 bp, Homo sapiens
  source 1..543: mol_type = unassigned DNA
atggagactggagcgctgcggcgcccgcaacttctcccgttgctgctgctgctctgcggtgggtgtcccagagcaggcggctgcaacgagacaggcatgttggagaggctgcccctgtgtgggaaggctttcgcagacatgatgggcaaggtggacgtctggaagtggtgcaacctgtccgagttcatcgtgtactatgagagtttcaccaactgcaccgagatggaggccaatgtcgtgggctgctactggcccaaccccctggcccagggcttcatcaccggcatccacaggcagttcttctccaactgcaccgtggacagggtccacttggaggaccccccagacgaggttctcatcccgctgatcgttatacccgtcgttctgactgtcgccatggctggcctggtggtgtggcgcagcaaacgcaccgacacgctgctatgtggaaattgaggctcagaaatgtaaggggacttgctgaagagtggtcttttatattttcctggcctgctgccctactgaatccagccctgagaggtg

SEQ ID NO: 25685 - DNA, 3857 bp, Homo sapiens
  source 1..3857: mol_type = unassigned DNA
aacgccgggcagggcggcgggcgcgctcagtctggcggcggctgccgtgagctgactgacgttccgggaacgccgcagcagcccgcgccgcccgcagcctagccgagccgcgccgcccgggcctcgcccgcccgcctgcccgccatggtgtcatggatcatctccaggctggtggtgcttatatttggcaccctttaccctgcgtattattcctacaaggctgtgaaatcaaaggacattaaggaatatgtcaaatggatgatgtactggattatatttgcacttttcaccacagcagagacattcacagacatcttcctttgttggtttccattctattatgaactaaaaatagcatttgtagcctggctgctgtctccctacacaaaaggctccagcctcctgtacaggaagtttgtacatcccacgctatcttcaaaagaaaaggaaatcgatgattgtctggtccaagcaaaagaccgaagttacgatgcccttgtgcacttcgggaagcggggcttgaacgtggccgccacagcggctgtgatggctgcttccaagggacagggtgccttatcggagagactgcggagcttcagcatgcaggacctcaccaccatcaggggagacggcgcccctgctccctcgggccccccaccaccggggtctgggcgggccagcggcaaacacggccagcctaagatgtccaggagtgcttctgagagcgctagcagctcaggcaccgcctagaatccttcgatctcgcttcaggaagaaaagtacctcatcctcggccaccgaaaccacgtgagtgagatgagccaacagcaccggatccacagaatgtttcttctctgccttaaagagctattcactaataacatagaaatccgcaagctgggtgtgctttgagtgtgcagcctcacaaacatggccttttctctctccccttccacttttaaggatttatttttttcccccttttctttattttgctggggagaggctaaagggaaaggtagtaggggcgggggtggtgacctttaagtcttctgaggttggtaattttccacaattggattgtcattatagacagcagtgtgttttttagaaagataagagaatcacccctatgctgctgagatgtacatttgtaatttatctgttgcatacttagtttttagtcctgtaaatgcaaacacagcattttttacaactttctttgttcttggtacttatactttgaactatgatgtacatatttatggcttttggcttttaatataatggacttgcaagggctgccagaggttctgatatgtaagaaaactgcaaaaacaaatatagacaaatattttgattctagagaacgtctcagatgtgcttataaagcttccaaatacaactccagtaagacatccctttccctgcaggagtgtggtctatattctttagatagttgtttagtcaaaagaccagacaagttacaaactaagagaaacaatatttcacaacacagtaaagtgtgatgagaggtcaggggaacatcccagtaaaagagaagagtcacaggaagctcatctcctccctggattctggattaggagcttctgaatcttttccagggataggcaggtagctcactcttggtgcaatttcttgaggatgggaacatgtagagctgctggaaggagtaattctgtgcttgacaaaggacgatttctcctttatcgtgaccagtgctgccgatttcctgacagaggagcttacactctgagcaccttgttttagcgaactctagcaaaacttgtttagcttagcaaaaacaaacacacaaaaaactgagaactctgctgtttcagatatgccataacatacatctgaaacacatgtgtaacaatcaaaatggtgggctctagaatggttttggagctcgagatcttcatgggttagacttgctggtcagacccaggagcacctgtggctcacaccttctgttcccctcctggcctgtgcagaatgtaaacagcagactcatactcaatgggcactacaggccttatcagacgttttatacaagcctggattgcttagtaggggaataaggcattctctgagggggctttccacttagattgagaattttatttgaaaagaatctggtttaaatggcattgtggtccgaggtagctgctctccccactgagagctgagccgaaatataagaataatatatttgtgcttcgagttggtgtttctttcagtgtaatgcatgcagtggtcacaacccagttactcataatatttggattgtatttgttcgtagatatgcccagaagactagagaattagtgttatataccatatagaacttactgtcagtcaactataaacaggcccaattaaaaactgttccattactacgcaaacacatattagaggcctttgctgatgacacattagctggatcttagccaccccagaaagggtttgatttgaagctgattgttgccagatatgcatattggaatcccatctacccatagttcctctgaaggtgattttgtaatttgcaaaagggtataggaaaatatacctaaaagcgaatttgtggctgagaggataaacagaagctgtttgctcatgttctgtgccccacacccaccaatacctaaatctgttaaggaagacagaaaatgttttctttgtgctcattgagtagttccagacagaagaagaatatactctttaaaatgtatttacctgttagttggaagtacccagaattatcagaaacgaatgcaaaaaaaaaaaaaaaaaaaaaaagcttacacagcttcttagcaatttttttttttttgccgaaacaataaattgcctttagcagcagtttaaaatcctatcgtgaacaacctatattttcgccattttacaatggagagttgtgacaagtacaggttatcaagtttgcacttaactatgccaaaaaaagtttgaagcgctctattctcagacatgctgtattattacttctcattcaagattgaaaaatataaaggtatccaaactctgtcttaatgtaaatgtaactatttttccttcaagtgttgactagggagtcggtttctctcttaaagacactcactgtacaactgaaagcagctgtcatatttctggcaaaatgtgtttacgtatctgacaagttgtacatttgtgtatgaactgacataaaatgtgaaagcctgtaagtgtacatgtagtggtgtggtgttctgtctagaggatacaactgaatgtttttaatttgctgacttacagacacaggctgtttacaaaatgctagctggaaagtctgtaatgttcatgtcataacttttagttaattgccattgagcacctgttctgaggaggtgagatgtggacttgtgcttataaactggagagtttagtcataatccctcctggctttgtgtgaatagcttgctcactttgctggcctttgaaatgtgttctccgtgataagctatccatgtgtttgtgataagagtgcttgtcaaccatgaccatctttgagccttcctagtcctccacctggcacagtatttgaaatggcaaaggatgtgcttcatcctctaacagtgtacactcccagagctgatattctggattttgactgtgcacatttcctctagttcatgtctgtagtccctatagaatgatctgtaataaaatagtatactggactgtgcatcaaagggatgtaaaattacagtattccaaaggttgaagttctgctgttttgttataatgcctgatacacatcttgaataaagtcttaacatttttcttttaaaaaa

SEQ ID NO: 25686 - DNA, 3778 bp, Homo sapiens
  source 1..3778: mol_type = unassigned DNA
aacgccgggcagggcggcgggcgcgctcagtctggcggcggctgccgtgagctgactgacgttccgggaacgccgcagcagcccgcgccgcccgcagcctagccgagccgcgccgcccgggcctcgcccgcccgcctgcccgccatggtgtcatggatcatctccaggctggtggtgtcaaatggatgatgtactggattatatttgcacttttcaccacagcagagacattcacagacatcttcctttgttggtttccattctattatgaactaaaaatagcatttgtagcctggctgctgtctccctacacaaaaggctccagcctcctgtacaggaagtttgtacatcccacgctatcttcaaaagaaaaggaaatcgatgattgtctggtccaagcaaaagaccgaagttacgatgcccttgtgcacttcgggaagcggggcttgaacgtggccgccacagcggctgtgatggctgcttccaagggacagggtgccttatcggagagactgcggagcttcagcatgcaggacctcaccaccatcaggggagacggcgcccctgctccctcgggccccccaccaccggggtctgggcgggccagcggcaaacacggccagcctaagatgtccaggagtgcttctgagagcgctagcagctcaggcaccgcctagaatccttcgatctcgcttcaggaagaaaagtacctcatcctcggccaccgaaaccacgtgagtgagatgagccaacagcaccggatccacagaatgtttcttctctgccttaaagagctattcactaataacatagaaatccgcaagctgggtgtgctttgagtgtgcagcctcacaaacatggccttttctctctccccttccacttttaaggatttatttttttcccccttttctttattttgctggggagaggctaaagggaaaggtagtaggggcgggggtggtgacctttaagtcttctgaggttggtaattttccacaattggattgtcattatagacagcagtgtgttttttagaaagataagagaatcacccctatgctgctgagatgtacatttgtaatttatctgttgcatacttagtttttagtcctgtaaatgcaaacacagcattttttacaactttctttgttcttggtacttatactttgaactatgatgtacatatttatggcttttggcttttaatataatggacttgcaagggctgccagaggttctgatatgtaagaaaactgcaaaaacaaatatagacaaatattttgattctagagaacgtctcagatgtgcttataaagcttccaaatacaactccagtaagacatccctttccctgcaggagtgtggtctatattctttagatagttgtttagtcaaaagaccagacaagttacaaactaagagaaacaatatttcacaacacagtaaagtgtgatgagaggtcaggggaacatcccagtaaaagagaagagtcacaggaagctcatctcctccctggattctggattaggagcttctgaatcttttccagggataggcaggtagctcactcttggtgcaatttcttgaggatgggaacatgtagagctgctggaaggagtaattctgtgcttgacaaaggacgatttctcctttatcgtgaccagtgctgccgatttcctgacagaggagcttacactctgagcaccttgttttagcgaactctagcaaaacttgtttagcttagcaaaaacaaacacacaaaaaactgagaactctgctgtttcagatatgccataacatacatctgaaacacatgtgtaacaatcaaaatggtgggctctagaatggttttggagctcgagatcttcatgggttagacttgctggtcagacccaggagcacctgtggctcacaccttctgttcccctcctggcctgtgcagaatgtaaacagcagactcatactcaatgggcactacaggccttatcagacgttttatacaagcctggattgcttagtaggggaataaggcattctctgagggggctttccacttagattgagaattttatttgaaaagaatctggtttaaatggcattgtggtccgaggtagctgctctccccactgagagctgagccgaaatataagaataatatatttgtgcttcgagttggtgtttctttcagtgtaatgcatgcagtggtcacaacccagttactcataatatttggattgtatttgttcgtagatatgcccagaagactagagaattagtgttatataccatatagaacttactgtcagtcaactataaacaggcccaattaaaaactgttccattactacgcaaacacatattagaggcctttgctgatgacacattagctggatcttagccaccccagaaagggtttgatttgaagctgattgttgccagatatgcatattggaatcccatctacccatagttcctctgaaggtgattttgtaatttgcaaaagggtataggaaaatatacctaaaagcgaatttgtggctgagaggataaacagaagctgtttgctcatgttctgtgccccacacccaccaatacctaaatctgttaaggaagacagaaaatgttttctttgtgctcattgagtagttccagacagaagaagaatatactctttaaaatgtatttacctgttagttggaagtacccagaattatcagaaacgaatgcaaaaaaaaaaaaaaaaaaaaaaagcttacacagcttcttagcaatttttttttttttgccgaaacaataaattgcctttagcagcagtttaaaatcctatcgtgaacaacctatattttcgccattttacaatggagagttgtgacaagtacaggttatcaagtttgcacttaactatgccaaaaaaagtttgaagcgctctattctcagacatgctgtattattacttctcattcaagattgaaaaatataaaggtatccaaactctgtcttaatgtaaatgtaactatttttccttcaagtgttgactagggagtcggtttctctcttaaagacactcactgtacaactgaaagcagctgtcatatttctggcaaaatgtgtttacgtatctgacaagttgtacatttgtgtatgaactgacataaaatgtgaaagcctgtaagtgtacatgtagtggtgtggtgttctgtctagaggatacaactgaatgtttttaatttgctgacttacagacacaggctgtttacaaaatgctagctggaaagtctgtaatgttcatgtcataacttttagttaattgccattgagcacctgttctgaggaggtgagatgtggacttgtgcttataaactggagagtttagtcataatccctcctggctttgtgtgaatagcttgctcactttgctggcctttgaaatgtgttctccgtgataagctatccatgtgtttgtgataagagtgcttgtcaaccatgaccatctttgagccttcctagtcctccacctggcacagtatttgaaatggcaaaggatgtgcttcatcctctaacagtgtacactcccagagctgatattctggattttgactgtgcacatttcctctagttcatgtctgtagtccctatagaatgatctgtaataaaatagtatactggactgtgcatcaaagggatgtaaaattacagtattccaaaggttgaagttctgctgttttgttataatgcctgatacacatcttgaataaagtcttaacatttttctttt

SEQ ID NO: 25687 - DNA, 3735 bp, Homo sapiens
  source 1..3735: mol_type = unassigned DNA
gtttcttatgcagaaagtgctgagcaacggacagactgaagaggttaggtctggatccaggcttatatttggcaccctttaccctgcgtattattcctacaaggctgtgaaatcaaaggacattaaggaatatgtcaaatggatgatgtactggattatatttgcacttttcaccacagcagagacattcacagacatcttcctttgttggtttccattctattatgaactaaaaatagcatttgtagcctggctgctgtctccctacacaaaaggctccagcctcctgtacaggaagtttgtacatcccacgctatcttcaaaagaaaaggaaatcgatgattgtctggtccaagcaaaagaccgaagttacgatgcccttgtgcacttcgggaagcggggcttgaacgtggccgccacagcggctgtgatggctgcttccaagggacagggtgccttatcggagagactgcggagcttcagcatgcaggacctcaccaccatcaggggagacggcgcccctgctccctcgggccccccaccaccggggtctgggcgggccagcggcaaacacggccagcctaagatgtccaggagtgcttctgagagcgctagcagctcaggcaccgcctagaatccttcgatctcgcttcaggaagaaaagtacctcatcctcggccaccgaaaccacgtgagtgagatgagccaacagcaccggatccacagaatgtttcttctctgccttaaagagctattcactaataacatagaaatccgcaagctgggtgtgctttgagtgtgcagcctcacaaacatggccttttctctctccccttccacttttaaggatttatttttttcccccttttctttattttgctggggagaggctaaagggaaaggtagtaggggcgggggtggtgacctttaagtcttctgaggttggtaattttccacaattggattgtcattatagacagcagtgtgttttttagaaagataagagaatcacccctatgctgctgagatgtacatttgtaatttatctgttgcatacttagtttttagtcctgtaaatgcaaacacagcattttttacaactttctttgttcttggtacttatactttgaactatgatgtacatatttatggcttttggcttttaatataatggacttgcaagggctgccagaggttctgatatgtaagaaaactgcaaaaacaaatatagacaaatattttgattctagagaacgtctcagatgtgcttataaagcttccaaatacaactccagtaagacatccctttccctgcaggagtgtggtctatattctttagatagttgtttagtcaaaagaccagacaagttacaaactaagagaaacaatatttcacaacacagtaaagtgtgatgagaggtcaggggaacatcccagtaaaagagaagagtcacaggaagctcatctcctccctggattctggattaggagcttctgaatcttttccagggataggcaggtagctcactcttggtgcaatttcttgaggatgggaacatgtagagctgctggaaggagtaattctgtgcttgacaaaggacgatttctcctttatcgtgaccagtgctgccgatttcctgacagaggagcttacactctgagcaccttgttttagcgaactctagcaaaacttgtttagcttagcaaaaacaaacacacaaaaaactgagaactctgctgtttcagatatgccataacatacatctgaaacacatgtgtaacaatcaaaatggtgggctctagaatggttttggagctcgagatcttcatgggttagacttgctggtcagacccaggagcacctgtggctcacaccttctgttcccctcctggcctgtgcagaatgtaaacagcagactcatactcaatgggcactacaggccttatcagacgttttatacaagcctggattgcttagtaggggaataaggcattctctgagggggctttccacttagattgagaattttatttgaaaagaatctggtttaaatggcattgtggtccgaggtagctgctctccccactgagagctgagccgaaatataagaataatatatttgtgcttcgagttggtgtttctttcagtgtaatgcatgcagtggtcacaacccagttactcataatatttggattgtatttgttcgtagatatgcccagaagactagagaattagtgttatataccatatagaacttactgtcagtcaactataaacaggcccaattaaaaactgttccattactacgcaaacacatattagaggcctttgctgatgacacattagctggatcttagccaccccagaaagggtttgatttgaagctgattgttgccagatatgcatattggaatcccatctacccatagttcctctgaaggtgattttgtaatttgcaaaagggtataggaaaatatacctaaaagcgaatttgtggctgagaggataaacagaagctgtttgctcatgttctgtgccccacacccaccaatacctaaatctgttaaggaagacagaaaatgttttctttgtgctcattgagtagttccagacagaagaagaatatactctttaaaatgtatttacctgttagttggaagtacccagaattatcagaaacgaatgcaaaaaaaaaaaaaaaaaaaaaaagcttacacagcttcttagcaatttttttttttttgccgaaacaataaattgcctttagcagcagtttaaaatcctatcgtgaacaacctatattttcgccattttacaatggagagttgtgacaagtacaggttatcaagtttgcacttaactatgccaaaaaaagtttgaagcgctctattctcagacatgctgtattattacttctcattcaagattgaaaaatataaaggtatccaaactctgtcttaatgtaaatgtaactatttttccttcaagtgttgactagggagtcggtttctctcttaaagacactcactgtacaactgaaagcagctgtcatatttctggcaaaatgtgtttacgtatctgacaagttgtacatttgtgtatgaactgacataaaatgtgaaagcctgtaagtgtacatgtagtggtgtggtgttctgtctagaggatacaactgaatgtttttaatttgctgacttacagacacaggctgtttacaaaatgctagctggaaagtctgtaatgttcatgtcataacttttagttaattgccattgagcacctgttctgaggaggtgagatgtggacttgtgcttataaactggagagtttagtcataatccctcctggctttgtgtgaatagcttgctcactttgctggcctttgaaatgtgttctccgtgataagctatccatgtgtttgtgataagagtgcttgtcaaccatgaccatctttgagccttcctagtcctccacctggcacagtatttgaaatggcaaaggatgtgcttcatcctctaacagtgtacactcccagagctgatattctggattttgactgtgcacatttcctctagttcatgtctgtagtccctatagaatgatctgtaataaaatagtatactggactgtgcatcaaagggatgtaaaattacagtattccaaaggttgaagttctgctgttttgttataatgcctgatacacatcttgaataaagtcttaacatttttctttt

SEQ ID NO: 25688 - DNA, 991 bp, Homo sapiens
  source 1..991: mol_type = unassigned DNA
agtctggcggcggctgccgtgagctgactgacgttccgggaacgccgcagcagcccgcgccgcccgcagcctagccgagccgcgccgcccgggcctcgcccgcccgcctgcccgccatggtgtcatggatcatctccaggctggtggtgcttatatttggcaccctttaccctgcgtattattcctacaaggctgtgaaatcaaaggacattaaggaatattcctttcgactaatgcgcccattttgttcaagagagaaacctgcgagtttccttaacacacccacacccacgccccacccagttggtgaccatgtcccttcatccctgtcgcctgaataatcttccaaaccaggtcaaatggatgatgtactggattatatttgcacttttcaccacagcagagacattcacagacatcttcctttgttggtttccattctattatgaactaaaaatagcatttgtagcctggctgctgtctccctacacaaaaggctccagcctcctgtacaggaagtttgtacatcccacgctatcttcaaaagaaaaggaaatcgatgattgtctggtccaagcaaaagaccgaagttacgatgcccttgtgcacttcgggaagcggggcttgaacgtggccgccacagcggctgtgatggctgcttccaagggacagggtgccttatcggagagactgcggagcttcagcatgcaggacctcaccaccatcaggggagacggcgcccctgctccctcgggccccccaccaccggggtctgggcgggccagcggcaaacacggccagcctaagatgtccaggagtgcttctgagagcgctagcagctcaggcaccgcctagaatccttcgatctcgcttcaggaagaaaagtacctcatcctcggccaccgaaaccacgtgagtgagatgagccaacagcaccggatccacagaatgtttcttctctgccttaaagagctattcactaataacatag

SEQ ID NO: 25689 - DNA, 3616 bp, Homo sapiens
  source 1..3616: mol_type = unassigned DNA
aacgccgggcagggcggcgggcgcgctcagtctggcggcggctgccgtgagctgactgacgttccgggaacgccgcagcagcccgcgccgcccgcagcctagccgagccgcgccgcccgggcctcgcccgcccgcctgcccgccatggtgtcatggatcatctccaggctggtggtgcttatatttggcaccctttaccctgcgtattattcctacaaggctgtgaaatcaaaggacattaaggaatatgtcaaatggatgatgtactggattatatttgcacttttcaccacagcagagacattcacagacatcttcctttgttgggacagggtgccttatcggagagactgcggagcttcagcatgcaggacctcaccaccatcaggggagacggcgcccctgctccctcgggccccccaccaccggggtctgggcgggccagcggcaaacacggccagcctaagatgtccaggagtgcttctgagagcgctagcagctcaggcaccgcctagaatccttcgatctcgcttcaggaagaaaagtacctcatcctcggccaccgaaaccacgtgagtgagatgagccaacagcaccggatccacagaatgtttcttctctgccttaaagagctattcactaataacatagaaatccgcaagctgggtgtgctttgagtgtgcagcctcacaaacatggccttttctctctccccttccacttttaaggatttatttttttcccccttttctttattttgctggggagaggctaaagggaaaggtagtaggggcgggggtggtgacctttaagtcttctgaggttggtaattttccacaattggattgtcattatagacagcagtgtgttttttagaaagataagagaatcacccctatgctgctgagatgtacatttgtaatttatctgttgcatacttagtttttagtcctgtaaatgcaaacacagcattttttacaactttctttgttcttggtacttatactttgaactatgatgtacatatttatggcttttggcttttaatataatggacttgcaagggctgccagaggttctgatatgtaagaaaactgcaaaaacaaatatagacaaatattttgattctagagaacgtctcagatgtgcttataaagcttccaaatacaactccagtaagacatccctttccctgcaggagtgtggtctatattctttagatagttgtttagtcaaaagaccagacaagttacaaactaagagaaacaatatttcacaacacagtaaagtgtgatgagaggtcaggggaacatcccagtaaaagagaagagtcacaggaagctcatctcctccctggattctggattaggagcttctgaatcttttccagggataggcaggtagctcactcttggtgcaatttcttgaggatgggaacatgtagagctgctggaaggagtaattctgtgcttgacaaaggacgatttctcctttatcgtgaccagtgctgccgatttcctgacagaggagcttacactctgagcaccttgttttagcgaactctagcaaaacttgtttagcttagcaaaaacaaacacacaaaaaactgagaactctgctgtttcagatatgccataacatacatctgaaacacatgtgtaacaatcaaaatggtgggctctagaatggttttggagctcgagatcttcatgggttagacttgctggtcagacccaggagcacctgtggctcacaccttctgttcccctcctggcctgtgcagaatgtaaacagcagactcatactcaatgggcactacaggccttatcagacgttttatacaagcctggattgcttagtaggggaataaggcattctctgagggggctttccacttagattgagaattttatttgaaaagaatctggtttaaatggcattgtggtccgaggtagctgctctccccactgagagctgagccgaaatataagaataatatatttgtgcttcgagttggtgtttctttcagtgtaatgcatgcagtggtcacaacccagttactcataatatttggattgtatttgttcgtagatatgcccagaagactagagaattagtgttatataccatatagaacttactgtcagtcaactataaacaggcccaattaaaaactgttccattactacgcaaacacatattagaggcctttgctgatgacacattagctggatcttagccaccccagaaagggtttgatttgaagctgattgttgccagatatgcatattggaatcccatctacccatagttcctctgaaggtgattttgtaatttgcaaaagggtataggaaaatatacctaaaagcgaatttgtggctgagaggataaacagaagctgtttgctcatgttctgtgccccacacccaccaatacctaaatctgttaaggaagacagaaaatgttttctttgtgctcattgagtagttccagacagaagaagaatatactctttaaaatgtatttacctgttagttggaagtacccagaattatcagaaacgaatgcaaaaaaaaaaaaaaaaaaaaaaagcttacacagcttcttagcaatttttttttttttgccgaaacaataaattgcctttagcagcagtttaaaatcctatcgtgaacaacctatattttcgccattttacaatggagagttgtgacaagtacaggttatcaagtttgcacttaactatgccaaaaaaagtttgaagcgctctattctcagacatgctgtattattacttctcattcaagattgaaaaatataaaggtatccaaactctgtcttaatgtaaatgtaactatttttccttcaagtgttgactagggagtcggtttctctcttaaagacactcactgtacaactgaaagcagctgtcatatttctggcaaaatgtgtttacgtatctgacaagttgtacatttgtgtatgaactgacataaaatgtgaaagcctgtaagtgtacatgtagtggtgtggtgttctgtctagaggatacaactgaatgtttttaatttgctgacttacagacacaggctgtttacaaaatgctagctggaaagtctgtaatgttcatgtcataacttttagttaattgccattgagcacctgttctgaggaggtgagatgtggacttgtgcttataaactggagagtttagtcataatccctcctggctttgtgtgaatagcttgctcactttgctggcctttgaaatgtgttctccgtgataagctatccatgtgtttgtgataagagtgcttgtcaaccatgaccatctttgagccttcctagtcctccacctggcacagtatttgaaatggcaaaggatgtgcttcatcctctaacagtgtacactcccagagctgatattctggattttgactgtgcacatttcctctagttcatgtctgtagtccctatagaatgatctgtaataaaatagtatactggactgtgcatcaaagggatgtaaaattacagtattccaaaggttgaagttctgctgttttgttataatgcctgatacacatcttgaataaagtcttaacatttttctttt

SEQ ID NO: 25690 - DNA, 2099 bp, Homo sapiens
  source 1..2099: mol_type = unassigned DNA
gctgctgcagcggctgctgctgctactgcggctcctgctgccgccgccgccgccgctcggcctcaggcagctgcatcctcggccgggccgggtccccgccccgcgccgcgcccggccccgccatggtgtcctggatcatctctcgcctggtggtgctcatctttggcaccctgtacccagcctattcttcctacaaggccgtgaagacaaaaaacgtgaaggaatatgtgaaatggatgatgtactggatcgtctttgccttcttcaccacggccgagacgctcacggatatagtgctctcctggttccccttctactttgaactgaagatcgccttcgtgatatggctgctgtccccttacaccaagggctccagcgtgctctaccgcaagttcgtgcacccaacgctgtccaacaaggagaaggagatcgacgagtacatcacgcaggcccgagacaagagctatgagaccatgatgagggtgggcaagaggggcctgaaccttgccgccaatgctgcagtcacagctgccgccaagggggtgctgtcagagaagctccgcagcttcagcatgcaggacctgaccctgatccgggacgaggacgcactgcccctgcagaggcctgacggccgcctccgacccagccctggcagcctcctggacaccatcgaggacttaggagatgaccctgccctgagtctaaggtccagcacaaacccggcagattcccggacagaggcttctgaggatgacatgggagacaaagctcccaagagggccaaacccatcaaaaaagcgcccaaagctgagccactggcttccaagacactgaagacccggcccaagaagaagacctctggcgggggcgactcagcttgagcccctccacccccgcaggctgcagagcaaggatgaagcctcaggaggggcctcagacccagcccctgctccacactgtgccagtagcctaggtgtctcaggcccctgggccccgcagatggccatttccggtgcctgcccagtggccactcttctggaaggggcttggaaaagaggaaggaggcccagctgtgggggttgagggtagagggtggaccagaggctgaggactgagccacccaaggaggtggggactgctcggcctccaccgctgttccgctgcagccccgccctgccccacccacccagtgccttgctgaagcccatagcaatccgcttctcagaggtcctgtcgtgtttccactgctcgccttggtttgggagcagggagggggaagtcctagcccagatggaccaaggacgggcctgaaggcacatgggggaaagggagcacacggggaggacgttggggaccctgggtggggcctccaggtgcagctgtggatggaagacagggattggcctgtgcttcagcgaccaggatggccaggccagagctgcagctgggggctcttttcctggtcattgggtggggctgagtgccacatgttcccacattaaaaaggggggtccagggctgtgtgagtgtgtctttctgggtctagggctcggggtagtttgggtcaaggactgtccctccagcagtcgcctcctcccaccctgagccccacagtcatctggccctttccctgctcaaccctccatcctaggctctgagcctcagaggacccagcccatgagagaacggggatctggggggcctctcacctgctcctatgaccttgctcccttttaggtcaccccattgccaccgtgcccctgggctggactcccgtgctcctcagggcccacccctgctctgtctggtacaggcccctgctgagtgggcccctctcctctgcccctggggtccatcccctcttgcccagggtccccatcctgtaccaagcagactgggccctaagacccctggcagaacccagcctctgctcacacccgccccagcttctgccacggcttcagtcagggccaggaggaacacgtgaaggagaaagagaaatgcaggagccgcggggctcccggttccttgggaagagggtgcccattggacctttggcactggatgagccaataaaccaaactctggcacctcattta

SEQ ID NO: 25691 - DNA, 2170 bp, Homo sapiens
  source 1..2170: mol_type = unassigned DNA
cacggcccgccgctgcggcagggacctcccctttaacggcggcgctgggcgctccgctgcccccgcggcggctgctgcagcggctgctgctgctactgcggctcctgctgccgccgccgccgccgctcggcctcaggcagctgcatcctcggccgggccgggtccccgccccgcgccgcgcccggccccgccatggtgtcctggatcatctctcgcctggtggtgctcatctttggcaccctgtacccagcctattcttcctacaaggccgtgaagacaaaaaacgtgaaggaatatgtgaaatggatgatgtactggatcgtctttgccttcttcaccacggccgagacgctcacggatatagtgctctcctggttccccttctactttgaactgaagatcgccttcgtgatatggctgctgtccccttacaccaagggctccagcgtgctctaccgcaagttcgtgcacccaacgctgtccaacaaggagaaggagatcgacgagtacatcacgcaggcccgagacaagagctatgagaccatgatgagggtgggcaagaggggcctgaaccttgccgccaatgctgcagtcacagctgccgccaagggccagggggtgctgtcagagaagctccgcagcttcagcatgcaggacctgaccctgatccgggacgaggacgcactgcccctgcagaggcctgacggccgcctccgacccagccctggcagcctcctggacaccatcgaggacttaggagatgaccctgccctgagtctaaggtccagcacaaacccggcagattcccggacagaggcttctgaggatgacatgggagacaaagctcccaagagggccaaacccatcaaaaaagcgcccaaagctgagccactggcttccaagacactgaagacccggcccaagaagaagacctctggcgggggcgactcagcttgagcccctccacccccgcaggctgcagagcaaggatgaagcctcaggaggggcctcagacccagcccctgctccacactgtgccagtagcctaggtgtctcaggcccctgggccccgcagatggccatttccggtgcctgcccagtggccactcttctggaaggggcttggaaaagaggaaggaggcccagctgtgggggttgagggtagagggtggaccagaggctgaggactgagccacccaaggaggtggggactgctcggcctccaccgctgttccgctgcagccccgccctgccccacccacccagtgccttgctgaagcccatagcaatccgcttctcagaggtcctgtcgtgtttccactgctcgccttggtttgggagcagggagggggaagtcctagcccagatggaccaaggacgggcctgaaggcacatgggggaaagggagcacacggggaggacgttggggaccctgggtggggcctccaggtgcagctgtggatggaagacagggattggcctgtgcttcagcgaccaggatggccaggccagagctgcagctgggggctcttttcctggtcattgggtggggctgagtgccacatgttcccacattaaaaaggggggtccagggctgtgtgagtgtgtctttctgggtctagggctcggggtagtttgggtcaaggactgtccctccagcagtcgcctcctcccaccctgagccccacagtcatctggccctttccctgctcaaccctccatcctaggctctgagcctcagaggacccagcccatgagagaacggggatctggggggcctctcacctgctcctatgaccttgctcccttttaggtcaccccattgccaccgtgcccctgggctggactcccgtgctcctcagggcccacccctgctctgtctggtacaggcccctgctgagtgggcccctctcctctgcccctggggtccatcccctcttgcccagggtccccatcctgtaccaagcagactgggccctaagacccctggcagaacccagcctctgctcacacccgccccagcttctgccacggcttcagtcagggccaggaggaacacgtgaaggagaaagagaaatgcaggagccgcggggctcccggttccttgggaagagggtgcccattggacctttggcactggatgagccaataaaccaaactctggcacctc

SEQ ID NO: 25692 - DNA, 5115 bp, Homo sapiens
  source 1..5115: mol_type = unassigned DNA
cggctcctgagggcgccagcgcggccccggggagcgcgaggagccggcgaagcgcgcggcctgccgttggcggcctggtccgcagcgccctgcgcccacccgccccggacgtggggcccaagcccccgctggtgtttggaatgctttatcctgcatattattcatacaaagctgtgaaaacaaaaaacgtgaaggaatatgttcgatggatgatgtactggattgtttttgctctctatactgtgattgaaacagtagccgatcaaacagttgcttggtttcccctgtactatgagctgaagattgcttttgtcatatggctgctttctccctataccaaaggagcaagtttaatatatagaaaattccttcatccacttctttcttcaaaggaaagggagattgatgattatattgtacaagcaaaggaacgaggctatgaaaccatggtaaactttggacggcaaggtttaaaccttgcagctactgctgctgttactgcagcagtaaagagccaaggagcaataactgaacgtttaagaagcttcagtatgcatgatttaacaactatccaaggtgatgagcctgtgggacaaagaccataccaacctctaccagaagcaaaaaagaaaagtaaaccagcccccagtgaatcagcaggttatggaattccactgaaagacggagatgagaaaacagatgaagaagcagaggggccatattcagataatgagatgttaacacacaaagggcttcgaagatcgcaaagcatgaaatctgtgaaaaccaccaaaggccgcaaagaggtgcggtacgggtcactaaaatacaaagtgaagaaacgaccacaagtgtatttttagtcatctacacgtcaaatatcccaagacagattatgctaaatacatcgacttcatcttctaacatgatatattcaggatttacacattaaaatgattatttaaattgtggcagtgatggggtttactttcatgaatttaaattgtttttatttctgtaacaattgcttccaaatattgactactaaaggcagttctgcaagatgtactaaatatgtatattagaaattatagaaaatcatgttgtccgttttcaaattcatcaacagcctagagtgcctgagatataagatgaaacacaaatccacagtatacttgaaaggagcctttttacggttcaggataaatcagcctttgtgatgtactgtgtttacctccttttgtgttgtatctggtaattaaataggcctcagattcagcagtgacataacaaggacataatgtaagataataaagtaggttttatatattctttaaatttttacttatataatactttctagtttttccaccatcagctgaaagtttttgaaacaaatatttgaaaaccaggtatccacacatagcacttttattcctgactagttttgcacacttgaaaattgtttacttattttacaactgttttactgatgctatctttattgtttttgccgtattctgacatgtcaaatctatgccttgaattatatcatctcttttcctgtgggtttcatttgttaaattcattggattttaataatataaaagtatagctaattgttcagttttaactatttttaattatcttcttaacaaataagaagttgctttaaacattaaccaattttctatatttagctatacagagtaattgaacttaacatgtttttgtcaacaccaattacattttcagcttttaaaaatggtagcttttgtgaaatagaatcagtgaccagtatagcacttagatcccttctaactcatataatttttctcagccaatccattcacaagcttggcattgacatgtgctgctagtttataaactggcattgacgaaaatcatttgaatctcttctggctgagataatttgccaatgcaaaatacagttgtcattaatcctgcacattagaaattattagaaacatattactttttaactttaaatctcaaagagattttgagttattgaattcttaaggctttcttagcttgaactgataactatgcattatgaaccctaagtcaatatatttttggtggttttagtgatcagtaatcaaatttgtacttattatgcttgttcaggtaatttacttgactgttctatttgtttgtccaaaagataaaatgatgagagagattcgagaggtctttgatctgtctcccttttaagaaatgaagccagctggtaatgtatattcaggacttcctcagagtattggccaagaacataatgtttacacaggagtaccttggtataatgcatacattgtctcatgatactagtcataaaatattttatggattatttcacattcttcatatataacaagtaaaattaattcagttttcttctcccaacgtttaattctgaataactctatctactttaccctaatttttagcctcttaatttctggaaggactctaatttctattccaaatttctatgaattctaattgtaaattatcggaacagagttttatttatatgacctggtactagacttcttaatataactgttacactgtccttgtctttcctactcaaagacagtatcatctgaagttgcctaataaggtcatgtgagtcaagaactttatctgtgggagctgatttgcaccattttaccttttttttttttttttttttgagacggagtcttgctctgtcaccaggctggagtgcagtggcgcgatctcggctcactacaacctctgcctcccgggttcgagcgattctcctgcctcggcctcccgagtaactgggtctacaggcccgtgctaccacgcccagctaatttttgtctttttagtagagacagggtttaaccatgttgcccaggatggtctccatctcttgacctcgtgatccgcccgcctcggcctcccaaacttctgggattacaggcgtgagccaccgcacccagccaccattttatctctctaaagtctggtcccagtattaaacctattctttagtaaactcatattactgttctaaattgaagaaattatttattactctgtacttctagactcaaaattctttatcaaagatagtctcaaagaggtagtacaagtcctgtttaactgcactttttcacattcacagtgcttcctctgatatctttccttacatcattatacactgttgatatcattttactcttctttctcttctacatttcttaaattttggttcttttcctgtacatgtgttttagcggggcccttttctttgaactttgtctaattagcctgtacatttttgtttcttttaaggtagaacagatctttttttgtttctccttttaagtctactggttttaaaagaggtaaatgtatccatagaccacagtgccttgctttttcctctgccagcacatggagcacgggattagatgcacaaacctatttagggaactattttggtagatgtttgagtttatacagaaattgcagctggtattttattttgctgtacatttactcaacttgtccattagtatttaactatttccagagtttgtttaggagtaagaattgacccattcgttagtttaccatattttttcctggtataaaaaggagccagaaataagccttattgctaaataattaattatgtaagcccacctaggtcctgcataagatccccctcacatacttcacaatatatatgtgtgtgtgtgtgtgtgtgtgtgtgtgtgtgtgtgtgtgtgtatttggctaaaaaattatactgccaaaattactgattataaatacttgactacactgattgatgggacaaaatgattaaagtattttcagggatcttattccatatgtcaccaccaaagatttctacagtgttataaagtatataaatattccaaatttctgtggttaaatatttttttcttttttttccttttttagaataacacagtctgtgctttccaaaaatgcttgaacttttatgttgttaagaaatatataatgatatcttacattaagcatgagtctaatttgtattaattgggatggactaaattttcatttgattatcaggaaaattaaggagttatatatttaaaagcaattttctgtgttttcttctttgtaagttgactcatttgtgaagcaattaggcaaattttgagaagatcattgttattgtggtttgcagtatatatttcttagtaaatatcacttaagattaaatttttcagaaagaaaattatagcttttttcccaaaatatttttaagatttaatctttttgtagtatgctacagatttaattatattaactcttttttaagacattgaccatgacttaacattttgccttctaacaccttttaaatctatgtactttaatagttaagagaaaataagtttgcagatttttaataatctgtttgtaaaaggctatctctaagcctagtatgtgggtaattttacaggtgtgttttttgataactttaatataaaataaactcattttatttgtggcaattcgcgtttctttttttatgccagagtacatatgttggattccatgaattggtattacttattattatgtgttgattaaatatatgcacacacttaggattacagatcacagagcaaattatgaaaatcataaacattctggtatggtcatccataggattatgaaaaagaaatactgaattgttaaatttggatgttagaaaggaaagataggaaaaacaatgagtacagaaatcctcaccatcaatttggatgggttagctgtctcaggcataaaatgtaacacaaaattcagatttatgtatcctggaaatgttctggggttccatctgttttaaagttagacgtctgtctgcctcacatttaagctttagagagaaatcctatgttttaagaagtttctttgtgttacttcattatgacacataatgcgtgttaaggtctttctagatagcattttaaatggaattattttcattttcattatgaggtatatacttgtaatgatctaaagaggttagaaatataaataaaaattcaaaag

SEQ ID NO: 25693 - DNA, 5205 bp, Homo sapiens
  source 1..5205: mol_type = unassigned DNA
gggggaccgacctctgcgcagcccaggccgccgcgcgcacacaccgggcccggctcctgagggcgccagcgcggccccggggagcgcgaggagccggcgaagcgcgcggcctgccgttggcggcctggtccgcagcgccctgcgcccacccgccccggacgtggggcccaagcccccgtgaagatggtgtcctggatgatctccagagccgtggtgctggtgtttggaatgctttatcctgcatattattcatacaaagctgtgaaaacaaaaaacgtgaaggaatatgttcgatggatgatgtactggattgtttttgctctctatactgtgattgaaacagtagccgatcaaacagttgcttggtttcccctgtactatgagctgaagattgcttttgtcatatggctgctttctccctataccaaaggagcaagtttaatatatagaaaattccttcatccacttctttcttcaaaggaaagggagattgatgattatattgtacaagcaaaggaacgaggctatgaaaccatggtaaactttggacggcaaggtttaaaccttgcagctactgctgctgttactgcagcagtaaagagccaaggagcaataactgaacgtttaagaagcttcagtatgcatgatttaacaactatccaaggtgatgagcctgtgggacaaagaccataccaacctctaccagaagcaaaaaagaaaagtaaaccagcccccagtgaatcagcaggttatggaattccactgaaagacggagatgagaaaacagatgaagaagcagaggggccatattcagataatgagatgttaacacacaaagggcttcgaagatcgcaaagcatgaaatctgtgaaaaccaccaaaggccgcaaagaggtgcggtacgggtcactaaaatacaaagtgaagaaacgaccacaagtgtatttttagtcatctacacgtcaaatatcccaagacagattatgctaaatacatcgacttcatcttctaacatgatatattcaggatttacacattaaaatgattatttaaattgtggcagtgatggggtttactttcatgaatttaaattgtttttatttctgtaacaattgcttccaaatattgactactaaaggcagttctgcaagatgtactaaatatgtatattagaaattatagaaaatcatgttgtccgttttcaaattcatcaacagcctagagtgcctgagatataagatgaaacacaaatccacagtatacttgaaaggagcctttttacggttcaggataaatcagcctttgtgatgtactgtgtttacctccttttgtgttgtatctggtaattaaataggcctcagattcagcagtgacataacaaggacataatgtaagataataaagtaggttttatatattctttaaatttttacttatataatactttctagtttttccaccatcagctgaaagtttttgaaacaaatatttgaaaaccaggtatccacacatagcacttttattcctgactagttttgcacacttgaaaattgtttacttattttacaactgttttactgatgctatctttattgtttttgccgtattctgacatgtcaaatctatgccttgaattatatcatctcttttcctgtgggtttcatttgttaaattcattggattttaataatataaaagtatagctaattgttcagttttaactatttttaattatcttcttaacaaataagaagttgctttaaacattaaccaattttctatatttagctatacagagtaattgaacttaacatgtttttgtcaacaccaattacattttcagcttttaaaaatggtagcttttgtgaaatagaatcagtgaccagtatagcacttagatcccttctaactcatataatttttctcagccaatccattcacaagcttggcattgacatgtgctgctagtttataaactggcattgacgaaaatcatttgaatctcttctggctgagataatttgccaatgcaaaatacagttgtcattaatcctgcacattagaaattattagaaacatattactttttaactttaaatctcaaagagattttgagttattgaattcttaaggctttcttagcttgaactgataactatgcattatgaaccctaagtcaatatatttttggtggttttagtgatcagtaatcaaatttgtacttattatgcttgttcaggtaatttacttgactgttctatttgtttgtccaaaagataaaatgatgagagagattcgagaggtctttgatctgtctcccttttaagaaatgaagccagctggtaatgtatattcaggacttcctcagagtattggccaagaacataatgtttacacaggagtaccttggtataatgcatacattgtctcatgatactagtcataaaatattttatggattatttcacattcttcatatataacaagtaaaattaattcagttttcttctcccaacgtttaattctgaataactctatctactttaccctaatttttagcctcttaatttctggaaggactctaatttctattccaaatttctatgaattctaattgtaaattatcggaacagagttttatttatatgacctggtactagacttcttaatataactgttacactgtccttgtctttcctactcaaagacagtatcatctgaagttgcctaataaggtcatgtgagtcaagaactttatctgtgggagctgatttgcaccattttaccttttttttttttttttttttgagacggagtcttgctctgtcaccaggctggagtgcagtggcgcgatctcggctcactacaacctctgcctcccgggttcgagcgattctcctgcctcggcctcccgagtaactgggtctacaggcccgtgctaccacgcccagctaatttttgtctttttagtagagacagggtttaaccatgttgcccaggatggtctccatctcttgacctcgtgatccgcccgcctcggcctcccaaacttctgggattacaggcgtgagccaccgcacccagccaccattttatctctctaaagtctggtcccagtattaaacctattctttagtaaactcatattactgttctaaattgaagaaattatttattactctgtacttctagactcaaaattctttatcaaagatagtctcaaagaggtagtacaagtcctgtttaactgcactttttcacattcacagtgcttcctctgatatctttccttacatcattatacactgttgatatcattttactcttctttctcttctacatttcttaaattttggttcttttcctgtacatgtgttttagcggggcccttttctttgaactttgtctaattagcctgtacatttttgtttcttttaaggtagaacagatctttttttgtttctccttttaagtctactggttttaaaagaggtaaatgtatccatagaccacagtgccttgctttttcctctgccagcacatggagcacgggattagatgcacaaacctatttagggaactattttggtagatgtttgagtttatacagaaattgcagctggtattttattttgctgtacatttactcaacttgtccattagtatttaactatttccagagtttgtttaggagtaagaattgacccattcgttagtttaccatattttttcctggtataaaaaggagccagaaataagccttattgctaaataattaattatgtaagcccacctaggtcctgcataagatccccctcacatacttcacaatatatatgtgtgtgtgtgtgtgtgtgtgtgtgtgtgtgtgtgtgtgtgtatttggctaaaaaattatactgccaaaattactgattataaatacttgactacactgattgatgggacaaaatgattaaagtattttcagggatcttattccatatgtcaccaccaaagatttctacagtgttataaagtatataaatattccaaatttctgtggttaaatatttttttcttttttttccttttttagaataacacagtctgtgctttccaaaaatgcttgaacttttatgttgttaagaaatatataatgatatcttacattaagcatgagtctaatttgtattaattgggatggactaaattttcatttgattatcaggaaaattaaggagttatatatttaaaagcaattttctgtgttttcttctttgtaagttgactcatttgtgaagcaattaggcaaattttgagaagatcattgttattgtggtttgcagtatatatttcttagtaaatatcacttaagattaaatttttcagaaagaaaattatagcttttttcccaaaatatttttaagatttaatctttttgtagtatgctacagatttaattatattaactcttttttaagacattgaccatgacttaacattttgccttctaacaccttttaaatctatgtactttaatagttaagagaaaataagtttgcagatttttaataatctgtttgtaaaaggctatctctaagcctagtatgtgggtaattttacaggtgtgttttttgataactttaatataaaataaactcattttatttgtggcaattcgcgtttctttttttatgccagagtacatatgttggattccatgaattggtattacttattattatgtgttgattaaatatatgcacacacttaggattacagatcacagagcaaattatgaaaatcataaacattctggtatggtcatccataggattatgaaaaagaaatactgaattgttaaatttggatgttagaaaggaaagataggaaaaacaatgagtacagaaatcctcaccatcaatttggatgggttagctgtctcaggcataaaatgtaacacaaaattcagatttatgtatcctggaaatgttctggggttccatctgttttaaagttagacgtctgtctgcctcacatttaagctttagagagaaatcctatgttttaagaagtttctttgtgttacttcattatgacacataatgcgtgttaaggtctttctagatagcattttaaatggaattattttcattttcattatgaggtatatacttgtaatgatctaaagaggttagaaatataaataaaaattcaaaagaa

SEQ ID NO: 25694 - DNA, 5028 bp, Homo sapiens
  source 1..5028: mol_type = unassigned DNA
ttaatgatgtggcttctagttgagagggccttaatccagctggtgtttggaatgctttatcctgcatattattcatacaaagctgtgaaaacaaaaaacgtgaaggaatatgttcgatggatgatgtactggattgtttttgctctctatactgtgattgaaacagtagccgatcaaacagttgcttggtttcccctgtactatgagctgaagattgcttttgtcatatggctgctttctccctataccaaaggagcaagtttaatatatagaaaattccttcatccacttctttcttcaaaggaaagggagattgatgattatattgtacaagcaaaggaacgaggctatgaaaccatggtaaactttggacggcaaggtttaaaccttgcagctactgctgctgttactgcagcagtaaagagccaaggagcaataactgaacgtttaagaagcttcagtatgcatgatttaacaactatccaaggtgatgagcctgtgggacaaagaccataccaacctctaccagaagcaaaaaagaaaagtaaaccagcccccagtgaatcagcaggttatggaattccactgaaagacggagatgagaaaacagatgaagaagcagaggggccatattcagataatgagatgttaacacacaaagggcttcgaagatcgcaaagcatgaaatctgtgaaaaccaccaaaggccgcaaagaggtgcggtacgggtcactaaaatacaaagtgaagaaacgaccacaagtgtatttttagtcatctacacgtcaaatatcccaagacagattatgctaaatacatcgacttcatcttctaacatgatatattcaggatttacacattaaaatgattatttaaattgtggcagtgatggggtttactttcatgaatttaaattgtttttatttctgtaacaattgcttccaaatattgactactaaaggcagttctgcaagatgtactaaatatgtatattagaaattatagaaaatcatgttgtccgttttcaaattcatcaacagcctagagtgcctgagatataagatgaaacacaaatccacagtatacttgaaaggagcctttttacggttcaggataaatcagcctttgtgatgtactgtgtttacctccttttgtgttgtatctggtaattaaataggcctcagattcagcagtgacataacaaggacataatgtaagataataaagtaggttttatatattctttaaatttttacttatataatactttctagtttttccaccatcagctgaaagtttttgaaacaaatatttgaaaaccaggtatccacacatagcacttttattcctgactagttttgcacacttgaaaattgtttacttattttacaactgttttactgatgctatctttattgtttttgccgtattctgacatgtcaaatctatgccttgaattatatcatctcttttcctgtgggtttcatttgttaaattcattggattttaataatataaaagtatagctaattgttcagttttaactatttttaattatcttcttaacaaataagaagttgctttaaacattaaccaattttctatatttagctatacagagtaattgaacttaacatgtttttgtcaacaccaattacattttcagcttttaaaaatggtagcttttgtgaaatagaatcagtgaccagtatagcacttagatcccttctaactcatataatttttctcagccaatccattcacaagcttggcattgacatgtgctgctagtttataaactggcattgacgaaaatcatttgaatctcttctggctgagataatttgccaatgcaaaatacagttgtcattaatcctgcacattagaaattattagaaacatattactttttaactttaaatctcaaagagattttgagttattgaattcttaaggctttcttagcttgaactgataactatgcattatgaaccctaagtcaatatatttttggtggttttagtgatcagtaatcaaatttgtacttattatgcttgttcaggtaatttacttgactgttctatttgtttgtccaaaagataaaatgatgagagagattcgagaggtctttgatctgtctcccttttaagaaatgaagccagctggtaatgtatattcaggacttcctcagagtattggccaagaacataatgtttacacaggagtaccttggtataatgcatacattgtctcatgatactagtcataaaatattttatggattatttcacattcttcatatataacaagtaaaattaattcagttttcttctcccaacgtttaattctgaataactctatctactttaccctaatttttagcctcttaatttctggaaggactctaatttctattccaaatttctatgaattctaattgtaaattatcggaacagagttttatttatatgacctggtactagacttcttaatataactgttacactgtccttgtctttcctactcaaagacagtatcatctgaagttgcctaataaggtcatgtgagtcaagaactttatctgtgggagctgatttgcaccattttaccttttttttttttttttttttgagacggagtcttgctctgtcaccaggctggagtgcagtggcgcgatctcggctcactacaacctctgcctcccgggttcgagcgattctcctgcctcggcctcccgagtaactgggtctacaggcccgtgctaccacgcccagctaatttttgtctttttagtagagacagggtttaaccatgttgcccaggatggtctccatctcttgacctcgtgatccgcccgcctcggcctcccaaacttctgggattacaggcgtgagccaccgcacccagccaccattttatctctctaaagtctggtcccagtattaaacctattctttagtaaactcatattactgttctaaattgaagaaattatttattactctgtacttctagactcaaaattctttatcaaagatagtctcaaagaggtagtacaagtcctgtttaactgcactttttcacattcacagtgcttcctctgatatctttccttacatcattatacactgttgatatcattttactcttctttctcttctacatttcttaaattttggttcttttcctgtacatgtgttttagcggggcccttttctttgaactttgtctaattagcctgtacatttttgtttcttttaaggtagaacagatctttttttgtttctccttttaagtctactggttttaaaagaggtaaatgtatccatagaccacagtgccttgctttttcctctgccagcacatggagcacgggattagatgcacaaacctatttagggaactattttggtagatgtttgagtttatacagaaattgcagctggtattttattttgctgtacatttactcaacttgtccattagtatttaactatttccagagtttgtttaggagtaagaattgacccattcgttagtttaccatattttttcctggtataaaaaggagccagaaataagccttattgctaaataattaattatgtaagcccacctaggtcctgcataagatccccctcacatacttcacaatatatatgtgtgtgtgtgtgtgtgtgtgtgtgtgtgtgtgtgtgtgtgtatttggctaaaaaattatactgccaaaattactgattataaatacttgactacactgattgatgggacaaaatgattaaagtattttcagggatcttattccatatgtcaccaccaaagatttctacagtgttataaagtatataaatattccaaatttctgtggttaaatatttttttcttttttttccttttttagaataacacagtctgtgctttccaaaaatgcttgaacttttatgttgttaagaaatatataatgatatcttacattaagcatgagtctaatttgtattaattgggatggactaaattttcatttgattatcaggaaaattaaggagttatatatttaaaagcaattttctgtgttttcttctttgtaagttgactcatttgtgaagcaattaggcaaattttgagaagatcattgttattgtggtttgcagtatatatttcttagtaaatatcacttaagattaaatttttcagaaagaaaattatagcttttttcccaaaatatttttaagatttaatctttttgtagtatgctacagatttaattatattaactcttttttaagacattgaccatgacttaacattttgccttctaacaccttttaaatctatgtactttaatagttaagagaaaataagtttgcagatttttaataatctgtttgtaaaaggctatctctaagcctagtatgtgggtaattttacaggtgtgttttttgataactttaatataaaataaactcattttatttgtggcaattcgcgtttctttttttatgccagagtacatatgttggattccatgaattggtattacttattattatgtgttgattaaatatatgcacacacttaggattacagatcacagagcaaattatgaaaatcataaacattctggtatggtcatccataggattatgaaaaagaaatactgaattgttaaatttggatgttagaaaggaaagataggaaaaacaatgagtacagaaatcctcaccatcaatttggatgggttagctgtctcaggcataaaatgtaacacaaaattcagatttatgtatcctggaaatgttctggggttccatctgttttaaagttagacgtctgtctgcctcacatttaagctttagagagaaatcctatgttttaagaagtttctttgtgttacttcattatgacacataatgcgtgttaaggtctttctagatagcattttaaatggaattattttcattttcattatgaggtatatacttgtaatgatctaaagaggttagaaatataaataaaaattcaaaagaa

SEQ ID NO: 25695 - DNA, 1710 bp, Homo sapiens
  source 1..1710: mol_type = unassigned DNA
acactgcgcctgcgtggcaagccggagccctggggttgggcagcactcggttccgtgcaactttcaagtgagttgcgaactccgccctgtaggccggtgctggtggcccggcgcgctggaaccgcggcgacccgctccagcgcgggaccagcagcaagggccgagcgccaggttctccgcggcagaaagggcgggtgggagctgtaactgccccggccgcggggcgcgcccgctcccaagtcggcttcctccccgccggggccgctttgcctcgggtctccccattctccaggtcccctgaactgcacagtcggaggccgtgggcggcgggctctgcctccgccgagggacagccggatcgcccctctgcttcccgcaactgccctgatcaccccccgtcccagcccttgagtgaacgtccttctgagcggcttcctggggtcctccccacgtcccaaaggccggcaagatggtgtcctggatgatctgtcgcctggtggtgctggtgtttgggatgctgtgtccagcttatgcttcctataaggctgtgaagaccaagaacattcgtgaatatgtgcggtggatgatgtactggattgtttttgcactcttcatggcagcagagatcgttacagacatttttatctcctggttccctttctactatgagatcaagatggccttcgtgctgtggctgctctcaccctacaccaagggcgccagcctgctttaccgcaagtttgtccacccgtccctgtcccgccatgagaaggagatcgacgcgtacatcgtgcaggccaaggagcgcagctacgagaccgtgctcagcttcgggaagcggggcctcaacattgccgcctccgctgctgtgcaggctgccaccaagagtcagggggcgctggccggcaggctgcggagcttctccatgcaggacctgcgctccatctctgacgcacctgcccctgcctaccatgaccccctctacctggaggaccaggtgtcccaccggaggccacccattgggtaccgggccgggggcctgcaggacagcgacaccgaggatgagtgttggtcagatactgaggcagtcccccgggcgccagcccggccccgagagaagcccctaatccgcagccagagcctgcgtgtggtcaagaggaagccaccggtgcgggagggcacctcgcgctccctgaaggttcggacgaggaaaaagactgtgccctcagacgtggacagctagggtctgctgcatctgcccccttcttacctcgtgccctgcagggctccagggctatttggagggaccttgggctgcacatctggcctgcctgcaccagctgcctgggccccaccctcctgactcctgctgatggttaagggccgggagcagatgctgccaaggccacatgcagggatgcacccacaatgtaccaaagcaggctgggcccagggttctatttattgccttgctctgccctctcccttccccggttgtgggacaagagccctccctgaacccctgcaaccctccctgaacccctgcaaatgaaaccaaacgtccacctgggtgtgttcattccttcctgtccttcaaagtacttgatagcctttcataaggcctggcacatgtgtcctggttgtgtgtgtgtgtgttggtgagtgaggtcaggtttgcgagtgttttgataaataaatacataaaggggc

SEQ ID NO: 25696 - DNA, 1476 bp, Homo sapiens
  source 1..1476: mol_type = unassigned DNA
gctggtggcccggcgcgctggaaccgcggcgacccgctccagcgcgggaccagcagcaagggccgagcgccaggttctccgcggcagaaagggcgggtgggagctgtaactgccccggccgcggggcgcgcccgctcccaagtcggcttcctccccgccggggccgctttgcctcgggtctccccattctccaggtcccctgaactgcacagtcggaggccgtgggcggcgggctctgcctccgccgagggacagccggatcgcccctctgcttcccgcaactgccctgatcaccccccgtcccagcccttgagtgaacgtccttctgagcggcttcctggggtcctccccacgtcccaaaggccggcaagatggtgtcctggatgatctgtcgcctggtggtgctggtgtttgggatgctgtgtccagcttatgcttcctataaggctgtgaagaccaagaacattcgtgaatatgtgcggtggatgatgtactggattgtttttgcactcttcatggcagcagagatcgttacagacatttttatctcctggttccctttctactatgagatcaagatggccttcgtgctgtggctgctctcaccctacaccaagggcgccagcctgctttaccgcaagtttgtccacccgtccctgtcccgccatgagaaggagatcgacgcgtacatcgtgcaggccaaggagcgcagctacgagaccgtgctcagcttcgggaagcggggcctcaacattgccgcctccgctgctgtgcaggctgccaccaagggtaccgggccgggggcctgcaggacagcgacaccgaggatgagtgttggtcagatactgaggcagtcccccgggcgccagcccggccccgagagaagcccctaatccgcagccagagcctgcgtgtggtcaagaggaagccaccggtgcgggagggcacctcgcgctccctgaaggttcggacgaggaaaaagactgtgccctcagacgtggacagctagggtctgctgcatctgcccccttcttacctcgtgccctgcagggctccagggctatttggagggaccttgggctgcacatctggcctgcctgcaccagctgcctgggccccaccctcctgactcctgctgatggttaagggccgggagcagatgctgccaaggccacatgcagggatgcacccacaatgtaccaaagcaggctgggcccagggttctatttattgccttgctctgccctctcccttccccggttgtgggacaagagccctccctgaacccctgcaaccctccctgaacccctgcaaatgaaaccaaacgtccacctgggtgtgttcattccttcctgtccttcaaagtacttgatagcctttcataaggcctggcacatgtgtcctggttgtgtgtgtgtgtgttggtgagtgaggtcaggtttgcgagtgttttgataaataaatacataaaggggc

SEQ ID NO: 25697 - DNA, 3318 bp, Homo sapiens
  source 1..3318: mol_type = unassigned DNA
gtccgatttgagaaggggacccacgagagacacaaaatgcacgcccccacgccacatcctttttaccccgcaatgggttaagactgtcaacaggcaggccacctcgcagcgtccgcggagttgcaggcccgcccccgccagggtgtggcgctgtccccctggcgctgggcgggggaggaggggcgcgcggcggccgaggaggggcgcgcggcggccgggcggggcgagcggaggcgagtggaggacgcgtagacgcgccgcggtccccgcctgccgctgctccgccgcagtcgccgctccagtctatccggcactaggaacagccccgagcggcgagacggtccccgccatgtctgcggccatgagggagaggttcgaccggttcctgcacgagaagaactgcatgactgaccttctggccaagctcgaggccaaaaccggcgtgaacaggagcttcatcgctcttggtgtcatcggactggtggccttgtacctggtgttcggttatggagcctctctcctctgcaacctgataggatttggctacccagcctacatctcaattaaagctatagagagtcccaacaaagaagatgatacccagtggctgacctactgggtagtgtatggtgtgttcagcattgctgaattcttctctgatatcttcctgtcatggttccccttctactacatgctgaagtgtggcttcctgttgtggtgcatggccccgagcccttctaatggggctgaactgctctacaagcgcatcatccgtcctttcttcctgaagcacgagtcccagatggacagtgtggtcaaggaccttaaagacaaggccaaagagactgcagatgccatcactaaagaagcgaagaaagctaccgtgaatttactgggtgaagaaaagaagagcacctaaaccagactggatggaaacttcctgccctctctgtaccttcctactggagcttgatgttatattagggactgtggtataattattttaataatgttgccttggaaacatttttgagatattaaagattggaatgtgttgtaagtttctttgcttacttttactgtctatatatatagggagcactttaaacttaatgcagtgggcagtgtccacgtttttggaaaatgtattttgcctctgggtaggaaaagatgtatgttgctatcctgcaggaaatataaacttaaaataaaattatataccccacaggctgtgtactttactgggctctccctgcacgcattttctctgtagttacatttaggataatctttatggttctacttcctgtaatgtacaattttatataattctgaaatgtttttaatgtatttgtgcacatgtacatatggaaatgttactgtctgactacaacatgcatcatgctcatggggagggagcaggggaaggttgtatgtgtcatttataacttctgtacagtaagaccacctgccaaaagctggaggaaccattgtgctggtgtggtctactaaataatactttaggaaatacgtgattaatatgcaagtgaacaaagtgagaaatgaaatcgaatggagattggcctggttgtttccgtagtatatggcatatgaataccaggatagctttataaagcagttagttagttagttactcactctagtgataaatcgggaaatttacacacacacacacacacacacacacacacacacacacacagagtaacctgtaactctcaattccctgaaaaactagtaatactgtcttatctgctataaactttacatatttgtctattgtcaagatgctacaatggaaaccatttctggttttatcttcaaagcggagaaacatgttgatttagtcttctttcccaatcttcttttttaaaccagtttaaggaacttctgaagatttgtccacctctgattacatgtatgttcttgtttgtatcattagcaacaacatgctaatgacgacacctagctctaagagcaattctgggagaatgaaaggaagtataaagtaacccataatctgcttggcaatagttaagtcaatctatcttcagtttttctctggcctttaaggtcaaacacaagaggcttccctagtttacaagtcagagtcacttgtagtccatttaaatgccctcatccgtattctttgtgttgataagctgcacatgactacatagtaagtacagaacagtaaagttaaaacggatgtctccattgatctgccaaatcgttatagagagcaatttgtctggactagaaaatctgagttttacaccatactgttaagagtccttttgaattaaactcgactaaaacaagtgtataactaaactaacaagattaaatatccagccagtacagtattttttaaggcaaataaagatgattagctcaccttgagataacaatcaggtaagatcataacaatgtctcatgatgtaaaaaatattaaagatatcaatactaagtgacagtatcactctaatataatatggatcagagcatttattttggggaggaaaacagtggtgattaccggcattttattaaacttaaaactttgtagaaagcaaacaaaattgttcttgggagaaaatcaacttttagattaaaaaaattttaagtatctaggagtatttaaatccttttcccataaataaaagtacagttttcttggtggcagaatgaaaatcagcaacttctagcatatagactatataatcagattgacagcatatagaatatattatcagacaagatgaggaggtacaaaagttactattgctcataatgacttacaggctaaaattagttttaaaatactatattaaattctgaatgcaatttttttttgttcccttgagaccaaaatttaagttaactgttgctggcagtctaagtgtaaatgttaacagcaggagaagttaagaattgagcagttctgttgcatgatttcccaaatgaaatactgccttggctagagtttgaaaaactaattgagcctgtgcctggctagaaaacaagcgtttatttgaatgtgaatagtgtttcaaaggtatgtagttacagaattcctaccaaacagcttaaattcttcaagaaagaattcctgcagcagttattcccttacctgaaggcttcaatcatttggatcaacaactgctactctcgggaagactcctctactcacagctgaagaaaatgagcacacccttcacactgttatcacctatcctgaagatgtgatacactgaatggaaataaatagatgtaaataaaattgagttctcattt

SEQ ID NO: 25698 - DNA, 1187 bp, Homo sapiens
  source 1..1187: mol_type = unassigned DNA
ggcactaggaacagccccgagcggcgagacggtccccgccatgtctgcggccatgagggagaggttcgaccggttcctgcacgagaagaactgcatgactgaccttctggccaagctcgaggccaaaaccggcgtgaacaggagcttcatcgctcttggtgtcatcggactggtggccttgtacctggtgttcggttatggagcctctctcctctgcaacctgataggatttggctacccagcctacatctcaattaaagctatagagagtcccaacaaagaagatgatacccagtggctgacctactgggtagtgtatggtgtgttcagcattgctgaattcttctctgatatcttcctgtcatggttccccttctactacatgctgaaggtgtggtctggactagggtttctccttccccgctgcctgctgtagtagtggtcgtggtggcccatcttctccctcctctcggagttcttgccaaaggaggagccagtctgatctgaagacaagtagatgtctctattagcttcccagaattcattgttgggatttctgaacacatgaagaaagttgcagtgttttcctcttggacattgttgtatttcaaataaaccacaaatcgccattttccaccgggtcactgggcagaattcacattgcagctgtcgtcctgcataccatcgtccgttaaacagagaaagggctgcttggcattcttcttccgactggtactgaacatatacattgcccctcagtgtggcttcctgttgtggtgcatggccccgagcccttctaatggggctgaactgctctacaagcgcatcatccgtcctttcttcctgaagcacgagtcccagatggacagtgtggtcaaggaccttaaagacaaggccaaagagactgcagatgccatcactaaagaagcgaagaaagctaccgtgaatttactgggtgaagaaaagaagagcacctaaaccagactggatggaaacttcctgccctctctgtaccttcctactggagcttgatgttatattagggactgtggtataattattttaataatgttgccttggaaacatttttgagatattaaagattggaatgtgttgtaagtttctttgcttacttttactgtctatatatatagggagcactttaaacttaatgcagtgggcagtgt

SEQ ID NO: 25699 - DNA, 1517 bp, Homo sapiens
  source 1..1517: mol_type = unassigned DNA
ctctcccggcggggtctgggcagcggcggccgtggcggagggctatgcggcgggggagacggggcaggcccctcctcctttgtccgccctgccctcccattggtcctagcggggggccgggggcggacaccggcgcggggccggagcatcgcggctcaggctgcgggaaagcggtgcgcgtgcagcggggtgggtgccctggtccgcgggcgagctcgagcagccaaccccgggcgcgtcggggccatggacggcctgaggcagcgcgtggagcacttcctggagcaaaggaacctggtcaccgaagtgctgggggcgctggaggccaagaccggggtggagaagcggtatctggctgcaggagccgtcactctgctaagcctgtatctgctgttcggctacggagcgtctctgctgtgcaatctcatcggatttgtgtaccccgcatatgcctcaatcaaagctatcgagagcccaagcaaggacgacgacactgtgtggctcacctactgggtggtgtacgccctgtttgggctggccgagttcttcagcgatctactcctgtcctggttccctttctactacgtgggcaagtgcgccttcctgttgttctgcatggctcccaggccctggaacggggctctcatgctgtatcagcgcgtcgtgcgtccgctgttcctaaggcaccacggggccgtagacagaatcatgaacgacctcagcgggcgagccctggacgcggcggccggaataaccaggaacgtcaagccaagccagaccccgcagccgaaggacaagtgaagcagccccctgagcctcacaaggacctcctggctggtgaggagggggccgcgccaggctcccaggcctccacagagtcttcagcgcatcccccaacagcagcccctgccagtccctcgggtccaggcaaggccctgggggtctccttaaatgccacctcgggcaagtcccagtcccagtcctcggccacccccagctctggatcccagggccagctgccctctggctctggctgtggctcccgcctgtccggcagggcccagggccagcgtcgggcacagggcagctcccactggtctcggcaacacacccagccgcctggtacttcctccagcccctcccagtcagccctcccgtcctcggggcccctgcagccacccaacgtcacctccagcccggtctcacccatggtccagtctcccagcagcagcaacatccccacgcagccccccagcaagtcctctggcaagccggaggacgcagcccccaagaccagcggacagcgccagaaggaatcgtcgaaacagcctgccagcagcgcctcagtgcccgagctggtcccctgccattccgggacctctctggagtacacttcggagtccaccaccgagatcacctgcagctggccacaccacaggcccccgtgcctgcagcactactggtgcctgaaacacctggcctgctaggaggctccaataaagctaacccggaccaga

SEQ ID NO: 25700 - DNA, 5832 bp, Homo sapiens
  source 1..5832: mol_type = unassigned DNA
gagctggagcagccgccaccgccgccgccgagggagccccgggacggcagcccctgggcgcagggtgcgctgttctcggagtccgacccagggcgactcacgcccactggtgcgacccggacagcctgggactgacccgccggcccaggcgaggctgcagccagagggctgggaagggatcgcgctcgcggcatccagaggcggccaggcggaggcgagggagcaggttagagggacaaagagctttgcagacgtccccggcgtcctgcgagcgccagcggccgggacgaggcggccgggagcccgggaagagcccgtggatgttctgcgcgcggcctgggagccgccgccgccgccgcctcagcgagaggaggaatgcaccggccgcgccgccgcgggacgcgcccgccgctcctggcgctgctggccgcgctgctgctggccgcacgcggggctgctgcccaagaaacagagctgtcagtcagtgctgaattagtgcctacctcatcatggaacatctcaagtgaactcaacaaagattcttacctgaccctcgatgaaccaatgaataacatcaccacgtctctgggccagacagcagaactgcactgcaaagtctctgggaatccacctcccaccatccgctggttcaaaaatgatgctcctgtggtccaggagccccggaggctctcctttcggtccaccatctatggctctcggctgcggattagaaacctcgacaccacagacacaggctacttccagtgcgtggcaacaaacggcaaggaggtggtttcttccactggagtcttgtttgtcaagtttggcccccctcccactgcaagtccaggatactcagatgagtatgaagaagatggattctgtcagccatacagagggattgcatgtgcaagatttattggcaaccgcaccgtctatatggagtctttgcacatgcaaggggaaatagaaaatcagatcacagctgccttcactatgattggcacttccagtcacttatctgataagtgttctcagttcgccattccttccctgtgccactatgccttcccgtactgcgatgaaacttcatccgtcccaaagccccgtgacttgtgtcgcgatgaatgtgaaatcctggagaatgtcctgtgtcaaacagagtacatttttgcaagatcaaatcccatgattctgatgaggctgaaactgccaaactgtgaagatctcccccagccagagagcccagaagctgcgaactgtatccggattggaattcccatggcagatcctataaataaaaatcacaagtgttataacagcacaggtgtggactaccgggggaccgtcagtgtgaccaaatcagggcgccagtgccagccatggaattcccagtatccccacacacacactttcaccgcccttcgtttcccagagctgaatggaggccattcctactgccgcaacccagggaatcaaaaggaagctccctggtgcttcaccttggatgaaaactttaagtctgatctgtgtgacatcccagcgtgcgattcaaaggattccaaggagaagaataaaatggaaatcctgtacatactagtgccaagtgtggccattcccctggccattgctttactcttcttcttcatttgcgtctgtcggaataaccagaagtcatcgtcggcaccagtccagaggcaaccaaaacacgtcagaggtcaaaatgtagagatgtcaatgctgaatgcatataaacccaagagcaaggctaaagagctacctctttctgctgtacgctttatggaagaattgggtgagtgtgcctttggaaaaatctataaaggccatctctatctcccaggcatggaccatgctcagctggttgctatcaagaccttgaaagactataacaacccccagcaatggacggaatttcaacaagaagcctccctaatggcagaactgcaccaccccaatattgtctgccttctaggtgccgtcactcaggaacaacctgtgtgcatgctttttgagtatattaatcagggggatctccatgagttcctcatcatgagatccccacactctgatgttggctgcagcagtgatgaagatgggactgtgaaatccagcctggaccacggagattttctgcacattgcaattcagattgcagctggcatggaatacctgtctagtcacttctttgtccacaaggaccttgcagctcgcaatattttaatcggagagcaacttcatgtaaagatttcagacttggggctttccagagaaatttactccgctgattactacagggtccagagtaagtccttgctgcccattcgctggatgccccctgaagccatcatgtatggcaaattctcttctgattcagatatctggtcctttggggttgtcttgtgggagattttcagttttggactccagccatattatggattcagtaaccaggaagtgattgagatggtgagaaaacggcagctcttaccatgctctgaagactgcccacccagaatgtacagcctcatgacagagtgctggaatgagattccttctaggagaccaagatttaaagatattcacgtccggcttcggtcctgggagggactctcaagtcacacaagctctactactccttcagggggaaatgccaccacacagacaacctccctcagtgccagcccagtgagtaatctcagtaaccccagatatcctaattacatgttcccgagccagggtattacaccacagggccagattgctggtttcattggcccgccaatacctcagaaccagcgattcattcccatcaatggatacccaatacctcctggatatgcagcgtttccagctgcccactaccagccaacaggtcctcccagagtgattcagcactgcccacctcccaagagtcggtccccaagcagtgccagtgggtcgactagcactggccatgtgactagcttgccctcatcaggatccaatcaggaagcaaatattcctttactaccacacatgtcaattccaaatcatcctggtggaatgggtatcaccgtttttggcaacaaatctcaaaaaccctacaaaattgactcaaagcaagcatctttactaggagacgccaatattcatggacacaccgaatctatgatttctgcagaactgtaaaatgcacaacttttgtaaatgtggtatacaggacaaactagacggccgtagaaaagatttatattcaaatgtttttattaaagtaaggttctcatttagcagacatcgcaacaagtaccttctgtgaagtttcactgtgtcttaccaagcaggacagacactcggccagaaaaaaaaaaaaaaaaaaaaaacaagcaaacaaaaacattgtgggatgtgcactccattggagtgcatgacatggcattgggattggaacatgtggtttcgagcactgaaagctgcaaaccagtgaagaggaaaagaaccttgtgattaaatataaaaccaaaagtcaaatggtgctttgtgttttagccttcagtcaccatgactggtctctcccccagatgtatatataccatagcatttgtctacctgctgtcttttcttcaggacagatgttcaggaattatattgattgaatttagactctgtgcatgttcttatggaaatgatgttcagaatccatgaagaaacttcaggccaaatttgaaaccctggagggaaatgagccataagggaagtataacaagccctgaagccttttatgtcgttgtgcttctttgggaaggtgtagagtgtgcctttttgtgaatcctcctctgatcatgagggtctttcccacagtttctcacagtgtgtttacactgcccttggaataacacagcgcatcagaccataagaaggctagatgtggatgctagaattgattgttggttgatagttctctttgctggattaggaatgaggcgccaaaggaagcacagccaggaaaatggccccacagcctagatcagcatctgtgggaaaggaaaaagggttcccatggggacagcccccataggagttttctggaaccagtaacactgaaaaataagtgtgtggctacagatgagcacgcccaccccttgcaactccctgtttacaagttgtccgaggcattggagtgcttatggtcaatgggctctagggaagtaggaaactccatcatgatacaaatgtctagtaattttaaagtttctttccctttttttctgtgctggaaatgttcacagatttgattcccgccccaagaattacaacaatgtattcatacagtcagttggaatccaaaggcaattaattctattttgcaaaatatgatggtcttcctaaaaaacaagtactgagttctcatttcaaaagttaccaagaactgaattctttaaactagcaaaccgaagtaacatgaccatttttgccttagtgggaggtttcaaatgtgcagctcatggcatttacctgccgaccatcttttgccaagtttagaattcttatgcgtttcaagttctatatagaaagtaattttacttttgatttttctcttgttaaaaaaaaactcctttattctaagaacaatgtctcaaagtctcatttttactttaaaggtataagagacttctaaagagacttacgggatataaaagtaattcctggaaatgatatttgatgaggagaatgtaagagaatgaaaaacacattgatgttttcatttttaaaaaatacaactagcatgagaaatcaagaaaatatgtttaccaaaatgcattgcaattttcccaaacctgagtcttcaaataacaaacatgaacttataggtactgtgaactagaagaattggttatatccagatttctgggagataaattaaaacatatttttgtggcataaataagctgattcagaagttacatttcttaactttaggtagaggagaatatttgtatccttttgttgctatgcaactgtttaatgatgaagcttcaaaccacaattttgtatatcatatgacaatcaattgttttccaagaatatttattattttaagtacacaatttcagtgaatcttgagtttttctaggagtcccttaaagggaaattagcattccatgagccagtaaaatacctactctggtaaaacattattatggttaaaaagtaaattcaagttagttttttataaagaactataacatttattttaaacattttataataactgaaaacattaaagtgagcaaatgaaatttcaaaaccacttgtaataatgtattttataatcgcactgtgatactatataacacagtctcttttgtattaaaatagtatttttttcacaagctgaaaaatatcttttcctttgttgacaatgttttgtaagatgactttattttcagatctttttctccttttttgcacaaaactatgcttatggtttgtgtcacagaagtgaaaatatatctttgcatttttatatctggtctgtttttcttgtttcctttgtttttaacttgatatagattttcttcaaatatataatggcaattttcagatatctcaccttaccatatctttccttattttcactgcatgcatttaatcactgtattacttaatgtttgatttgttattatgggcatttcaaataggcaagcattgaattgtaatgacaaaaaggctattttatattaaggatatatgcatttgtatttcacacaccagagatgatattaaacactgattattttatgctgctgtttattaaaaatgtttactataaaa

SEQ ID NO: 25701 - DNA, 2305 bp, Homo sapiens
  source 1..2305: mol_type = unassigned DNA
gagcgagagagggagcgtggagagctggagcagccgccaccgccgccgccgagggagccccgggacggcagcccctgggcgcagggtgcgctgttctcggagtccgacccagggcgactcacgcccactggtgcgacccggacagcctgggactgacccgccggcccaggcgaggctgcagccagagggctgggaagggatcgcgctcgcggcatccagaggcggccaggcggaggcgagggagcaggttagagggacaaagagctttgcagacgtccccggcgtcctgcgagcgccagcggccgggacgaggcggccgggagcccgggaagagcccgtggatgttctgcgcgcggcctgggagccgccgccgccgccgcctcagcgagaggaggaatgcaccggccgcgccgccgcgggacgcgcccgccgctcctggcgctgctggccgcgctgctgctggccgcacgcggggctgctgcccaagaaacagagctgtcagtcagtgctgaattagtgcctacctcatcatggaacatctcaagtgaactcaacaaagattcttacctgaccctcgatgaaccaatgaataacatcaccacgtctctgggccagacagcagaactgcactgcaaagtctctgggaatccacctcccaccatccgctggttcaaaaatgatgctcctgtggtccaggagccccggaggctctcctttcggtccaccatctatggctctcggctgcggattagaaacctcgacaccacagacacaggctacttccagtgcgtggcaacaaacggcaaggaggtggtttcttccactggagtcttgtttgtcaagtttggcccccctcccactgcaagtccaggatactcagatgagtatgaagaagatggattctgtcagccatacagagggattgcatgtgcaagatttattggcaaccgcaccgtctatatggagtctttgcacatgcaaggggaaatagaaaatcagatcacagctgccttcactatgattggcacttccagtcacttatctgataagtgttctcagttcgccattccttccctgtgccactatgccttcccgtactgcgatgaaacttcatccgtcccaaagccccgtgacttgtgtcgcgatgaatgtgaaatcctggagaatgtcctgtgtcaaacagagtacatttttgcaagatcaaatcccatgattctgatgaggctgaaactgccaaactgtgaagatctcccccagccagagagcccagaagctgcgaactgtatccggattggaattcccatggcagatcctataaataaaaatcacaagtgttataacagcacaggtgtggactaccgggggaccgtcagtgtgaccaaatcagggcgccagtgccagccatggaattcccagtatccccacacacacactttcaccgcccttcgtttcccagagctgaatggaggccattcctactgccgcaacccagggaatcaaaaggaagctccctggtgcttcaccttggatgaaaactttaagtctgatctgtgtgacatcccagcgtgcggtaaatagaagtcattgcccctaatgtattcaatcatctttaaagatccctatcctacccctcttatttaggagaatcctataaggggggcaaagaaaatggacagtatttgcttgatctcaatctggttttagggtaaaccttgccgtttctacataaaacacctcgtaaggtaccaaaacacgttctcaagaagtcaactgcctttatacctgcagccattgcactcatggatgtaacagggacccagcccttcagaggcacagttgagacagtttatcacattgatttttatagaaaaagatgttacccagaatggtctgcgtccaagtggaccttttcagcaaaaaaaggaatattggaagcaggaagaaattgttttctgtatgccttaagaacaccacaaggcaggatgaatctacaaccattactcggtcatccaggacaatctgtgggtaaactgtgtccttcgttatgtctgttaatactgcagaagaagcatataggtatctagtaagaaaatggaattcctgagtcagttaactgttcctttttctagaaaatgtttggagaaaataatgaaaatgggccaagcatggtggcttatacctgtaatcccaacactctaggaaggccgaggcaggaggatcatttgagcccaggggttcaagaccagcccaggcaacatagtgagactccatctctaccaaaaaaaagaaaaaaaaaaaaagaaaa

SEQ ID NO: 25702 - DNA, 2823 bp, Homo sapiens
  source 1..2823: mol_type = unassigned DNA
agagcccgtggatgttctgcgcgccgccgcgggacgcgcccgccgctcctggcgctgctggccgcgctgctgctggccgcacgcggggctgctgcccaagaaacagagctgtcagtcagtgctgaattagtgcctacctcatcatggaacatctcaagtgaactcaacaaagattcttacctgaccctcgatgaaccaatgaataacatcaccacgtctctgggccagacagcagaactgcactgcaaagtctctgggaatccacctcccaccatccgctggttcaaaaatgatgctcctgtggtccaggagccccggaggctctcctttcggtccaccatctatggctctcggctgcggattagaaacctcgacaccacagacacaggctacttccagtgcgtggcaacaaacggcaaggaggtggtttcttccactggagtcttgtttgtcaagtttggcccccctcccactgcaagtccaggatactcagatgagtatgaagaagatggattctgtcagccatacagagggattgcatgtgcaagatttattggcaaccgcaccgtctatatggagtctttgcacatgcaaggggaaatagaaaatcagatcacagctgccttcactatgattggcacttccagtcacttatctgataagtgttctcagttcgccattccttccctgtgccactatgccttcccgtactgcgatgaaacttcatccgtcccaaagccccgtgacttgtgtcgcgatgaatgtgaaatcctggagaatgtcctgtgtcaaacagagtacatttttgcaagatcaaatcccatgattctgatgaggctgaaactgccaaactgtgaagatctcccccagccagagagcccagaagctgcgaactgtatccggattggaattcccatggcagatcctataaataaaaatcacaagtgttataacagcacaggtgtggactaccgggggaccgtcagtgtgaccaaatcagggcgccagtgccagccatggaattcccagtatccccacacacacactttcaccgcccttcgtttcccagagctgaatggaggccattcctactgccgcaacccagggaatcaaaaggaagctccctggtgcttcaccttggatgaaaactttaagtctgatctgtgtgacatcccagcgtgcgattcaaaggattccaaggagaagaataaaatggaaatcctgtacatactagtgccaagtgtggccattcccctggccattgctttactcttcttcttcatttgcgtctgtcggaataaccagaagtcatcgtcggcaccagtccagaggcaaccaaaacacgtcagaggtcaaaatgtagagatgtcaatgctgaatgcatataaacccaagagcaaggctaaagagctacctctttctgctgtacgctttatggaagaattgggtgagtgtgcctttggaaaaatctataaaggccatctctatctcccaggcatggaccatgctcagctggttgctatcaagaccttgaaagactataacaacccccagcaatggacggaatttcaacaagaagcctccctaatggcagaactgcaccaccccaatattgtctgccttctaggtgccgtcactcaggaacaacctgtgtgcatgctttttgagtatattaatcagggggatctccatgagttcctcatcatgagatccccacactctgatgttggctgcagcagtgatgaagatgggactgtgaaatccagcctggaccacggagattttctgcacattgcaattcagattgcagctggcatggaatacctgtctagtcacttctttgtccacaaggaccttgcagctcgcaatattttaatcggagagcaacttcatgtaaagatttcagacttggggctttccagagaaatttactccgctgattactacagggtccagagtaagtccttgctgcccattcgctggatgccccctgaagccatcatgtatggcaaattctcttctgattcagatatctggtcctttggggttgtcttgtgggagattttcagttttggactccagccatattatggattcagtaaccaggaagtgattgagatggtgagaaaacggcagctcttaccatgctctgaagactgcccacccagaatgtacagcctcatgacagagtgctggaatgagattccttctaggagaccaagatttaaagatattcacgtccggcttcggtcctgggagggactctcaagtcacacaagctctactactccttcagggggaaatgccaccacacagacaacctccctcagtgccagcccagtgagtaatctcagtaaccccagatatcctaattacatgttcccgagccagggtattacaccacagggccagattgctggtttcattggcccgccaatacctcagaaccagcgattcattcccatcaatggatacccaatacctcctggatatgcagcgtttccagctgcccactaccagccaacaggtcctcccagagtgattcagcactgcccacctcccaagagtcggtccccaagcagtgccagtgggtcgactagcactggccatgtgactagcttgccctcatcaggatccaatcaggaagcaaatattcctttactaccacacatgtcaattccaaatcatcctggtggaatgggtatcaccgtttttggcaacaaatctcaaaaaccctacaaaattgactcaaagcaagcatctttactaggagacgccaatattcatggacacaccgaatctatgatttctgcagaactgtaa

SEQ ID NO: 25703 - DNA, 2624 bp, Homo sapiens
  source 1..2624: mol_type = unassigned DNA
gctgaccctggtctgaagctcatttgaccaaactgagcaagaagtgcacaagtttcttgcatttccttccagacctctagtagccctgacacacatcctggactaatcaagactatgtgaaacagatgagtatgaagaagatggattctgtcagccatacagagggattgcatgtgcaagatttattggcaaccgcaccgtctatatggagtctttgcacatgcaaggggaaatagaaaatcagatcacagctgccttcactatgattggcacttccagtcacttatctgataagtgttctcagttcgccattccttccctgtgccactatgccttcccgtactgcgatgaaacttcatccgtcccaaagccccgtgacttgtgtcgcgatgaatgtgaaatcctggagaatgtcctgtgtcaaacagagtacatttttgcaagatcaaatcccatgattctgatgaggctgaaactgccaaactgtgaagatctcccccagccagagagcccagaagctgcgaactgtatccggattggaattcccatggcagatcctataaataaaaatcacaagtgttataacagcacaggtgtggactaccgggggaccgtcagtgtgaccaaatcagggcgccagtgccagccatggaattcccagtatccccacacacacactttcaccgcccttcgtttcccagagctgaatggaggccattcctactgccgcaacccagggaatcaaaaggaagctccctggtgcttcaccttggatgaaaactttaagtctgatctgtgtgacatcccagcgtgcgattcaaaggattccaaggagaagaataaaatggaaatcctgtacatactagtgccaagtgtggccattcccctggccattgctttactcttcttcttcatttgcgtctgtcggaataaccagaagtcatcgtcggcaccagtccagaggcaaccaaaacacgtcagaggtcaaaatgtagagatgtcaatgctgaatgcatataaacccaagagcaaggctaaagagctacctctttctgctgtacgctttatggaagaattgggtgagtgtgcctttggaaaaatctataaaggccatctctatctcccaggcatggaccatgctcagctggttgctatcaagaccttgaaagactataacaacccccagcaatggacggaatttcaacaagaagcctccctaatggcagaactgcaccaccccaatattgtctgccttctaggtgccgtcactcaggaacaacctgtgtgcatgctttttgagtatattaatcagggggatctccatgagttcctcatcatgagatccccacactctgatgttggctgcagcagtgatgaagatgggactgtgaaatccagcctggaccacggagattttctgcacattgcaattcagattgcagctggcatggaatacctgtctagtcacttctttgtccacaaggaccttgcagctcgcaatattttaatcggagagcaacttcatgtaaagatttcagacttggggctttccagagaaatttactccgctgattactacagggtccagagtaagtccttgctgcccattcgctggatgccccctgaagccatcatgtatggcaaattctcttctgattcagatatctggtcctttggggttgtcttgtgggagattttcagttttggactccagccatattatggattcagtaaccaggaagtgattgagatggtgagaaaacggcagctcttaccatgctctgaagactgcccacccagaatgtacagcctcatgacagagtgctggaatgagattccttctaggagaccaagatttaaagatattcacgtccggcttcggtcctgggagggactctcaagtcacacaagctctactactccttcagggggaaatgccaccacacagacaacctccctcagtgccagcccagtgagtaatctcagtaaccccagatatcctaattacatgttcccgagccagggtattacaccacagggccagattgctggtttcattggcccgccaatacctcagaaccagcgattcattcccatcaatggatacccaatacctcctggatatgcagcgtttccagctgcccactaccagccaacaggtcctcccagagtgattcagcactgcccacctcccaagagtcggtccccaagcagtgccagtgggtcgactagcactggccatgtgactagcttgccctcatcaggatccaatcaggaagcaaatattcctttactaccacacatgtcaattccaaatcatcctggtggaatgggtatcaccgtttttggcaacaaatctcaaaaaccctacaaaattgactcaaagcaagcatctttactaggagacgccaatattcatggacacaccgaatctatgatttctgcagaactgtaaaatgcacaacttttgtaaatgtggtatacaggacaaactagacggccgtagaaaagatttatattcaaatgtttttattaaagtaaggttctcatttagcagacatcgcaacaagtaccttctgtgaagtttcactgtgtcttaccaagcaggacagacactcggccag

SEQ ID NO: 25704 - DNA, 4096 bp, Homo sapiens
  source 1..4096: mol_type = unassigned DNA
agccagcccttgccgtggccggagccgagcggcgcatccgggccggagaagaggacgacgacgaggtcctcgaagtggacccgtttgcgaagcgccagggagaaggaggagcggacgcatcgtagaaaggggtggtggcgcccgaccccgcgccccggcccgaagctctgagggcttcccggcccccactgcctgcggcatggcccggggctcggcgctcccgcggcggccgctgctgtgcatcccggccgtctgggcggccgccgcgcttctgctctcagtgtcccggacttcaggtgaagtggaggttctggatccgaacgaccctttaggaccccttgatgggcaggacggcccgattccaactctgaaaggttactttctgaattttctggagccagtaaacaatatcaccattgtccaaggccagacggcaattctgcactgcaaggtggcaggaaacccaccccctaacgtgcggtggctaaagaatgatgccccggtggtgcaggagccgcggcggatcatcatccggaagacagaatatggttcacgactgcgaatccaggacctggacacgacagacactggctactaccagtgcgtggccaccaacgggatgaagaccattaccgccactggcgtcctgtttgtgcggctgggtccaacgcacagcccaaatcataactttcaggatgattaccacgaggatgggttctgccagccttaccggggaattgcctgtgcacgcttcattggcaaccggaccatttatgtggactcgcttcagatgcagggggagattgaaaaccgaatcacagcggccttcaccatgatcggcacgtctacgcacctgtcggaccagtgctcacagttcgccatcccatccttctgccacttcgtgtttcctctgtgcgacgcgcgctcccggacacccaagccgcgtgagctgtgccgcgacgagtgcgaggtgctggagagcgacctgtgccgccaggagtacaccatcgcccgctccaacccgctcatcctcatgcggcttcagctgcccaagtgtgaggcgctgcccatgcctgagagccccgacgctgccaactgcatgcgcattggcatcccagccgagaggctgggccgctaccatcagtgctataacggctcaggcatggattacagaggaacggcaagcaccaccaagtcaggccaccagtgccagccgtgggccctgcagcacccccacagccaccacctgtccagcacagacttccctgagcttggaggggggcacgcctactgccggaaccccggaggccagatggagggcccctggtgctttacgcagaataaaaacgtacgcatggaactgtgtgacgtaccctcgtgtagtccccgagacagcagcaagatggggattctgtacatcttggtccccagcatcgcaattccactggtcatcgcttgccttttcttcttggtttgcatgtgccggaataagcagaaggcatctgcgtccacaccgcagcggcgacagctgatggcctcgcccagccaagacatggaaatgcccctcattaaccagcacaaacaggccaaactcaaagagatcagcctgtctgcggtgaggttcatggaggagctgggagaggaccggtttgggaaagtctacaaaggtcacctgttcggccctgccccgggggagcagacccaggctgtggccatcaaaacgctgaaggacaaagcggaggggcccctgcgggaggagttccggcatgaggctatgctgcgagcacggctgcaacaccccaacgtcgtctgcctgctgggcgtggtgaccaaggaccagcccctgagcatgatcttcagctactgttcgcacggcgacctccacgaattcctggtcatgcgctcgccgcactcggacgtgggcagcaccgatgatgaccgcacggtgaagtccgccctggagccccccgacttcgtgcaccttgtggcacagatcgcggcggggatggagtacctatccagccaccacgtggttcacaaggacctggccacccgcaatgtgctagtgtacgacaagctgaacgtgaagatctcagacttgggcctcttccgagaggtgtatgccgccgattactacaagctgctggggaactcgctgctgcctatccgctggatggccccagaggccatcatgtacggcaagttctccatcgactcagacatctggtcctacggtgtggtcctgtgggaggtcttcagctacggcctgcagccctactgcgggtactccaaccaggatgtggtggagatgatccggaaccggcaggtgctgccttgccccgatgactgtcccgcctgggtgtatgccctcatgatcgagtgctggaacgagttccccagccggcggccccgcttcaaggacatccacagccggctccgagcctggggcaacctttccaactacaacagctcggcgcagacctcgggggccagcaacaccacgcagaccagctccctgagcaccagcccagtgagcaatgtgagcaacgcccgctacgtggggcccaagcagaaggccccgcccttcccacagccccagttcatccccatgaagggccagatcagacccatggtgcccccgccgcagctctacgtccccgtcaacggctaccagccggtgccggcctatggggcctacctgcccaacttctacccggtgcagatcccaatgcagatggccccgcagcaggtgcctcctcagatggtccccaagcccagctcacaccacagtggcagtggctccaccagcacaggctacgtcaccacggccccctccaacacatccatggcagacagggcagccctgctctcagagggcgctgatgacacacagaacgccccagaagatggggcccagagcaccgtgcaggaagcagaggaggaggaggaaggctctgtcccagagactgagctgctgggggactgtgacactctgcaggtggacgaggcccaagtccagctggaagcttgagtggcaccagggcccggggttcggggatagaagccccgccgagaccccacagggacctcagtcacctttgagaagacaccatactcagcaatcacaagagcccgccggccagtgggcttgtttgcagactgggtgaggtggagccctgctcctctctgtcctctgacacagagagctgccctgcctaggagcacccaagccaggcagggggtctggcagcacggcgtcctggggagcaggacacatggtcatccccagggctgtatacattgattctggtggtagactggtagtgagcagcaaatgcctttcaagaaaataggtggcagcttcactccatgtcatatatggagtgaatatttcaaaacgttgggaataagggcctgcaaaaggcagcgaggaggcacctcgggtcttgaggttcctgacaaccgatctggtctgttggtttgaggatgaaggggctccatttctgctgcctccctgctgagaatattctccctttagcagccaaagattcgctggaacggaggctgccctctgctgcctgttggggtcggaagacaaggggcttctgaaatgggagttcctgagatacaacaaaatgtgtgccttcaaagaaactgacagctttgtatttggtgaaatggttttaattatactccatgtgtattttgcccactttttttgggaattcaagggaaagtgtttcttgggtttggaatgttcagaggaagcagtattgtacagaacacggtattgttatttttgttaagaatcatgtacagagcttaaatgtaatttatatgtttttaatatgccattttcattgaagtattttggtcttaagatgactttagtaatttaactgtttatgttacccacgttgggatccagttggtcttggtttgcttctctctgtaccacgtgcacatgaggtccattcattttacagcccctgttacacacagacccacaggcagccgtctgtgccccgcacacattgttggtcctatttgtaaatcccacacccggtgtatccaataaagtgaaacaaagcatgtg

SEQ ID NO: 25705 - DNA, 1671 bp, Homo sapiens
  source 1..1671: mol_type = unassigned DNA
cccaactggcagcgacagctgcagacgggctgaaccagctttgttcccagggtggcgcctgctctccatccaggccccattccggctcccacccgacgctgcttttgttcccacgtttcggggggcagctggcactgtgattcctgccccatgagtgcctagaggcacggagccaccagggatcaccccacgtgggacacagggcttggggaggatggggcaggaccagaccaagcagcagatcgagaaggggctccagctgtaccagtccaaccagacagagaaggcattgcaggtgtggacaaaggtgctggagaagagctcggacctcatggggcgcttccgcgtgctgggctgcctggtcacagcccactcggagatgggccgctacaaggagatgctgaagttcgctgtggtccagatcgacacggcccgggagctggaggatgccgacttcctcctggagagctacctgaacctggcacgcagcaacgagaagctgtgcgagtttcacaagaccatctcctactgcaagacctgccttgggctgcctggtaccagggcaggtgcccagctcggaggccaggtcagcctgagcatgggcaatgccttcctgggcctcagcgtcttccagaaggccctggagagcttcgagaaggccctgcgctatgcccacaacaatgatgacgccatgctcgagtgccgcgtgtgctgcagcctgggcagcttctatgcccaggtcaaggactacgagaaagccctgttcttcccctgcaaggcggcagagcttgtcaacaactatggcaaaggctggagcctgaagtaccgggccatgagccagtaccacatggccgtggcctatcgcctgctgggccgcctgggcagtgccatggagtgttgtgaggagtctatgaagatcgcgctgcagcacggggaccggccactgcaggcgctctgcctgctctgcttcgctgacatccaccggagccgtggggacctggagacagccttccccaggtacgactccgccatgagcatcatgaccgagatcggaaaccgcctggggcaggtgcaggcgctgctgggtgtggccaagtgctgggtggccaggaaggcgctggacaaggctctggatgccatcgagagagcccaggatctggccgaggaggtggggaacaagctgagccagctcaagctgcactgtctgagcgagagcatttaccgcagcaaagggctgcagcgggaactgcgggcgcacgttgtgaggttccacgagtgcgtggaggagacggagctctactgcggcctgtgcggcgagtccataggcgagaagaacagccggctgcaggccctaccttgctcccacatcttccacctcaggtgcctgcagaacaacgggacccggagctgtcccaactgccgccgctcatccatgaagcctggctttgtatgactcctggcagcaggcgtgggcttcctcctcgccactcctgctctttctccactgcacgccagaggcccatttactcctggggcagctgccaggtcgtcctcaccatagccaaggccttggggcctgcccagggctgctcccctgggcccagctcccctccctgcctctttgtactttgctctttatagaaaaataaactgtttgtacctggtcccagg

SEQ ID NO: 25706 - DNA, 1452 bp, Homo sapiens
  source 1..1452: mol_type = unassigned DNA
cagctttgttcccagggtggcgcctgctctccatccaggccccattccggctcccacccgacgctgcttttgttcccacgtttcggggggcagctggcactgtgattcctgccccatgagtgcctagaggcacggagccaccagggatcaccccacgtgggacacagggcttggggaggatggggcaggaccagaccaagcagcagatcgagaaggggctccagctgtaccagtccaaccagacagagaaggcattgcaggtgtggacaaaggtgctggagaagagctcggacctcatggggcgcttccgcgtgctgggctgcctggtcacagcccactcggagatgggccgctacaaggagatgctgaagttcgctgtggtccagatcgacacggcccgggagctggaggatgccgacttcctcctggagagctacctgaacctggcacgcagcaacgagaagctgtgcgagtttcacaagaccatctcctactgcaagacctgccttgggctgcctggtaccagggcaggtgcccagctcggaggccaggtcagcctgagcatgggcaatgccttcctgggcctcagcgtcttccagaaggccctggagagcttcgagaaggccctgcgctatgcccacaacaatgatgacgccatgctcgagtgccgcgtgtgctgcagcctgggcagcttctatgcccaggtcaaggactacgagaaagccctgttcttcccctgcaaggcggcagagcttgtcaacaactatggcaaaggctggagcctgaagtaccgggccatgagccagtaccacatggccgtggcctatcgcctgctgggccgcctgggcagtgccatggagtgttgtgaggagtctatgaagatcgcgctgcagcacggggaccggccactgcaggcgctctgcctgctctgcttcgctgacatccaccggagccgtggggacctggagctgagccagctcaagctgcactgtctgagcgagagcatttaccgcagcaaagggctgcagcgggaactgcgggcgcacgttgtgaggttccacgagtgcgtggaggagacggagctctactgcggcctgtgcggcgagtccataggcgagaagaacagccggctgcaggccctaccttgctcccacatcttccacctcaggtgcctgcagaacaacgggacccggagctgtcccaactgccgccgctcatccatgaagcctggctttgtatgactcctggcagcaggcgtgggcttcctcctcgccactcctgctctttctccactgcacgccagaggcccatttactcctggggcagctgccaggtcgtcctcaccatagccaaggccttggggcctgcccagggctgctcccctgggcccagctcccctccctgcctctttgtactttgctctttatagaaaaataaactgtttgtacctgg

SEQ ID NO: 25707 - DNA, 1930 bp, Homo sapiens
  source 1..1930: mol_type = unassigned DNA
accccaggggcgggactgtagaggcgcctataagggaagttgttcagtcaactcggaaaaagggtaacaacccggaaagtagactcaccgtcttggtctagagactgacccctgcacagacagaccccttcccctctctgcgaaaggaccaagccccagaagtcactccatctcctacggctcgcaatttccagaggccccctggcaccttccagcctgatgtcgtgcgtcaagttatggcccagcggtgcccccgcccccttggtgtccatcgaggaactggagaaccaggagctcgtcggcaaaggcgggttcggcacagtgttccgggcgcaacataggaagtggggctacgatgtggcggtcaagatcgtaaactcgaaggcgatatccagggaggtcaaggccatggcaagtctggataacgaattcgtgctgcgcctagaaggggttatcgagaaggtgaactgggaccaagatcccaagccggctctggtgactaaattcatggagaacggctccttgtcggggctgctgcagtcccagtgccctcggccctggccgctcctttgccgcctgctgaaagaagtggtgcttgggatgttttacctgcacgaccagaacccggtgctcctgcaccgggacctcaagccatccaacgtcctgctggacccagagctgcacgtcaagctggcagattttggcctgtccacatttcagggaggctcacagtcagggacagggtccggggagccagggggcaccctgggctacttggccccagaactgtttgttaacgtaaaccggaaggcctccacagccagtgacgtctacagcttcgggatcctaatgtgggcagtgcttgctggaagagaagttgagttgccaaccgaaccatcactcgtgtacgaagcagtgtgcaacaggcagaaccggccttcattggctgagctgccccaagccgggcctgagactcccggcttagaaggactgaaggagctaatgcagctctgctggagcagtgagcccaaggacagaccctccttccaggaatgcctaccaaaaactgatgaagtcttccagatggtggagaacaatatgaatgctgctgtctccacggtaaaggatttcctgtctcagctcaggagcagcaataggagattttctatcccagagtcaggccaaggagggacagaaatggatggctttaggagaaccatagaaaaccagcactctcgtaatgatgtcatggtttctgagtggctaaacaaactgaatctagaggagcctcccagctctgttcctaaaaaatgcccgagccttaccaagaggagcagggcacaagaggagcaggttccacaagcctggacagcaggcacatcttcagattcgatggcccaacctccccagactccagagacctcaactttcagaaaccagatgcccagccctacctcaactggaacaccaagtcctggaccccgagggaatcagggggctgagagacaaggcatgaactggtcctgcaggaccccggagccaaatccagtaacagggcgaccgctcgttaacatatacaactgctctggggtgcaagttggagacaacaactacttgactatgcaacagacaactgccttgcccacatggggcttggcaccttcgggcaaggggaggggcttgcagcaccccccaccagtaggttcgcaagaaggccctaaagatcctgaagcctggagcaggccacagggttggtataatcatagcgggaaataaagcaccttccaagcttgcctccaagagttacgagttaaggaagagtgccaccccttgaggcccctgacttccttctagggcagtctggcctgcccacaaactgactttgtgacctgtcccccaggagtcaataaacatgatggaatgctagtca

SEQ ID NO: 25708 - DNA, 2054 bp, Homo sapiens
  source 1..2054: mol_type = unassigned DNA
gtaacagggcggagcgcgcacctgggcacctgggcagccgccgcggcgctggctagacgtgcgcgatggagggcgacggcgggaccccatgggccctggcgctgctgcgcaccttcgacgcgggcgagttcacgggctgggagaaggtgggctcgggcggcttcgggcaggtgtacaaggtgcgccatgtccactggaagacctggctggccatcaagtgctcgcccagcctgcacgtcgacgacagggagcgcatggagcttttggaagaagccaagaagatggagatggccaagtttcgctacatcctgcctgtgtatggcatctgccgcgaacctgtcggcctggtcatggagtacatggagacgggctccctggaaaagctgctggcttcggagccattgccatgggatctccggttccgaatcatccacgagacggcggtgggcatgaacttcctgcactgcatggccccgccactcctgcacctggacctcaagcccgcgaacatcctgctggatgcccactaccacgtcaagatttctgattttggtctggccaagtgcaacgggctgtcccactcgcatgacctcagcatggatggcctgtttggcacaatcgcctacctccctccagagcgcatcagggagaagagccggctcttcgacaccaagcacgatgtatacagctttgcgatcgtcatctggggcgtgctcacacagaagaagccgtttgcagatgagaagaacatcctgcacatcatggtgaaggtggtgaagggccaccgccccgagctgccgcccgtgtgcagagcccggccgcgcgcctgcagccacctgatacgcctcatgcagcggtgctggcagggggatccgcgagttaggcccaccttccaagaaattacttctgaaaccgaggacctgtgtgaaaagcctgatgacgaagtgaaagaaactgctcatgatctggacgtgaaaagccccccggagcccaggagcgaggtggtgcctgcgaggctcaagcgggcctctgcccccaccttcgataacgactacagcctctccgagctgctctcacagctggactctggagtttcccaggctgtcgagggccccgaggagctcagccgcagctcctctgagtccaagctgccatcgtccggcagtgggaagaggctctcgggggtgtcctcggtggactccgccttctcttccagaggatcactgtcgctgtcctttgagcgggaaccttcaaccagcgatctgggcaccacagacgtccagaagaagaagcttgtggatgccatcgtgtccggggacaccagcaaactgatgaagatcctgcagccgcaggacgtggacctggcactggacagcggtgccagcctgctgcacctggcggtggaggccgggcaagaggagtgcgccaagtggctgctgctcaacaatgccaaccccaacctgagcaaccgtaggggctccaccccgttgcacatggccgtggagaggagggtgcggggtgtcgtggagctcctgctggcgcggaagatcagtgtcaacgccaaggatgaggaccagtggacagccctccactttgcagcccagaacggggacgagtctagcacacggctgctgttggagaagaacgcctcggtcaacgaggtggactttgagggccggacgcccatgcacgtggcctgccagcacgggcaggagaatatcgtgcgcatcctgctgcgccgaggcgtggacgtgagcctgcagggcaaggatgcctggcactgcactacgctggcagggccacctgcccatcgtcaagctgctggccaagcagccgggggtgagtgtgaacgcccagacgctggatgggaggacgccattgcacctggccgcacagcgcgggcactaccgcgtggcccgcatcctcatcgacctgtgctccgacgtcaacgtctgcagcctgctggcacagacacccctgcacgtccgcggagacggggcacacgagcactgccaggctgctcctgcatcggggcgctggcaaggaggccatga

SEQ ID NO: 25709 - DNA, 3889 bp, Homo sapiens
  source 1..3889: mol_type = unassigned DNA
gtaacagggcggagcgcgcacctgggcacctgggcagccgccgcggcgctggctagacgtgcgcgatggagggcgacggcgggaccccatgggccctggcgctgctgcgcaccttcgacgcgggcgagttcacgggctgggagaaggtgggctcgggcggcttcgggcaggtgtacaaggtgcgccatgtccactggaagacctggctggccatcaagtgctcgcccagcctgcacgtcgacgacagggagcgcatggagcttttggaagaagccaagaagatggagatggccaagtttcgctacatcctgcctgtgtatggcatctgccgcgaacctgtcggcctggtcatggagtacatggagacgggctccctggaaaagctgctggcttcggagccattgccatgggatctccggttccgaatcatccacgagacggcggtgggcatgaacttcctgcactgcatggccccgccactcctgcacctggacctcaagcccgcgaacatcctgctggatgcccactaccacgtcaagatttctgattttggtctggccaagtgcaacgggctgtcccactcgcatgacctcagcatggatggcctgtttggcacaatcgcctacctccctccagagcgcatcagggagaagagccggctcttcgacaccaagcacgatgtatacagctttgcgatcgtcatctggggcgtgctcacacagaagaagccgtttgcagatgagaagaacatcctgcacatcatggtgaaggtggtgaagggccaccgccccgagctgccgcccgtgtgcagagcccggccgcgcgcctgcagccacctgatacgcctcatgcagcggtgctggcagggggatccgcgagttaggcccaccttccaagaaattacttctgaaaccgaggacctgtgtgaaaagcctgatgacgaagtgaaagaaactgctcatgatctggacgtgaaaagccccccggagcccaggagcgaggtggtgcctgcgaggctcaagcgggcctctgcccccaccttcgataacgactacagcctctccgagctgctctcacagctggactctggagtttcccaggctgtcgagggccccgaggagctcagccgcagctcctctgagtccaagctgccatcgtccggcagtgggaagaggctctcgggggtgtcctcggtggactccgccttctcttccagaggatcactgtcgctgtcctttgagcgggaaccttcaaccagcgatctgggcaccacagacgtccagaagaagaagcttgtggatgccatcgtgtccggggacaccagcaaactgatgaagatcctgcagccgcaggacgtggacctggcactggacagcggtgccagcctgctgcacctggcggtggaggccgggcaagaggagtgcgccaagtggctgctgctcaacaatgccaaccccaacctgagcaaccgtaggggctccaccccgttgcacatggccgtggagaggagggtgcggggtgtcgtggagctcctgctggcgcggaagatcagtgtcaacgccaaggatgaggaccagtggacagccctccactttgcagcccagaacggggacgagtctagcacacggctgctgttggagaagaacgcctcggtcaacgaggtggactttgagggccggacgcccatgcacgtggcctgccagcacgggcaggagaatatcgtgcgcatcctgctgcgccgaggcgtggacgtgagcctgcagggcaaggatgcctggctgccactgcactacgctgcctggcagggccacctgcccatcgtcaagctgctggccaagcagccgggggtgagtgtgaacgcccagacgctggatgggaggacgccattgcacctggccgcacagcgcgggcactaccgcgtggcccgcatcctcatcgacctgtgctccgacgtcaacgtctgcagcctgctggcacagacacccctgcacgtggccgcggagacggggcacacgagcactgccaggctgctcctgcatcggggcgctggcaaggaggccatgacctcagacggctacaccgctctgcacctggctgcccgcaacggacacctggccactgtcaagctgcttgtcgaggagaaggccgatgtgctggcccggggacccctgaaccagacggcgctgcacctggctgccgcccacgggcactcggaggtggtggaggagttggtcagcgccgatgtcattgacctgttcgacgagcaggggctcagcgcgctgcacctggccgcccagggccggcacgcacagacggtggagactctgctcaggcatggggcccacatcaacctgcagagcctcaagttccagggcggccatggccccgccgccacgctcctgcggcgaagcaagacctagctggctgcctgcggagaccgggggtccacgtggggctcttgtcctgtcctgtgttcctcgtggggatggaacgatcctgcgtggggccctgttgtggcttacctaaatgttaaccaagcagaggtgacatggtgccatcaggaggcggctgctgctgaccggagtgtcccctccaggtgaagctggctcaggtgcacatgcccgctccatcatcgatctaggcacctgctgtctgaagggaccgtgggtcagaatcatttcgttgtgctcctaatgggtcgctgaggctggtctctcagtgatgaagccccaggcgtggaagcatccactctctcctgaggcgagccaccttgggttgctggagctcaccagtcttgagggaggtgcaggggaaactgtgttttttatcttcatacatgacggtgggcagagaggcctgtcttaaagtttccatggaattgttttataaaatatcttaagagatgaataccttatcagctgttgcttgaaacctgttaaaaatgttcataacattggatagtctagtctctaaatgatgactaagtagtggggttggctttgaaaacaatgttttatgcaacaaggaacgaatggtagcagccagctttgcggggcgtatgtgtggccagctcttaaccattccagtctattacttgggtgagtccttgtggacaaccacacacacgtgcccacatggtactagctgccgttcgtttctcgttgcctaagatgttttggcaactctagagccacaggcctaagtcattaaaaaattctccctttgtaacctcagtgctggggactgaggcgagccccctcaggtcgctggagtgcaccagtcttggggaagaggtgcaggagaagctgtgttttttatctccacacgcagtatgaagataaaattacatagtattacctagacatagacagtattacctaggtagatgcactgctcacctgcgcccttcccagctctcatttttgttaggtgatttgggatagggatagtgttttggggtatggggggagtgtttctgacctgctttgcagacgtgcctccgcacctcagcagtttggggtgtggccccagggcggttcttggatgtaaaagatgtggccatctagcctcgtaacttcactgtcacctgtgtcccatagggtgccttctgaatactgttattagaataagtttgttgcagaacgtgaccctgcgtgcaaacatgtaccgtggcctggtatatgatagagattgatattaatgtaccatgtatgttaatgtgaatctgtgggcaggatacttttccatggcaggaaatatccaagctgttgaaactggctatgttttaatatgcctcattgtgcctttactgttgtgtggactgcgtgagggacaagaagttccatttgatgtcaataaagcaaagtacttgcctacttttttgaagctg

SEQ ID NO: 25710 - DNA, 4017 bp, Homo sapiens
  source 1..4017: mol_type = unassigned DNA
gtaacagggcggagcgcgcacctgggcacctgggcagccgccgcggcgctggctagacgtgcgcgatggagggcgacggcgggaccccatgggccctggcgctgctgcgcaccttcgacgcgggcgagttcacgggctgggagaaggtgggctcgggcggcttcgggcaggtgtacaaggtgcgccatgtccactggaagacctggctggccatcaagtgctcgcccagcctgcacgtcgacgacagggagcgcatggagcttttggaagaagccaagaagatggagatggccaagtttcgctacatcctgcctgtgtatggcatctgccgcgaacctgtcggcctggtcatggagtacatggagacgggctccctggaaaagctgctggcttcggagccattgccatgggatctccggttccgaatcatccacgagacggcggtgggcatgaacttcctgcactgcatggccccgccactcctgcacctggacctcaagcccgcgaacatcctgctggatgcccactaccacgtcaagatttctgattttggtctggccaagtgcaacgggctgtcccactcgcatgacctcagcatggatggcctgtttggcacaatcgcctacctccctccagagcgcatcagggagaagagccggctcttcgacaccaagcacgatgtatacagctttgcgatcgtcatctggggcgtgctcacacagaagaagccgtttgcagatgagaagaacatcctgcacatcatggtgaaggtggtgaagggccaccgccccgagctgccgcccgtgtgcagagcccggccgcgcgcctgcagccacctgatacgcctcatgcagcggtgctggcagggggatccgcgagttaggcccaccttccaaggaaacgggctgaatggggagctcatccgccaggtgctggcagctctgctccctgtgactggcaggtggcgctcccccggggaaggcttccgccttgagtctgaagtcatcatccgagtgacatgtcccctttcttccccacaagaaattacttctgaaaccgaggacctgtgtgaaaagcctgatgacgaagtgaaagaaactgctcatgatctggacgtgaaaagccccccggagcccaggagcgaggtggtgcctgcgaggctcaagcgggcctctgcccccaccttcgataacgactacagcctctccgagctgctctcacagctggactctggagtttcccaggctgtcgagggccccgaggagctcagccgcagctcctctgagtccaagctgccatcgtccggcagtgggaagaggctctcgggggtgtcctcggtggactccgccttctcttccagaggatcactgtcgctgtcctttgagcgggaaccttcaaccagcgatctgggcaccacagacgtccagaagaagaagcttgtggatgccatcgtgtccggggacaccagcaaactgatgaagatcctgcagccgcaggacgtggacctggcactggacagcggtgccagcctgctgcacctggcggtggaggccgggcaagaggagtgcgccaagtggctgctgctcaacaatgccaaccccaacctgagcaaccgtaggggctccaccccgttgcacatggccgtggagaggagggtgcggggtgtcgtggagctcctgctggcgcggaagatcagtgtcaacgccaaggatgaggaccagtggacagccctccactttgcagcccagaacggggacgagtctagcacacggctgctgttggagaagaacgcctcggtcaacgaggtggactttgagggccggacgcccatgcacgtggcctgccagcacgggcaggagaatatcgtgcgcatcctgctgcgccgaggcgtggacgtgagcctgcagggcaaggatgcctggctgccactgcactacgctgcctggcagggccacctgcccatcgtcaagctgctggccaagcagccgggggtgagtgtgaacgcccagacgctggatgggaggacgccattgcacctggccgcacagcgcgggcactaccgcgtggcccgcatcctcatcgacctgtgctccgacgtcaacgtctgcagcctgctggcacagacacccctgcacgtggccgcggagacggggcacacgagcactgccaggctgctcctgcatcggggcgctggcaaggaggccatgacctcagacggctacaccgctctgcacctggctgcccgcaacggacacctggccactgtcaagctgcttgtcgaggagaaggccgatgtgctggcccggggacccctgaaccagacggcgctgcacctggctgccgcccacgggcactcggaggtggtggaggagttggtcagcgccgatgtcattgacctgttcgacgagcaggggctcagcgcgctgcacctggccgcccagggccggcacgcacagacggtggagactctgctcaggcatggggcccacatcaacctgcagagcctcaagttccagggcggccatggccccgccgccacgctcctgcggcgaagcaagacctagctggctgcctgcggagaccgggggtccacgtggggctcttgtcctgtcctgtgttcctcgtggggatggaacgatcctgcgtggggccctgttgtggcttacctaaatgttaaccaagcagaggtgacatggtgccatcaggaggcggctgctgctgaccggagtgtcccctccaggtgaagctggctcaggtgcacatgcccgctccatcatcgatctaggcacctgctgtctgaagggaccgtgggtcagaatcatttcgttgtgctcctaatgggtcgctgaggctggtctctcagtgatgaagccccaggcgtggaagcatccactctctcctgaggcgagccaccttgggttgctggagctcaccagtcttgagggaggtgcaggggaaactgtgttttttatcttcatacatgacggtgggcagagaggcctgtcttaaagtttccatggaattgttttataaaatatcttaagagatgaataccttatcagctgttgcttgaaacctgttaaaaatgttcataacattggatagtctagtctctaaatgatgactaagtagtggggttggctttgaaaacaatgttttatgcaacaaggaacgaatggtagcagccagctttgcggggcgtatgtgtggccagctcttaaccattccagtctattacttgggtgagtccttgtggacaaccacacacacgtgcccacatggtactagctgccgttcgtttctcgttgcctaagatgttttggcaactctagagccacaggcctaagtcattaaaaaattctccctttgtaacctcagtgctggggactgaggcgagccccctcaggtcgctggagtgcaccagtcttggggaagaggtgcaggagaagctgtgttttttatctccacacgcagtatgaagataaaattacatagtattacctagacatagacagtattacctaggtagatgcactgctcacctgcgcccttcccagctctcatttttgttaggtgatttgggatagggatagtgttttggggtatggggggagtgtttctgacctgctttgcagacgtgcctccgcacctcagcagtttggggtgtggccccagggcggttcttggatgtaaaagatgtggccatctagcctcgtaacttcactgtcacctgtgtcccatagggtgccttctgaatactgttattagaataagtttgttgcagaacgtgaccctgcgtgcaaacatgtaccgtggcctggtatatgatagagattgatattaatgtaccatgtatgttaatgtgaatctgtgggcaggatacttttccatggcaggaaatatccaagctgttgaaactggctatgttttaatatgcctcattgtgcctttactgttgtgtggactgcgtgagggacaagaagttccatttgatgtcaataaagcaaagtacttgcc

SEQ ID NO: 25711 - DNA, 2449 bp, Homo sapiens
  source 1..2449: mol_type = unassigned DNA
aaattcggtgggtcggttgtcgtctgtgcataatttgagagggagcgcatggagcttttggaagaagccaagaagatggagatggccaagtttcgctacatcctgcctgtgtatggcatctgccgcgaacctgtcggcctggtcatggagtacatggagacgggctccctggaaaagctgctggcttcggagccattgccatgggatctccggttccgaatcatccacgagacggcggtgggcatgaacttcctgcactgcatggccccgccactcctgcacctggacctcaagcccgcgaacatcctgctggatgcccactaccacgtcaagatttctgattttggtctggccaagtgcaacgggctgtcccactcgcatgacctcagcatggatggcctgtttggcacaatcgcctacctccctccagagcgcatcagggagaagagccggctcttcgacaccaagcacgatgtatacagctttgcgatcgtcatctggggcgtgctcacacagaagaagccgtttgcagatgagaagaacatcctgcacatcatggtgaaggtggtgaagggccaccgccccgagctgccgcccgtgtgcagagcccggccgcgcgcctgcagccacctgatacgcctcatgcagcggtgctggcagggggatccgcgagttaggcccaccttccaagaaattacttctgaaaccgaggacctgtgtgaaaagcctgatgacgaagtgaaagaaactgctcatgatctggacgtgaaaagccccccggagcccaggagcgaggtggtgcctgcgaggctcaagcgggcctctgcccccaccttcgataacgactacagcctctccgagctgctctcacagctggactctggagtttcccaggctgtcgagggccccgaggagctcagccgcagctcctctgagtccaagctgccatcgtccggcagtgggaagaggctctcgggggtgtcctcggtggactccgccttctcttccagaggatcactgtcgctgtcctttgagcgggaaccttcaaccagcgatctgggcaccacagacgtccagaagaagaagcttgtggatgccatcgtgtccggggacaccagcaaactgatgaagatcctgcagccgcaggacgtggacctggcactggacagcggtgccagcctgctgcacctggcggtggaggccgggcaagaggagtgcgccaagtggctgctgctcaacaatgccaaccccaacctgagcaaccgtaggggctccaccccgttgcacatggccgtggagaggagggtgcggggtgtcgtggagctcctgctggcgcggaagatcagtgtcaacgccaaggatgaggaccagtggacagccctccactttgcagcccagaacggggacgagtctagcacacggctgctgttggagaagaacgcctcggtcaacgaggtggactttgagggccggacgcccatgcacgtggcctgccagcacgggcaggagaatatcgtgcgcatcctgctgcgccgaggcgtggacgtgagcctgcagggcaaggatgcctggctgccactgcactacgctgcctggcagggccacctgcccatcgtcaagctgctggccaagcagccgggggtgagtgtgaacgcccagacgctggatgggaggacgccattgcacctggccgcacagcgcgggcactaccgcgtggcccgcatcctcatcgacctgtgctccgacgtcaacgtctgcagcctgctggcacagacacccctgcacgtggccgcggagacggggcacacgagcactgccaggctgctcctgcatcggggcgctggcaaggaggccatgacctcagacggctacaccgctctgcacctggctgcccgcaacggacacctggccactgtcaagctgcttgtcgaggagaaggccgatgtgctggcccggggacccctgaaccagacggcgctgcacctggctgccgcccacgggcactcggaggtggtggaggagttggtcagcgccgatgtcattgacctgttcgacgagcaggggctcagcgcgctgcacctggccgcccagggccggcacgcacagacggtggagactctgctcaggcatggggcccacatcaacctgcagagcctcaagttccagggcggccatggccccgccgccacgctcctgcggcgaagcaagacctagctggctgcctgcggagaccgggggtccacgtggggctcttgtcctgtcctgtgttcctcgtggggatggaacgatcctgcgtggggccctgttgtggcttacctaaatgttaaccaagcagaggtgacatggtgccatcaggaggcggctgctgctgaccggagtgtcccctccaggtgaagctggctcaggtgcacatgcccgctccatcatcgatctaggcacctgctgtctg

SEQ ID NO: 25712 - DNA, 2601 bp, Homo sapiens
  source 1..2601: mol_type = unassigned DNA
gttgatccgtccgcccagcgcttcctcgccgcacactctcgttttagctgacttaatttcgagaccgacccgctagggaagggccttgcattcaagttctgtggccgtgccatggggccctcctgcaccccagtttcccagtccaaaagtcagaatggaacctgcctgtacctacctagcaggagtgttcaagggagcgcatggagcttttggaagaagccaagaagatggagatggccaagtttcgctacatcctgcctgtgtatggcatctgccgcgaacctgtcggcctggtcatggagtacatggagacgggctccctggaaaagctgctggcttcggagccattgccatgggatctccggttccgaatcatccacgagacggcggtgggcatgaacttcctgcactgcatggccccgccactcctgcacctggacctcaagcccgcgaacatcctgctggatgcccactaccacgtcaagatttctgattttggtctggccaagtgcaacgggctgtcccactcgcatgacctcagcatggatggcctgtttggcacaatcgcctacctccctccagagcgcatcagggagaagagccggctcttcgacaccaagcacgatgtatacagctttgcgatcgtcatctggggcgtgctcacacagaagaagccgtttgcagatgagaagaacatcctgcacatcatggtgaaggtggtgaagggccaccgccccgagctgccgcccgtgtgcagagcccggccgcgcgcctgcagccacctgatacgcctcatgcagcggtgctggcagggggatccgcgagttaggcccaccttccaagaaattacttctgaaaccgaggacctgtgtgaaaagcctgatgacgaagtgaaagaaactgctcatgatctggacgtgaaaagccccccggagcccaggagcgaggtggtgcctgcgaggctcaagcgggcctctgcccccaccttcgataacgactacagcctctccgagctgctctcacagctggactctggagtttcccaggctgtcgagggccccgaggagctcagccgcagctcctctgagtccaagctgccatcgtccggcagtgggaagaggctctcgggggtgtcctcggtggactccgccttctcttccagaggatcactgtcgctgtcctttgagcgggaaccttcaaccagcgatctgggcaccacagacgtccagaagaagaagcttgtggatgccatcgtgtccggggacaccagcaaactgatgaagatcctgcagccgcaggacgtggacctggcactggacagcggtgccagcctgctgcacctggcggtggaggccgggcaagaggagtgcgccaagtggctgctgctcaacaatgccaaccccaacctgagcaaccgtaggggctccaccccgttgcacatggccgtggagaggagggtgcggggtgtcgtggagctcctgctggcgcggaagatcagtgtcaacgccaaggatgaggaccagtggacagccctccactttgcagcccagaacggggacgagtctagcacacggctgctgttggagaagaacgcctcggtcaacgaggtggactttgagggccggacgcccatgcacgtggcctgccagcacgggcaggagaatatcgtgcgcatcctgctgcgccgaggcgtggacgtgagcctgcagggcaaggatgcctggctgccactgcactacgctgcctggcagggccacctgcccatcgtcaagctgctggccaagcagccgggggtgagtgtgaacgcccagacgctggatgggaggacgccattgcacctggccgcacagcgcgggcactaccgcgtggcccgcatcctcatcgacctgtgctccgacgtcaacgtctgcagcctgctggcacagacacccctgcacgtggccgcggagacggggcacacgagcactgccaggctgctcctgcatcggggcgctggcaaggaggccatgacctcagacggctacaccgctctgcacctggctgcccgcaacggacacctggccactgtcaagctgcttgtcgaggagaaggccgatgtgctggcccggggacccctgaaccagacggcgctgcacctggctgccgcccacgggcactcggaggtggtggaggagttggtcagcgccgatgtcattgacctgttcgacgagcaggggctcagcgcgctgcacctggccgcccagggccggcacgcacagacggtggagactctgctcaggcatggggcccacatcaacctgcagagcctcaagttccagggcggccatggccccgccgccacgctcctgcggcgaagcaagacctagctggctgcctgcggagaccgggggtccacgtggggctcttgtcctgtcctgtgttcctcgtggggatggaacgatcctgcgtggggccctgttgtggcttacctaaatgttaaccaagcagaggtgacatggtgccatcaggaggcggctgctgctgaccggagtgtcccctccaggtgaagctggctcaggtgcacatgcccgctccatcatcgatctaggcacctgctgtctg

SEQ ID NO: 25713 - DNA, 6564 bp, Homo sapiens
  source 1..6564: mol_type = unassigned DNA
gagagcagagaacacactttgccttctctttggtattgagtaatatcaaccaaattgcagacatctcaacactttggccaggcagcctgctgagcaaggtacctcagccagcatggcagcctctttcccacccaccttgggactcagttctgccccagatgaaattcagcacccacatattaaattttcagaatggaaatttaagctgttccgggtgagatcctttgaaaagacacctgaagaagctcaaaaggaaaagaaggattcctttgaggggaaaccctctctggagcaatctccagcagtcctggacaaggctgatggtcagaagccagtcccaactcagccattgttaaaagcccaccctaagttttcaaagaaatttcacgacaacgagaaagcaagaggcaaagcgatccatcaagccaaccttcgacatctctgccgcatctgtgggaattcttttagagctgatgagcacaacaggagatatccagtccatggtcctgtggatggtaaaaccctaggccttttacgaaagaaggaaaagagagctacttcctggccggacctcattgccaaggttttccggatcgatgtgaaggcagatgttgactcgatccaccccactgagttctgccataactgctggagcatcatgcacaggaagtttagcagtgccccatgtgaggtttacttcccgaggaacgtgaccatggagtggcacccccacacaccatcctgtgacatctgcaacactgcccgtcggggactcaagaggaagagtcttcagccaaacttgcagctcagcaaaaaactcaaaactgtgcttgaccaagcaagacaagcccgtcagcacaagagaagagctcaggcaaggatcagcagcaaggatgtcatgaagaagatcgccaactgcagtaagatacatcttagtaccaagctccttgcagtggacttcccagagcactttgtgaaatccatctcctgccagatctgtgaacacattctggctgaccctgtggagaccaactgtaagcatgtcttttgccgggtctgcattctcagatgcctcaaagtcatgggcagctattgtccctcttgccgatatccatgcttccctactgacctggagagtccagtgaagtcctttctgagcgtcttgaattccctgatggtgaaatgtccagcaaaagagtgcaatgaggaggtcagtttggaaaaatataatcaccacatctcaagtcacaaggaatcaaaagagatttttgtgcacattaataaagggggccggccccgccaacatcttctgtcgctgactcggagagctcagaagcaccggctgagggagctcaagctgcaagtcaaagcctttgctgacaaagaagaaggtggagatgtgaagtccgtgtgcatgaccttgttcctgctggctctgagggcgaggaatgagcacaggcaagctgatgagctggaggccatcatgcagggaaagggctctggcctgcagccagctgtttgcttggccatccgtgtcaacaccttcctcagctgcagtcagtaccacaagatgtacaggactgtgaaagccatcacagggagacagatttttcagcctttgcatgcccttcggaatgctgagaaggtacttctgccaggctaccaccactttgagtggcagccacctctgaagaatgtgtcttccagcactgatgttggcattattgatgggctgtctggactatcatcctctgtggatgattacccagtggacaccattgcaaagaggttccgctatgattcagctttggtgtctgctttgatggacatggaagaagacatcttggaaggcatgagatcccaagaccttgatgattacctgaatggccccttcactgtggtggtgaaggagtcttgtgatggaatgggagacgtgagtgagaagcatgggagtgggcctgtagttccagaaaaggcagtccgtttttcattcacaatcatgaaaattactattgcccacagctctcagaatgtgaaagtatttgaagaagccaaacctaactctgaactgtgttgcaagccattgtgccttatgctggcagatgagtctgaccacgagacgctgactgccatcctgagtcctctcattgctgagagggaggccatgaagagcagtgaattaatgcttgagctgggaggcattctccggactttcaagttcatcttcaggggcaccggctatgatgaaaaacttgtgcgggaagtggaaggcctcgaggcttctggctcagtctacatttgtactctttgtgatgccacccgtctggaagcctctcaaaatcttgtcttccactctataaccagaagccatgctgagaacctggaacgttatgaggtctggcgttccaacccttaccatgagtctgtggaagaactgcgggatcgggtgaaaggggtctcagctaaacctttcattgagacagtcccttccatagatgcactccactgtgacattggcaatgcagctgagttctacaagatcttccagctagagataggggaagtgtataagaatcccaatgcttccaaagaggaaaggaaaaggtggcaggccacactggacaagcatctccggaagaagatgaacctcaaaccaatcatgaggatgaatggcaactttgccaggaagctcatgaccaaagagactgtggatgcagtttgtgagttaattccttccgaggagaggcacgaggctctgagggagctgatggatctttacctgaagatgaaaccagtatggcgatcatcatgccctgctaaagagtgcccagaatccctctgccagtacagtttcaattcacagcgttttgctgagctcctttctacgaagttcaagtataggtatgagggaaaaatcaccaattattttcacaaaaccctggcccatgttcctgaaattattgagagggatggctccattggggcatgggcaagtgagggaaatgagtctggtaacaaactgtttaggcgcttccggaaaatgaatgccaggcagtccaaatgctatgagatggaagatgtcctgaaacaccactggttgtacacctccaaatacctccagaagtttatgaatgctcataatgcattaaaaacctctgggtttaccatgaaccctcaggcaagcttaggggacccattaggcatagaggactctctggaaagccaagattcaatggaattttaagtagggcaaccacttatgagttggtttttgcaattgagtttccctctgggttgcattgagggcttctcctagcaccctttactgctgtgtatggggcttcaccatccaagaggtggtaggttggagtaagatgctacagatgctctcaagtcaggaatagaaactgatgagctgattgcttgaggcttttagtgagttccgaaaagcaacaggaaaaatcagttatctgaaagctcagtaactcagaacaggagtaactgcaggggaccagagatgagcaaagatctgtgtgtgttggggagctgtcatgtaaatcaaagccaaggttgtcaaagaacagccagtgaggccaggaaagaaattggtcttgtggttttcatttttttcccccttgattgattatattttgtattgagatatgataagtgccttctatttcatttttgaataattcttcatttttataattttacatatcttggcttgctatataagattcaaaagagctttttaaatttttctaataatatcttacatttgtacagcatgatgacctttacaaagtgctctcaatgcatttacccattcgttatataaatatgttacatcaggacaactttgagaaaatcagtccttttttatgtttaaattatgtatctattgtaaccttcagagtttaggaggtcatctgctgtcatggatttttcaataatgaatttagaatacacctgttagctacagttagttattaaatcttctgataatatatgtttacttagctatcagaagccaagtatgattctttatttttactttttcatttcaagaaatttagagtttccaaatttagagcttctgcatacagtcttaaagccacagaggcttgtaaaaatataggttagcttgatgtctaaaaatatatttcatgtcttactgaaacattttgccagactttctccaaatgaaacctgaatcaatttttctaaatctaggtttcatagagtcctctcctctgcaatgtgttattctttctataatgatcagtttactttcagtggattcagaattgtgtagcaggataaccttgtatttttccatccgctaagtttagatggagtccaaacgcagtacagcagaagagttaacatttacacagtgctttttaccactgtggaatgttttcacactcatttttccttacaacaattctgaggagtaggtgttgttattatctccatttgatgggggtttaaatgatttgctcaaagtcatttaggggtaataaatacttggcttggaaatttaacacagtccttttgtctccaaagcccttcttctttccaccacaaattaatcactatgtttataaggtagtatcagaatttttttaggattcacaactaatcactatagcacatgaccttgggattacatttttatggggcaggggtaagcaagtttttaaatcatttgtgtgctctggctcttttgatagaagaaagcaacacaaaagctccaaagggccccctaaccctcttgtggctccagttatttggaaactatgatctgcatccttaggaatctgggatttgccagttgctggcaatgtagagcaggcatggaattttatatgctagtgagtcataatgatatgttagtgttaattagttttttcttcctttgattttattggccataattgctactcttcatacacagtatatcaaagagcttgataatttagttgtcaaaagtgcatcggcgacattatctttaattgtatgtatttggtgcttcttcagggattgaactcagtatctttcattaaaaaacacagcagttttccttgctttttatatgcagaatatcaaagtcatttctaatttagttgtcaaaaacatatacatattttaacattagtttttttgaaaactcttggttttgtttttttggaaatgagtgggccactaagccacactttcccttcatcctgcttaatccttccagcatgtctctgcactaataaacagctaaattcacataatcatcctatttactgaagcatggtcatgctggtttatagattttttacccatttctactctttttctctattggtggcactgtaaatactttccagtattaaattatccttttctaacactgtaggaactattttgaatgcatgtgactaagagcatgatttatagcacaacctttccaataatcccttaatcagatcacattttgataaaccctgggaacatctggctgcaggaatttcaatatgtagaaacgctgcctatggttttttgcccttactgttgagactgcaatatcctagaccctagttttatactagagttttatttttagcaatgcctattgcaagtgcaattatatactccagggaaattcaccacactgaatcgagcatttgtgtgtgtatgtgtgaagtatatactgggacttcagaagtgcaatgtatttttctcctgtgaaacctgaatctacaagttttcctgccaagccactcaggtgcattgcagggaccagtgataatggctgatgaaaattgatgattggtcagtgaggtcaaaaggagccttgggattaataaacatgcactgagaagcaagaggaggagaaaaagatgtctttttcttccaggtgaactggaatttagttttgcctcagatttttttcccacaagatacagaagaagataaagatttttttggttgagagtgtgggtcttgcattacatcaaacagagttcaaattccacacagataagaggcaggatatataagcgccagtggtagttgggaggaataaaccattatttggatgcaggtggtttttgattgcaaatatgtgtgtgtcttcagtgattgtatgacagatgatgtattcttttgatgttaaaagattttaagtaagagtagatacattgtacccattttacattttcttattttaactacagtaatctacataaatatacctcagaaatcatttttggtgattattttttgttttgtagaattgcacttcagtttattttcttacaaataaccttacattttgtttaatggcttccaagagccttttttttttttgtatttcagagaaaattcaggtaccaggatgcaatggatttatttgattcaggggacctgtgtttccatgtcaaatgttttcaaataaaatgaaatatgagtttcaatactttttatattttaatatttccattcattaatattatggttattgtcagcaattttatgtttgaatatttgaaataaaagtttaagatt

SEQ ID NO: 25714 - DNA, 2388 bp, Homo sapiens
  source 1..2388: mol_type = unassigned DNA
actctctttacagtcagccttctgcttgccacagtcatagtgggcagtcagtgaatcttccccaagtgctgacaattaatacctggtttagcggcaaagattcagagaggcgtgagcagcccctctggccttcagacaaaaatctacgtaccatcagaaactatgtctctgcagatggtaacagtcagtaataacatagccttaattcagccaggcttctcactgatgaattttgatggacaagttttcttctttggacaaaaaggctggcccaaaagatcctgccccactggagttttccatctggatgtaaagcataaccatgtcaaactgaagcctacaattttctctaaggattcctgctacctccctcctcttcgctacccagccacttgcacattcaaaggcagcttggagtctgaaaagcatcaatacatcatccatggagggaaaacaccaaacaatgaggtttcagataagatttatgtcatgtctattgtttgcaagaacaacaaaaaggttacttttcgctgcacagagaaagacttggtaggagatgttcctgaagccagatatggtcattccattaatgtggtgtacagccgagggaaaagtatgggtgttctctttggaggacgctcatacatgccttctacccacagaaccacagaaaaatggaatagtgtagctgactgcctgccctgtgttttcctggtggattttgaatttgggtgtgctacatcatacattcttccagaacttcaggatgggctatcttttcatgtctctattgccaaaaatgacaccatctatattttaggaggacattcacttgccaataatatccggcctgccaacctgtacagaataagggttgatcttcccctgggtagcccagctgtgaattgcacagtcttgccaggaggaatctctgtctccagtgcaatcctgactcaaactaacaatgatgaatttgttattgttggtggctatcagcttgaaaatcaaaaaagaatgatctgcaacatcatctctttagaggacaacaagatagaaattcgtgagatggagaccccagattggaccccagacattaagcacagcaagatatggtttggaagcaacatgggaaatggaactgtttttcttggcataccaggagacaataaacaagttgtttcagaaggattctatttctatatgttgaaatgtgctgaagatgatactaatgaagagcagacaacattcacaaacagtcaaacatcaacagaagatccaggggattccactccctttgaagactctgaagaattttgtttcagtgcagaagcaaatagttttgatggtgatgatgaatttgacacctataatgaagatgatgaagaagatgagtctgagacaggctactggattacatgctgccctacttgtgatgtggatatcaacacttgggtaccattctattcaactgagctcaacaaacccgccatgatctactgctctcatggggatgggcactgggtccatgctcagtgcatggatctggcagaacgcacactcatccatctgtcagcaggaagcaacaagtattactgcaatgagcatgtggagatagcaagagctctacacactccccaaagagtcctacccttaaaaaagcctccaatgaaatccctccgtaaaaaaggttctggaaaaatcttgactcctgccaagaaatcctttcttagaaggttgtttgattagttttgcaaaagcctttcagattcaggtgtatggaatttttgaatctatttttaaaatcataacattgattttaaaaatacatttttgtttatttaaaatgcctatgttttcttttagttacatgaattaagggccagaaaaaagtgtttataatgcaatgataaataaagtcattctagaccctatacattttgaaaatattttacccaaatactcaatttactaatttattcttcactgaggatttctgatctgattttttattcaacaaaccttaaacacccagaagcagtaataatcatcgaggtatgtttatatttattatataagtcttggtaacaaataacctataaagtgtttatgacaaatttagccaataaagaaattaacacccaaaagaattaaattgattattttgtgcaacataacaattcggcagttggccaaaacttaaaagcaagatctactacatcccacattagtgttctttatataccttcaagcaaccctttggattatgcccatgaacaagttagtttctcatagctttacagatgtagatataaatataaatatatgtatacatatagatagataatgttctccactgacacaaaagaagaaataaataatctacatcaa

SEQ ID NO: 25715 - DNA, 569 bp, Homo sapiens
  source 1..569: mol_type = unassigned DNA
actctctttacagtcagccttctgcttgccacagtcatagtgggcagtcagtgaatcttccccaagtgctgacaattaatacctggtttagcggcaaagattcagagaggcgtgagcagcccctctggccttcagggattcaaagatccatctttcggttctgtaagacagtcacggcttttgtaacctcggtgcccccttcaacctcccgccccaagcacctccagggtcgtcaggggtgtagttttgagtcgcgctcctaagcatccagacaggcaggacaccgtaacgacatctctgccgggagtcccttcagactgcggtctccagacaaaaatctacgtaccatcagaaactatgtctctgcagatggtaacagtcagtaataacatagccttaattcagccaggcttctcactgatgaattttgatggacaagttttcttctttggacaaaaaggctggcccaaaagatcctgccccactggagttttccatctggatgtaaagcataaccatgtcaaactgaagcctacaattttctctaaggattcctgctacctccctcc

SEQ ID NO: 25716 - DNA, 572 bp, Homo sapiens
  source 1..572: mol_type = unassigned DNA
aaaagtccccaggagaggctccagcaataccagggtagcggtttgcccgacaccgctccgggcgctgcagccttccggcaacccggacgttggacaaaaatctacgtaccatcagaaactatgtctctgcagatggtaacagtcagtaataacatagccttaattcagccaggcttctcactgatgaattttgatggacaagttttcttctttggacaaaaaggctggcccaaaagatcctgccccactggagttttccatctggatgtaaagcataaccatgtcaaactgaagcctacaattttctctaaggattcctgctacctccctcctcttcgctacccagccacttgcacattcaaaggcagcttggagtctgaaaagcatcaatacatcatccatggagggaaaacaccaaacaatgaggtttcagataagatttatgtcatgtctattgtttgcaagaacaacaaaaaggttacttttcgctgcacagagaaagacttggtaggagatgttcctgaagccagatatggtcattccattaatgtggtgtacagccgagggaaaag

SEQ ID NO: 25717 - DNA, 554 bp, Homo sapiens
  source 1..554: mol_type = unassigned DNA
actctctttacagtcagccttctgcttgccacagtcatagtgggcagtcagtgaatcttccccaagtgctgacaattaatacctggtttagcggcaaagattcagagaggcgtgagcagcccctctggccttcagaatgaagatgaaaagaagatgtgtttaggaaccttctctgcttccctaaaagaaccctaaaaacaggagtaaaaacagtgaagaaaacaaaggaccttcaaagtgcactcgttaaaacctaataactgtatttctattactaaatgtagaagtggtaaacatctttaacaggcaatgtctcccctgcactctagggattcaaagatccatctttcggttctgtaagacagtcacggcttttgtaacctcggtgcccccttcaacctcccgccccaagcacctccagggtcgtcaggggtgtagttttgagtcgcgctcctaagcatccagacaggcaggacaccgtaacgacatctctgccgggagtcccttcagactgcggtctccagacaaaaatctacgtaccatcagaaactatg

SEQ ID NO: 25718 - DNA, 2388 bp, Homo sapiens
  source 1..2388: mol_type = unassigned DNA
attgggtacatgcgcagtgccgctcgcgcgggccgcgccaatcctgcagcgccttcaacaggtttcgggcggcgaattccagttctccgggttttggggctccctgcgggaggcagtgctggatctgggaatctctaggaaaggaaagagcaaaggaggggaaagatggggggctgcagtctccacgtacgtccctcaaagcgcgtcctaaaacccggataaccggagcgctccccatggaccacacggagggctcgcccgcggaggagccgcctgcgcatgctccatcgcctgggaaatttggtgagcggcctccacctaaacgacttactagggaagctatgcgaaattatttaaaagagcgaggggatcaaacagtacttattcttcatgcaaaagttgcacagaagtcatatggaaatgaaaaaaggtttttttgcccacctccttgtgtatatcttatgggcagtggatggaagaaaaaaaaagaacaaatggaacgcgatggttgttctgaacaagagtctcaaccgtgtgcatttattgggataggaaatagtgaccaagaaatgcagcagctaaacttggaaggaaagaactattgcacagccaaaacattgtatatatctgactcagacaagcgaaagcacttcatgttgtctgtaaagatgttctatggcaacagtgatgacattggtgtgttcctcagcaagcggataaaagtcatctccaaaccttccaaaaagaagcagtcattgaaaaatgctgacttatgcattgcctcaggaacaaaggtggctctgtttaatcgactacgatcccagacagttagtaccagatacttgcatgtagaaggaggtaattttcatgccagttcacagcagtggggagccttttttattcatctcttggatgatgatgaatcagaaggagaagaattcacagtccgagatggctacatccattatggacaaacagtcaaacttgtgtgctcagttactggcatggcactcccaagattgataattaggaaagttgataagcagaccgcattattggatgcagatgatcctgtgtcacaactccataaatgtgcattttaccttaaggatacagaaagaatgtatttgtgcctttctcaagaaagaataattcaatttcaggccactccatgtccaaaagaaccaaataaagagatgataaatgatggcgcttcctggacaatcattagcacagataaggcagagtatacattttatgagggaatgggccctgtccttgccccagtcactcctgtgcctgtggtagagagccttcagttgaatggcggtggggacgtagcaatgcttgaacttacaggacagaatttcactccaaatttacgagtgtggtttggggatgtagaagctgaaactatgtacaggtgtggagagagtatgctctgtgtcgtcccagacatttctgcattccgagaaggttggagatgggtccggcaaccagtccaggttccagtaactttggtccgaaatgatggaatcatttattccaccagccttacctttacctacacaccagaaccagggccgcggccacattgcagtgcagcaggagcaatccttcgagccaattcaagccaggtgccccctaacgaatcaaacacaaacagcgagggaagttacacaaacgccagcacaaattcaaccagtgtcacatcatctacagccacagtggtatcctaactaccgtctttttgctaggacttaaactgacttgagtgtggcaaaaagttaacaaaaaaggagaaaaaatgaacaatcgtttgtggtttcttgggaaaacttttcataccaggtgatactattcaaaaaccccgttgtctccctgcaagtgctgatttgaaatgcagaagccacagtaaaaaaaaaaaaaaaaaaaaaaaaaaagaaaaaaaaatcaaaatgtataaatattggaaatcaagtttttcagctgttttgttggttggttggttggtttttgtttggttttgtttaaatgggcaagaagtaaataatgtggctggaatacaagttgaacaaactagaagacacaaatctaacatagtttttatggaccaaggaacttgtatattgtataagctttagtaaaaggtacattttcaccatacctttttttatatcacggtattatagtacaccttgttaccaaataggttgttctcttccccacccacctttgagcttttgctctaaaatacattcaggttccaagcctgaccatccttgtttaatctatcatactcttccaggttttttttttttggtctaaggctggaacttttttcttttttttcagctgaagtcttatgacttttcatgagtcaaaatt

SEQ ID NO: 25719 - DNA, 5549 bp, Homo sapiens
  source 1..5549: mol_type = unassigned DNA
tgtttttaagtcattgaaattatgagactatcattcaaatggaagcattatagttcttcggaaccattatgatctcaaaacgaaaggagaatgatacagatacactggctgaggtgttttgaggtgcatcgaagtgttccaagctgtgacttaccttaacatgttcttgaagtaccatggcgtggattaaaaggaaatttggtgagcggcctccacctaaacgacttactagggaagctatgcgaaattatttaaaagagcgaggggatcaaacagtacttattcttcatgcaaaagttgcacagaagtcatatggaaatgaaaaaaggtttttttgcccacctccttgtgtatatcttatgggcagtggatggaagaaaaaaaaagaacaaatggaacgcgatggttgttctgaacaagagtctcaaccgtgtgcatttattgggataggaaatagtgaccaagaaatgcagcagctaaacttggaaggaaagaactattgcacagccaaaacattgtatatatctgactcagacaagcgaaagcacttcatgttgtctgtaaagatgttctatggcaacagtgatgacattggtgtgttcctcagcaagcggataaaagtcatctccaaaccttccaaaaagaagcagtcattgaaaaatgctgacttatgcattgcctcaggaacaaaggtggctctgtttaatcgactacgatcccagacagttagtaccagatacttgcatgtagaaggaggtaattttcatgccagttcacagcagtggggagccttttttattcatctcttggatgatgatgaatcagaaggagaagaattcacagtccgagatggctacatccattatggacaaacagtcaaacttgtgtgctcagttactggcatggcactcccaagattgataattaggaaagttgataagcagaccgcattattggatgcagatgatcctgtgtcacaactccataaatgtgcattttaccttaaggatacagaaagaatgtatttgtgcctttctcaagaaagaataattcaatttcaggccactccatgtccaaaagaaccaaataaagagatgataaatgatggcgcttcctggacaatcattagcacagataaggcagagtatacattttatgagggaatgggccctgtccttgccccagtcactcctgtgcctgtggtagagagccttcagttgaatggcggtggggacgtagcaatgcttgaacttacaggacagaatttcactccaaatttacgagtgtggtttggggatgtagaagctgaaactatgtacaggtgtggagagagtatgctctgtgtcgtcccagacatttctgcattccgagaaggttggagatgggtccggcaaccagtccaggttccagtaactttggtccgaaatgatggaatcatttattccaccagccttacctttacctacacaccagaaccagggccgcggccacattgcagtgcagcaggagcaatccttcgagccaattcaagccaggtgccccctaacgaatcaaacacaaacagcgagggaagttacacaaacgccagcacaaattcaaccagtgtcacatcatctacagccacagtggtatcctaactaccgtctttttgctaggacttaaactgacttgagtgtggcaaaaagttaacaaaaaaggagaaaaaatgaacaatcgtttgtggtttcttgggaaaacttttcataccaggtgatactattcaaaaaccccgttgtctccctgcaagtgctgatttgaaatgcagaagccacagtaaaaaaaaaaaaaaaaaaaaaaaaaaagaaaaaaaaatcaaaatgtataaatattggaaatcaagtttttcagctgttttgttggttggttggttggtttttgtttggttttgtttaaatgggcaagaagtaaataatgtggctggaatacaagttgaacaaactagaagacacaaatctaacatagtttttatggaccaaggaacttgtatattgtataagctttagtaaaaggtacattttcaccatacctttttttatatcacggtattatagtacaccttgttaccaaataggttgttctcttccccacccacctttgagcttttgctctaaaatacattcaggttccaagcctgaccatccttgtttaatctatcatactcttccaggttttttttttttggtctaaggctggaacttttttcttttttttcagctgaagtcttatgacttttcatgagtcaaaattgtttggatttcagcaagtcaaatcttgcaaaggcctgcatattttttttaagattatatgaagtctgtgcaaaagctttaaaaaaatgcctctgccttgcctgcaatacatgcaatgtatgttaacttagtctctcttctcagacactgttggtagttatttctgtgttttcctttttttaaaaaaaaatatggacttattgtggttatctgagaggttctaacattcacatgcaatttggtgtggccatttagctattaatgagttaatggcgcagaacttgttgatatttgaagtgttctctccccttttcccatgacgtaaatacataggtgtgttccaggatttgttcaggtttttcccccctcctaatcttgtacataacttgtattatgtgtaagttaaacattttattttgaacttggaatgttcccagtgatttcattcagcagggtattttctgccttgttggcaagtgacaaaaaatatgggaagtatttgctaccagttggtagatggtgcccttaatggtagaatgaggaaaatgtccgcaaaagcatgttttattatctttacttttttggggggttggagggggtagcctagccagaacatcattgtaatcttaaaacataagatgcttttattagatgatcaactaaaatagctggaagacagtactttagaaacagatagttgtaagattataaaatgcaaatgtaacttatgttttcatttttttctctgccttttttgtttgtttgttttctcttttccagtactgagcatctccacaaatgtctcctaactcagaaaatgtttcttttcttttcagttgagatttggttgcattcagggttgtaggttggccttgcttgctaaccccgccggttttaccgtgctttcattcctgaactttgtttatgcctttgtttggtttcttcgaaattgcagcagactcattgggctacatttagtacaggaaccacgtgtgtaatgttatacaacacagtctagtaatacaatcatccctcttagagtaaaaactacctctagattgtggtaagcttttactgtcccataaaacaggagccacagtaccttatgaatgcaaaactgtaacttcctacagtgtttccctacagaacattgtctttctggtgtcctgggctgttttgaaaaagtttccattaatagactttttagaaattattattagtagcattttttttccagctttgctgtcttcatcactcactctatgctcagactatgccactgtaaatattcttcctaacatctttaaatcgccttttcctcagttttcaaggggaaggtcatttgtaaagcacgttaggtggttaaatcagttattgcggttttctcttactgcaagcctttttaatcacccccaggctgcattttattctatatcgccttttttcttcaaatctgctccaatcactcacttctctcttataagctaatcctgcctcacaccttaaatctgtttcagtgatcaagggcagaactcattgtggccttatctttctttgttgtaattgttcactgtctctttcttacagaccacttatttctgagtagtagttattcctctctatggagtcatggcaggaatcattacacagtgcttttgttcagagcatggacatgttcctagtgctgctttgctttaacggccacaagtttcctccacttcctaggtttggtatttagttaaggaatcatattaaattaaccaataacaaaagagatacttttgaagaacaaactattccttacccatttttgtagctcaaaaataatttttcaagttcatgaccttattaaaatgaacttgtgtttttttaacaaacatgtatgttttattttgatagtttctttccgtaagataattgaaatattatactgtaaacccttttcttttctttttttgaaaagtccaagaatgtacttatacaggcatttttccccacctatttttggccattctcataccacagactaaagagtgaaatgatttgtccattgtagcttattgtttatcagtagttcttttgtcagctgcttacattttttctttcatggttttgtgaatcattttcagtatgtaatttataggaaccttgtcctctggttatagtagactgtgtgccctcctccagtgatggcattattagacatgctggtcatttaccctcagaaagactctcttattagaatggtgagtgcttcagttatagtatgtttgaatttttaaaaaattctgttttagaaatgtatcttatgctctcatgactatgcagtttctaaacatacacatagaagctgagtctctgatccaatatgtttttatttgttccatttaatttatcacatagattgggaaggcaagctaaaagccttaaaaatgccctttatattttgagtgatttcagcgttgaacactagtatactatctaaatttgctgctcactttctttaaactgtggcaattaaaggcatgtttatacatgacttaatcgtgaaatgtttgtcactcttactgcacagacttatctgcaatcataactggttagtttttttgttttgttttgttttattgtttttaatgaaactggtaccatctgtgctttcacaaaaaacttccaatgccatttttgagaactaacctaactagtcatgctaaccagaaaatccactggggaggaggttccttttgaaacaaaatgctgttcagttagtaaccaagttactttgattgcaaaagcagctgtgtttctgataagtactgaacaaatgtgtgtaattttctgtgccagacttatgactttgttttcaagcactgtaatgtgggatggatggttagaaacaataatatattagggtttctgtttaaccctttcaggactgaactgtatctccttttgttaattttcccctgtgttgtgataaatgtttgccagcattcagtactgtgttggtccagatgtaggtttatatgctcatttttagcttatttcttgtaccttgcagcatgctctacgcattcagtccttaaggggtttattttacaaactgtgcgcctgtaaggtttattagcaataagatagaaaattgagcaagtttataccataattttgtagaaaaaaagaatctgctcagttccatatttcatccgtgaaaaacttgcaatacgagcagtttcaaggaataaataaaaaggaaatgtaaaccattgt

SEQ ID NO: 25720 - DNA, 1682 bp, Homo sapiens
  source 1..1682: mol_type = unassigned DNA
attgggtacatgcgcagtgccgctcgcgcgggccgcgccaatcctgcagcgccttcaacaggtttcgggcggcgaattccagttctccgggttttggggctccctgcgggaggcagtgctggatctgggaatctctaggaaaggaaagagcaaaggaggggaaagatggggggctgcaggaaatttggtgagcggcctccacctaaacgacttactagggaagctatgcgaaattatttaaaagagcgaggggatcaaacagtacttattcttcatgcaaaagttgcacagaagtcatatggaaatgaaaaaaggtttttttgcccacctccttgtgtatatcttatgggcagtggatggaagaaaaaaaaagaacaaatggaacgcgatggttgttctgaacaagagtctcaaccgtgtgcatttattgggataggaaatagtgaccaagaaatgcagcagctaaacttggaaggaaagaactattgcacagccaaaacattgtatatatctgactcagacaagcgaaagcacttcatgttgtctgtaaagatgttctatggcaacagtgatgacattggtgtgttcctcagcaagcggataaaagtcatctccaaaccttccaaaaagaagcagtcattgaaaaatgctgacttatgcattgcctcaggaacaaaggtggctctgtttaatcgactacgatcccagacagttagtaccagatacttgcatgtagaaggaggtaattttcatgccagttcacagcagtggggagccttttttattcatctcttggatgatgatgaatcagaaggagaagaattcacagtccgagatggctacatccattatggacaaacagtcaaacttgtgtgctcagttactggcatggcactcccaagattgataattaggaaagttgataagcagaccgcattattggatgcagatgatcctgtgtcacaactccataaatgtgcattttaccttaaggatacagaaagaatgtatttgtgcctttctcaagaaagaataattcaatttcaggccactccatgtccaaaagaaccaaataaagagatgataaatgatggcgcttcctggacaatcattagcacagataaggcagagtatacattttatgagggaatgggccctgtccttgccccagtcactcctgtgcctgtggtagagagccttcagttgaatggcggtggggacgtagcaatgcttgaacttacaggacagaatttcactccaaatttacgagtgtggtttggggatgtagaagctgaaactatgtacaggtgtggagagagtatgctctgtgtcgtcccagacatttctgcattccgagaaggttggagatgggtccggcaaccagtccaggttccagtaactttggtccgaaatgatggaatcatttattccaccagccttacctttacctacacaccagaaccagggccgcggccacattgcagtgcagcaggagcaatccttcgagccaattcaagccaggtgccccctaacgaatcaaacacaaacagcgagggaagttacacaaacgccagcacaaattcaaccagtgtcacatcatctacagccacagtggtatcctaactaccgtctttttgctaggacttaaactgacttgagtgtggcaaaaagttaacaaaaaa

SEQ ID NO: 25721 - DNA, 1752 bp, Homo sapiens
  source 1..1752: mol_type = unassigned DNA
atgctccatcgcctgggtaggtttccagggaaggcagcgagcaggatcccctactctgcgggcggcgcgaggcgtctggctcttcgcggcggcggcgaggggaaagggagcgcgggggctgggtggaatcgaggagtgaggaaaaagggaaggggcgggggagagggaccagggaaggcgtcggggggaatctcgcgagggttggagttttggcgagagtttgtggaagatggcgcctgttgtgacagggaaatttggtgagcggcctccacctaaacgacttactagggaagctatgcgaaattatttaaaagagcgaggggatcaaacagtacttattcttcatgcaaaagttgcacagaagtcatatggaaatgaaaaaaggtttttttgcccacctccttgtgtatatcttatgggcagtggatggaagaaaaaaaaagaacaaatggaacgcgatggttgttctgaacaagagtctcaaccgtgtgcatttattgggataggaaatagtgaccaagaaatgcagcagctaaacttggaaggaaagaactattgcacagccaaaacattgtatatatctgactcagacaagcgaaagcacttcatgttgtctgtaaagatgttctatggcaacagtgatgacattggtgtgttcctcagcaagcggataaaagtcatctccaaaccttccaaaaagaagcagtcattgaaaaatgctgacttatgcattgcctcaggaacaaaggtggctctgtttaatcgactacgatcccagacagttagtaccagatacttgcatgtagaaggaggtaattttcatgccagttcacagcagtggggagccttttttattcatctcttggatgatgatgaatcagaaggagaagaattcacagtccgagatggctacatccattatggacaaacagtcaaacttgtgtgctcagttactggcatggcactcccaagattgataattaggaaagttgataagcagaccgcattattggatgcagatgatcctgtgtcacaactccataaatgtgcattttaccttaaggatacagaaagaatgtatttgtgcctttctcaagaaagaataattcaatttcaggccactccatgtccaaaagaaccaaataaagagatgataaatgatggcgcttcctggacaatcattagcacagataaggcagagtatacattttatgagggaatgggccctgtccttgccccagtcactcctgtgcctgtggtagagagccttcagttgaatggcggtggggacgtagcaatgcttgaacttacaggacagaatttcactccaaatttacgagtgtggtttggggatgtagaagctgaaactatgtacaggtgtggagagagtatgctctgtgtcgtcccagacatttctgcattccgagaaggttggagatgggtccggcaaccagtccaggttccagtaactttggtccgaaatgatggaatcatttattccaccagccttacctttacctacacaccagaaccagggccgcggccacattgcagtgcagcaggagcaatccttcgagccaattcaagccaggtgccccctaacgaatcaaacacaaacagcgagggaagttacacaaacgccagcacaaattcaaccagtgtcacatcatctacagccacagtggtatcctaactaccgtctttttgctaggacttaaactgacttgagtgtggcaaaaagttaacaaaaaa

SEQ ID NO: 25722 - DNA, 2499 bp, Homo sapiens
  source 1..2499: mol_type = unassigned DNA
agggaaggcagcgagcaggatcccctactctgcgggcggcgcgaggcgtctggctcttcgcggcggcggcgaggggaaagggagcgcgggggctgggtggaatcgaggagtgaggaaaaagggaaggggcgggggagagggaccagggaaggcgtcggggggaatctcgcgagggttggagttttggcgagagtttgtggaagatggcgcctgttgtgacaggtcattgaaattatgagactatcattcaaatggaagcattatagttcttcggaaccattatgatctcaaaacgaaaggagaatgatacagatacactggctgaggtgttttgaggtgcatcgaagtgttccaagctgtgacttaccttaacatgttcttgaagtaccatggcgtggattaaaaggaaatttggtgagcggcctccacctaaacgacttactagggaagctatgcgaaattatttaaaagagcgaggggatcaaacagtacttattcttcatgcaaaagttgcacagaagtcatatggaaatgaaaaaaggtttttttgcccacctccttgtgtatatcttatgggcagtggatggaagaaaaaaaaagaacaaatggaacgcgatggttgttctgaacaagagtctcaaccgtgtgcatttattgggataggaaatagtgaccaagaaatgcagcagctaaacttggaaggaaagaactattgcacagccaaaacattgtatatatctgactcagacaagcgaaagcacttcatgttgtctgtaaagatgttctatggcaacagtgatgacattggtgtgttcctcagcaagcggataaaagtcatctccaaaccttccaaaaagaagcagtcattgaaaaatgctgacttatgcattgcctcaggaacaaaggtggctctgtttaatcgactacgatcccagacagttagtaccagatacttgcatgtagaaggaggtaattttcatgccagttcacagcagtggggagccttttttattcatctcttggatgatgatgaatcagaaggagaagaattcacagtccgagatggctacatccattatggacaaacagtcaaacttgtgtgctcagttactggcatggcactcccaagattgataattaggaaagttgataagcagaccgcattattggatgcagatgatcctgtgtcacaactccataaatgtgcattttaccttaaggatacagaaagaatgtatttgtgcctttctcaagaaagaataattcaatttcaggccactccatgtccaaaagaaccaaataaagagatgataaatgatggcgcttcctggacaatcattagcacagataaggcagagtatacattttatgagggaatgggccctgtccttgccccagtcactcctgtgcctgtggtagagagccttcagttgaatggcggtggggacgtagcaatgcttgaacttacaggacagaatttcactccaaatttacgagtgtggtttggggatgtagaagctgaaactatgtacaggtgtggagagagtatgctctgtgtcgtcccagacatttctgcattccgagaaggttggagatgggtccggcaaccagtccaggttccagtaactttggtccgaaatgatggaatcatttattccaccagccttacctttacctacacaccagaaccagggccgcggccacattgcagtgcagcaggagcaatccttcgagccaattcaagccaggtgccccctaacgaatcaaacacaaacagcgagggaagttacacaaacgccagcacaaattcaaccagtgtcacatcatctacagccacagtggtatcctaactaccgtctttttgctaggacttaaactgacttgagtgtggcaaaaagttaacaaaaaaggagaaaaaatgaacaatcgtttgtggtttcttgggaaaacttttcataccaggtgatactattcaaaaaccccgttgtctccctgcaagtgctgatttgaaatgcagaagccacagtaaaaaaaaaaaaaaaaaaaaaaaaaaagaaaaaaaaatcaaaatgtataaatattggaaatcaagtttttcagctgttttgttggttggttggttggtttttgtttggttttgtttaaatgggcaagaagtaaataatgtggctggaatacaagttgaacaaactagaagacacaaatctaacatagtttttatggaccaaggaacttgtatattgtataagctttagtaaaaggtacattttcaccatacctttttttatatcacggtattatagtacaccttgttaccaaataggttgttctcttccccacccacctttgagcttttgctctaaaatacattcaggttccaagcctgaccatccttgtttaatctatcatactcttccaggttttttttttttggtctaaggctggaacttttttcttttttttcagctgaagtcttatgacttttcatgagtcaaaatt

SEQ ID NO: 25723 - DNA, 1697 bp, Homo sapiens
  source 1..1697: mol_type = unassigned DNA
acccattgaggaggtgtttcatctaggcctgtgaaacgcagcccattttcccaggacccctcctcccttctcctcggccccgcctcctgacccctccattcctcgtccccgtagtaatcccctccggttttcctcagtctccacgtacgtccctcaaagcgcgtcctaaaacccggataaccggagcgctccccatggaccacacggagggctcgcccgcggaggagccgcctgcgcatgctccatcgcctgggaaatttggtgagcggcctccacctaaacgacttactagggaagctatgcgaaattatttaaaagagcgaggggatcaaacagtacttattcttcatgcaaaagttgcacagaagtcatatggaaatgaaaaaaggtttttttgcccacctccttgtgtatatcttatgggcagtggatggaagaaaaaaaaagaacaaatggaacgcgatggttgttctgaacaagagtctcaaccgtgtgcatttattgggataggaaatagtgaccaagaaatgcagcagctaaacttggaaggaaagaactattgcacagccaaaacattgtatatatctgactcagacaagcgaaagcacttcatgttgtctgtaaagatgttctatggcaacagtgatgacattggtgtgttcctcagcaagcggataaaagtcatctccaaaccttccaaaaagaagcagtcattgaaaaatgctgacttatgcattgcctcaggaacaaaggtggctctgtttaatcgactacgatcccagacagttagtaccagatacttgcatgtagaaggaggtaattttcatgccagttcacagcagtggggagccttttttattcatctcttggatgatgatgaatcagaaggagaagaattcacagtccgagatggctacatccattatggacaaacagtcaaacttgtgtgctcagttactggcatggcactcccaagattgataattaggaaagttgataagcagaccgcattattggatgcagatgatcctgtgtcacaactccataaatgtgcattttaccttaaggatacagaaagaatgtatttgtgcctttctcaagaaagaataattcaatttcaggccactccatgtccaaaagaaccaaataaagagatgataaatgatggcgcttcctggacaatcattagcacagataaggcagagtatacattttatgagggaatgggccctgtccttgccccagtcactcctgtgcctgtggtagagagccttcagttgaatggcggtggggacgtagcaatgcttgaacttacaggacagaatttcactccaaatttacgagtgtggtttggggatgtagaagctgaaactatgtacaggtgtggagagagtatgctctgtgtcgtcccagacatttctgcattccgagaaggttggagatgggtccggcaaccagtccaggttccagtaactttggtccgaaatgatggaatcatttattccaccagccttacctttacctacacaccagaaccagggccgcggccacattgcagtgcagcaggagcaatccttcgagccaattcaagccaggtgccccctaacgaatcaaacacaaacagcgagggaagttacacaaacgccagcacaaattcaaccagtgtcacatcatctacagccacagtggtatcctaa

SEQ ID NO: 25724 - DNA, 731 bp, Homo sapiens
  source 1..731: mol_type = unassigned DNA
tacagatacactggctgaggtgttttgaggtgcatcgaagtgttccaagctgtgacttaccttaacatgttcttgaagtaccatggcgtggattaaaagggtcttgctctgtcatccaggctagagtggactggtgcgatctcagctcactgcagcctcgacttcctggactcaatcttgcttcaaggtctttttcaagtgctgtgtcttcactgtctcagaagtttacacttcctatttcagaggaaataacaggaaatttggtgagcggcctccacctaaacgacttactagggaagctatgcgaaattatttaaaagagcgaggggatcaaacagtacttattcttcatgcaaaagttgcacagaagtcatatggaaatgaaaaaaggtttttttgcccacctccttgtgtatatcttatgggcagtggatggaagaaaaaaaaagaacaaatggaacgcgatggttgttctgaacaagagtctcaaccgtgtgcatttattgggataggaaatagtgaccaagaaatgcagcagctaaacttggaaggaaagaactattgcacagccaaaacattgtatatatctgactcagacaagcgaaagcacttcatgttgtctgtaaagatgttctatggcaacagtgatgacattggtgtgttcctcagcaagcggataaaagtcatctccaaaccttccaaaaagaagcagtcattgaaaaatgctgact

SEQ ID NO: 25725 - DNA, 758 bp, Homo sapiens
  source 1..758: mol_type = unassigned DNA
gggggccccgtgcatctttgttcctcgcggccgttgtcgccgcttcgccccgctagtgcccccggccccgggcgctttgtctttcaccgctacccgctgcgactctctacccccggccctttgtttcgccgccttgggcgctttgtccgacccgtggcgtcccgcatcccctctccatctcctcccctccgctgtccttcctcccgtgcccctttgttgtgccacactcttgtcgttagcccagtgacctgccacagcccgggcaccagatttctgccttaattgttcttccattgtctttctcctgtgggtcccctctcacctttctgtatggtcctggatcaccccccgaggctttgtctcccccatccacgggcttattctctcggcacccccttcctctcccgtcatcggttgatttatccacaacccacggtgtacgtctgctgaactgtctcagccccggggactccatctgctgcttctaagtgcacacaagactctacgtcattgaaattatgagactatcattcaaatggaagcattatagttcttcggaaccattatgatctcaaaacgaaaggagaatgatacagatacactggctgaggtgttttgaggtgcatcgaagtgttccaagctgtgacttaccttaacatgttcttgaagtaccatggcgtggattaaaaggaaatttggtgagcggcctccacctaaacgacttactagggaagctatgcgaaattatttaaaagagc

SEQ ID NO: 25726 - DNA, 566 bp, Homo sapiens
  source 1..566: mol_type = unassigned DNA
agtggaaggcggtgggaaggaggtgtagcgtgagactggactgcccgcattgggtacatgcgcagtgccgctcgcgcgggccgcgccaatcctgcagcgccttcaacagtcattgaaattatgagactatcattcaaatggaagcattatagttcttcggaaccattatgatctcaaaacgaaaggagaatgatacagatacactggctgaggtgttttgaggtgcatcgaagtgttccaagctgtgacttaccttaacatgttcttgaagtaccatggcgtggattaaaaggaaatttggtgagcggcctccacctaaacgacttactagggaagctatgcgaaattatttaaaagagcgaggggatcaaacagtacttattcttcatgcaaaagttgcacagaagtcatatggaaatgaaaaaaggtttttttgcccacctccttgtgtatatcttatgggcagtggatggaagaaaaaaaaagaacaaatggaacgcgatggttgttctgaacaagagtctcaaccgtgtgcatttattgggataggaaatagtgaccaagaa

SEQ ID NO: 25727 - DNA, 1689 bp, Homo sapiens
  source 1..1689: mol_type = unassigned DNA
agcccagtgacctgccacagcccgggcaccagatttctgccttaattgttcttccattgtctttctcctgaaatttggtgagcggcctccacctaaacgacttactagggaagctatgcgaaattatttaaaagagcgaggggatcaaacagtacttattcttcatgcaaaagttgcacagaagtcatatggaaatgaaaaaaggtttttttgcccacctccttgtgtatatcttatgggcagtggatggaagaaaaaaaaagaacaaatggaacgcgatggttgttctgaacaagagtctcaaccgtgtgcatttattgggataggaaatagtgaccaagaaatgcagcagctaaacttggaaggaaagaactattgcacagccaaaacattgtatatatctgactcagacaagcgaaagcacttcatgttgtctgtaaagatgttctatggcaacagtgatgacattggtgtgttcctcagcaagcggataaaagtcatctccaaaccttccaaaaagaagcagtcattgaaaaatgctgacttatgcattgcctcaggaacaaaggtggctctgtttaatcgactacgatcccagacagttagtaccagatacttgcatgtagaaggaggtaattttcatgccagttcacagcagtggggagccttttttattcatctcttggatgatgatgaatcagaaggagaagaattcacagtccgagatggctacatccattatggacaaacagtcaaacttgtgtgctcagttactggcatggcactcccaagattgataattaggaaagttgataagcagaccgcattattggatgcagatgatcctgtgtcacaactccataaatgtgcattttaccttaaggatacagaaagaatgtatttgtgcctttctcaagaaagaataattcaatttcaggccactccatgtccaaaagaaccaaataaagagatgataaatgatggcgcttcctggacaatcattagcacagataaggcagagtatacattttatgagggaatgggccctgtccttgccccagtcactcctgtgcctgtggtagagagccttcagttgaatggcggtggggacgtagcaatgcttgaacttacaggacagaatttcactccaaatttacgagtgtggtttggggatgtagaagctgaaactatgtacaggtgtggagagagtatgctctgtgtcgtcccagacatttctgcattccgagaaggttggagatgggtccggcaaccagtccaggttccagtaactttggtccgaaatgatggaatcatttattccaccagccttacctttacctacacaccagaaccagggccgcggccacattgcagtgcagcaggagcaatccttcgagccaattcaagccaggtgccccctaacgaatcaaacacaaacagcgagggaagttacacaaacgccagcacaaattcaaccagtgtcacatcatctacagccacagtggtatcctaactaccgtctttttgctaggacttaaactgacttgagtgtggcaaaaagttaacaaaaaaggagaaaaaatgaacaatcgtttgtggtttcttgggaaaacttttcataccaggtgatactattcaaaaaccccgttgtctccctgcaagtgctgatttgaaatgcagaagccacag

SEQ ID NO: 25728 - DNA, 607 bp, Homo sapiens
  source 1..607: mol_type = unassigned DNA
ttagaaggaggctcaagatgtatatatgtgtttttctgttagtgtttgagaatagtttcagatagccacaatggatattcatttggcgtgaaatttggtgagcggcctccacctaaacgacttactagggaagctatgcgaaattatttaaaagagcgaggggatcaaacagtacttattcttcatgcaaaagttgcacagaagtcatatggaaatgaaaaaaggtttttttgcccacctccttgtgtatatcttatgggcagtggatggaagaaaaaaaaagaacaaatggaacgcgatggttgttctgaacaagagtctcaaccgtgtgcatttattgggataggaaatagtgaccaagaaatgcagcagctaaacttggaaggaaagaactattgcacagccaaaacattgtatatatctgactcagacaagcgaaagcacttcatgttgtctgtaaagatgttctatggcaacagtgatgacattggtgtgttcctcagcaagcggataaaagtcatctccaaaccttccaaaaagaagcagtcattgaaaaatgctgacttatgcattgcctcaggaacaaaggtggctctgtttaatcgac

SEQ ID NO: 25729 - DNA, 555 bp, Homo sapiens
  source 1..555: mol_type = unassigned DNA
atcgcctgggtaggtttccagggaaggcagcgagcaggatcccctactctgcgggcggcgcgaggcgtctggctcttcgcggcggcggcgaggggaaagggagcgcgggggctgggtggaatcgaggagtgaggaaaaagggaaggggcgggggagagggaccagggaaggcgtcggggggaatctcgcgagggttggagttttggcgagagtttgtggaagatggcgcctgttgtgacaggtcattgaaattatgagactatcattcaaatggaagcattatagttcttcggaaccattatgatctcaaaacgaaaggagaatgatacagatacactggctgaggtgttttgaggtgcatcgaagtgttccaagctgtgacttaccttaacatgttcttgaagtaccatggcgtggattaaaaggaaatttggtgagcggcctccacctaaacgacttactagggaagctatgcgaaattatttaaaagagcgaggggatcaaacagtacttattcttcatgcaaaagttgcacagaagtcatatggaaatgaa

SEQ ID NO: 25730 - DNA, 572 bp, Homo sapiens
  source 1..572: mol_type = unassigned DNA
gagcgggccggggcgggcgtggcgtgggtgtgccaggagctccgcggttgccgcgaagcgagctggagctgaccctcggcgtccctcattgaaattatgagactatcattcaaatggaagcattatagttcttcggaaccattatgatctcaaaacgaaaggagaatgatacagatacactggctgaggtgttttgaggtgcatcgaagtgttccaagctgtgacttaccttaacatgttcttgaagtaccatggcgtggattaaaaggaaatttggtgagcggcctccacctaaacgacttactagggaagctatgcgaaattatttaaaagagcgaggggatcaaacagtacttattcttcatgcaaaagttgcacagaagtcatatggaaatgaaaaaaggtttttttgcccacctccttgtgtatatcttatgggcagtggatggaagaaaaaaaaagaacaaatggaacgcgatggttgttctgaacaagagtctcaaccgtgtgcatttattgggataggaaatagtgaccaagaaatgcagcagctaaacttggaaggaaagaac

SEQ ID NO: 25731 - DNA, 609 bp, Homo sapiens
  source 1..609: mol_type = unassigned DNA
ttcattctgacatttttacttcctttgttgccaggcaaagtggccaccagattgggtggaaggggctctttctacggcatttcatgactgagcctccaagaacaacctgtattgagtttctctttgagatgattggactgctctatccagcatcattgagtcattgaaattatgagactatcattcaaatggaagcattatagttcttcggaaccattatgatctcaaaacgaaaggagaatgatacagatacactggctgaggtgttttgaggtgcatcgaagtgttccaagctgtgacttaccttaacatgttcttgaagtaccatggcgtggattaaaaggaaatttggtgagcggcctccacctaaacgacttactagggaagctatgcgaaattatttaaaagagcgaggggatcaaacagtacttattcttcatgcaaaagttgcacagaagtcatatggaaatgaaaaaaggtttttttgcccacctccttgtgtatatcttatgggcagtggatggaagaaaaaaaaagaacaaatggaacgcgatggttgttctgaacaagagtctcaaccgtgtgcatttattgggataggaaatagtg

SEQ ID NO: 25732 - DNA, 795 bp, Homo sapiens
  source 1..795: mol_type = unassigned DNA
gtagcgtgagactggactgcccgcattgggtacatgcgcagtgccgctcgcgcgggccgcgccaatcctgcagcgccttcaacaggtttcgggcggcgaattccagttctccgggttttggggctccctgcgggaggcagtgctggatctgggaatctctaggaaaggaaagagcaaaggaggggaaagatggggggctgcagtctccacgtacgtccctcaaagcgcgtcctaaaacccggataaccggagcgctccccatggaccacacggagggctcgcccgcggaggagccgcctgcgcatgctccatcgcctgggaaatttggtgagcggcctccacctaaacgacttactagggaagctatgcgaaattatttaaaagagcgaggggatcaaacagtacttattcttcatgcaaaagttgcacagaagtcatatggaaatgaaaaaaggtttttttgcccacctccttgtgtatatcttatgggcagtggatggaagaaaaaaaaagaacaaatggaacgcgatggttgttctgaacaagagtctcaaccgtgtgcatttattgggataggaaatagtgaccaagaaatgcagcagctaaacttggaaggaaagaactattgcacagccaaaacattgtatatatctgactcagacaagcgaaagcacttcatgttgtctgtaaagatgttctatggcaacagtgatgacattggtgtgttcctcagcaagcggataaaagtcatctccaaaccttccaaaaagaagcagtcattgaaaaatgctgact

SEQ ID NO: 25733 - DNA, 578 bp, Homo sapiens
  source 1..578: mol_type = unassigned DNA
tatatttaccaggattactatgctgaaggtattcttcaagagtttgttttttttctactggttgatctctacttttagaagtcattgaaattatgagactatcattcaaatggaagcattatagttcttcggaaccattatgatctcaaaacgaaaggagaatgatacagatacactggctgaggtgttttgaggtgcatcgaagtgttccaagctgtgacttaccttaacatgttcttgaagtaccatggcgtggattaaaaggaaatttggtgagcggcctccacctaaacgacttactagggaagctatgcgaaattatttaaaagagcgaggggatcaaacagtacttattcttcatgcaaaagttgcacagaagtcatatggaaatgaaaaaaggtttttttgcccacctccttgtgtatatcttatgggcagtggatggaagaaaaaaaaagaacaaatggaacgcgatggttgttctgaacaagagtctcaaccgtgtgcatttattgggataggaaatagtgaccaagaaatgcagcagctaaacttggaaggaaagaactattgcacag

SEQ ID NO: 25734 - DNA, 569 bp, Homo sapiens
  source 1..569: mol_type = unassigned DNA
gcaatctaggctgcctgaggatgattggagggtatcgtaggacggttagaaggaggctcaagattcattgaaattatgagactatcattcaaatggaagcattatagttcttcggaaccattatgatctcaaaacgaaaggagaatgatacagatacactggctgaggtgttttgaggtgcatcgaagtgttccaagctgtgacttaccttaacatgttcttgaagtaccatggcgtggattaaaaggaaatttggtgagcggcctccacctaaacgacttactagggaagctatgcgaaattatttaaaagagcgaggggatcaaacagtacttattcttcatgcaaaagttgcacagaagtcatatggaaatgaaaaaaggtttttttgcccacctccttgtgtatatcttatgggcagtggatggaagaaaaaaaaagaacaaatggaacgcgatggttgttctgaacaagagtctcaaccgtgtgcatttattgggataggaaatagtgaccaagaaatgcagcagctaaacttggaaggaaagaactattgcacagccaaaaca

SEQ ID NO: 25735 - DNA, 340 bp, Homo sapiens
  source 1..340: mol_type = unassigned DNA
gagccgcctgcgcatgctccatcgcctggtcattgaaattatgagactatcattcaaatggaagcattatagttcttcggaaccattatgatctcaaaacgaaaggagaatgatacagatacactggctgaggtgttttgaggtgcatcgaagtgttccaagctgtgacttaccttaacatgttcttgaagtaccatggcgtggattaaaaggaaatttggtgagcggcctccacctaaacgacttactagggaagctatgcgaaattatttaaaagagcgaggggatcaaacagtacttattcttcatgcaaaagttgcacagaagtcatatggaaatg

SEQ ID NO: 25736 - DNA, 698 bp, Homo sapiens
  source 1..698: mol_type = unassigned DNA
gtgtttgttattgtgaatccctaagggtgactgttttttcagcagggcgagttaggacggcacaaactgagagtttctgttctggaaatttggtgagcggcctccacctaaacgacttactagggaagctatgcgaaattatttaaaagagcgaggggatcaaacagtacttattcttcatgcaaaagttgcacagaagtcatatggaaatgaaaaaaggtttttttgcccacctccttgtgtatatcttatgggcagtggatggaagaaaaaaaaagaacaaatggaacgcgatggttgttctgaacaagagtctcaaccgtgtgcatttattgggataggaaatagtgaccaagaaatgcagcagctaaacttggaaggaaagaactattgcacagccaaaacattgtatatatctgactcagacaagcgaaagcacttcatgttgtctgtaaagatgttctatggcaacagtgatgacattggtgtgttcctcagcaagcggataaaagtcatctccaaaccttccaaaaagaagcagtcattgaaaaatgctgacttatgcattgcctcaggaacaaaggtggctctgtttaatcgactacgatcccagacagttagtaccagatacttgcatgtagaaggaggtaattttcatgccagttcacagcagtggggagccttttttattcatctct

SEQ ID NO: 25737 - DNA, 1054 bp, Homo sapiens
  source 1..1054: mol_type = unassigned DNA
atctgtgattggctgaacggaccgacccggaagggtggatgctctcagctggctggcgggaagattttactcccgagtagcggaaagatctgctcgaggcctgggtgctttggtgtcggagatccgagagtcggagatcggagagtcggacacaggacagtcggacaccggacagtcaaacaccggagagttagaccgggcttctcgggcgaggccggtctgtagcggatcacttcctttcgcccacacattggcggaggagaaaccggaaagttaatcactgccctgctctgagaactcgggcctttaggggcacgttcgcctgctgaccggtcttctgatctccccattcttttccatgcaggaggattggccaccaaagcctgtttattagcagctgccatttgttgaaagaaatttggattattttagaaacaaatttggaaagaaaaagaatggcgtccgtttcagctctaactgaggaactggattctataaccagtgagctacatgcagtagaaattcaaattcaagaacttacggaaaggcaacaagagcttattcagaaaaaaaaagtcctgacaaagaaaataaagcagtgtttagaggattctgatgccggggcaagcaatgaatatgattcttcacctgccgcttggaataaagaagattttccatggtctggtaaagttaaagatattctgcaaaatgtctttaaactggaaaagttcagaccacttcagcttgaaactattaacgtaacaatggctggaaaggaggtatttcttgttatgcctacaggaggtggaaagagcttatgttaccagttaccagcattatgttcagatggttttacactcgtcatttgcccattgatctctcttatggaagaccaattaatggttttaaaacaattaggaatttcagcaaccatgttaaatgcttctagttctaaggagcatgttaaatgggttcatgctgaaatggtaaataaaaactccgagttaaagctgatttatgtgactccagagaaaattgcaaaaagcaaaatgtt

SEQ ID NO: 25738 - DNA, 932 bp, Homo sapiens
  source 1..932: mol_type = unassigned DNA
atctgtgattggctgaacggaccgacccggaagggtggatgctctcagctggctggcgggaagattttactcccgagtagcggaaagatctgctcgaggcctgggtgctttggtgtcggagatccgagagtcggagatcggagagtcggacacaggacagtcggacaccggacagtcaaacaccggagagttagaccgggcttctcggaggattggccaccaaagcctgtttattagcagctgccatttgttgaaagaaatttggattattttagaaacaaatttggaaagaaaaagaatggcgtccgtttcagctctaactgaggaactggattctataaccagtgagctacatgcagtagaaattcaaattcaagaacttacggaaaggcaacaagagcttattcagaaaaaaaaagtcctgacaaagaaaataaagcagtgtttagaggattctgatgccggggcaagcaatgaatatgattcttcacctgccgcttggaataaagaagattttccatggtctggtaaagttaaagatattctgcaaaatgtctttaaactggaaaagttcagaccacttcagcttgaaactattaacgtaacaatggctggaaaggaggtatttcttgttatgcctacaggaggtggaaagagcttatgttaccagttaccagcattatgttcagatggttttacactcgtcatttgcccattgatctctcttatggaagaccaattaatggttttaaaacaattaggaatttcagcaaccatgttaaatgcttctagttctaaggagcatgttaaatgggttcatgctgaaatggtaaataaaaactccgagttaaagctgatttatgtgactccagagaaaattgcaaaaagcaaaatgtttatgtcaagactagagaaagcctatgaagcaagga

SEQ ID NO: 25739 - DNA, 2572 bp, Homo sapiens
  source 1..2572: mol_type = unassigned DNA
gagatccgagagtcggagatcggagagtcggacacaggacagtcggacaccggacagtcaaacaccggagagttagaccgggcttctcggtggggagaggctctgggataactactgttacagctttgaagggtcaagggaggattggccaccaaagcctgtttattagcagctgccatttgttgaaagaaatttggattattttagaaacaaatttggaaagaaaaagaatggcgtccgtttcagctctaactgaggaactggattctataaccagtgagctacatgcagtagaaattcaaattcaagaacttacggaaaggcaacaagagcttattcagaaaaaaaaagtcctgacaaagaaaataaagcagtgtttagaggattctgatgccggggcaagcaatgaatatgattcttcacctgccgcttggaataaagaagattttccatggtctggtaaagttaaagatattctgcaaaatgtctttaaactggaaaagttcagaccacttcagcttgaaactattaacgtaacaatggctggaaaggaggtatttcttgttatgcctacaggaggtggaaagagcttatgttaccagttaccagcattatgttcagatggttttacactcgtcatttgcccattgatctctcttatggaagaccaattaatggttttaaaacaattaggaatttcagcaaccatgttaaatgcttctagttctaaggagcatgttaaatgggttcatgctgaaatggtaaataaaaactccgagttaaagctgatttatgtgactccagagaaaattgcaaaaagcaaaatgtttatgtcaagactagagaaagcctatgaagcaaggagatttactcgaattgctgtggatgaagttcactgctgtagtcagtggggacatgatttcagacctgattataaggcacttggtatcttaaagcggcagttccctaacgcatcactaattgggctgactgcaactgcaacaaatcacgttttgacggatgctcagaaaattttgtgcattgaaaagtgttttacttttacagcttcttttaataggccaaatctatattatgaggttcggcagaagccctcaaacactgaagattttattgaggatattgtaaagctcattaatgggagatacaaagggcaatcaggaatcatatattgtttttctcagaaagactctgaacaagttacggttagtttgcagaatctgggaattcatgcaggtgcttaccatgccaatttggagccagaagataagaccacagttcatagaaaatggtcagccaatgaaattcaggtagtagtggcaactgttgcatttggtatgggaattgataagccagatgtgaggtttgttatccatcattcaatgagtaaatccatggaaaattattaccaagagagtggacgtgcaggtcgagatgacatgaaagcagactgtattttgtactacggctttggagatatattcagaataagttcaatggtggtgatggaaaatgtgggacagcagaagctttatgagatggtatcatactgtcaaaacataagcaaatgtcgtcgtgtgttgatggctcaacattttgatgaagtatggaactcagaagcatgtaacaaaatgtgcgataactgctgtaaagacagtgcatttgaaagaaagaacataacagagtactgcagagatctaatcaagatcctgaagcaggcagaggaactgaatgaaaaactcactccattgaaactgattgattcttggatgggaaagggtgcagcaaaactgagagtagcaggtgttgtggctcccacacttcctcgtgaagatctggagaagattattgcacactttctaatacagcagtatcttaaagaagactacagttttacagcttatgctaccatttcgtatttgaaaataggacctaaagctaatcttctgaacaatgaggcacatgctattactatgcaagtgacaaagtccacgcagaactctttcagggctgaatcgtctcaaacttgtcattctgaacaaggtgataaaaagatggaggaaaaaaattcaggcaacttccagaagaaggctgcaaacatgcttcagcaatctggttctaagaatacaggagctaagaaaagaaaaatcgatgatgcctgatatgaatgttactaaattttctaattaaagatggtttatgcatgtatatgccattatttttgtagttagacaatagtttttaaaagaatttcatagatattttatatgtatggatctatattttcagagcttatctctgaagatctaaacttttgagaatgtttgaaaattagagatcatgaattatataattttccagtataaaacaagggaaaaatttttatgtaaaaccctttaaatgtaaaatatttgagaataagttcatacaatcgtcttaagttttttatgcctttatatacttagctatattttttcttttgacataactatctttttgaaagcaatattatactgacagaggctcactgagtgatactttaagttaaatatgt

SEQ ID NO: 25740 - DNA, 3702 bp, Homo sapiens
  source 1..3702: mol_type = unassigned DNA
gtagcggaaagatctgctcgaggcctgggtgctttggtgtcggagatccgagagtcggagatcggagagtcggacacaggacagtcggacaccggacagtcaaacaccggagagttagaccgggcttctcggtggggagaggctctgggataactactgttacagctttgaagggtcaagggtgtgcgctttttgtttcatccttccctttcctgctgcagggcgaggccggtctgtagcggatcacttcctttcgcccacacattggcggaggagaaaccggaaagttaatcactgccctgctctgagaactcgggcctttaggggcacgttcgcctgctgaccggtcttctgatctccccattcttttccatgcaggaggattggccaccaaagcctgtttattagcagctgccatttgttgaaagaaatttggattattttagaaacaaatttggaaagaaaaagaatggcgtccgtttcagctctaactgaggaactggattctataaccagtgagctacatgcagtagaaattcaaattcaagaacttacggaaaggcaacaagagcttattcagaaaaaaaaagtcctgacaaagaaaataaagcagtgtttagaggattctgatgccggggcaagcaatgaatatgattcttcacctgccgcttggaataaagaagattttccatggtctggtaaagttaaagatattctgcaaaatgtctttaaactggaaaagttcagaccacttcagcttgaaactattaacgtaacaatggctggaaaggaggtatttcttgttatgcctacaggaggtggaaagagcttatgttaccagttaccagcattatgttcagatggttttacactcgtcatttgcccattgatctctcttatggaagaccaattaatggttttaaaacaattaggaatttcagcaaccatgttaaatgcttctagttctaaggagcatgttaaatgggttcatgctgaaatggtaaataaaaactccgagttaaagctgatttatgtgactccagagaaaattgcaaaaagcaaaatgtttatgtcaagactagagaaagcctatgaagcaaggagatttactcgaattgctgtggatgaagttcactgctgtagtcagtggggacatgatttcagacctgattataaggcacttggtatcttaaagcggcagttccctaacgcatcactaattgggctgactgcaactgcaacaaatcacgttttgacggatgctcagaaaattttgtgcattgaaaagtgttttacttttacagcttcttttaataggccaaatctatattatgaggttcggcagaagccctcaaacactgaagattttattgaggatattgtaaagctcattaatgggagatacaaagggcaatcaggaatcatatattgtttttctcagaaagactctgaacaagttacggttagtttgcagaatctgggaattcatgcaggtgcttaccatgccaatttggagccagaagataagaccacagttcatagaaaatggtcagccaatgaaattcaggtagtagtggcaactgttgcatttggtatgggaattgataagccagatgtgaggtttgttatccatcattcaatgagtaaatccatggaaaattattaccaagagagtggacgtgcaggtcgagatgacatgaaagcagactgtattttgtactacggctttggagatatattcagaataagttcaatggtggtgatggaaaatgtgggacagcagaagctttatgagatggtatcatactgtcaaaacataagcaaatgtcgtcgtgtgttgatggctcaacattttgatgaagtatggaactcagaagcatgtaacaaaatgtgcgataactgctgtaaagacagtgcatttgaaagaaagaacataacagagtactgcagagatctaatcaagatcctgaagcaggcagaggaactgaatgaaaaactcactccattgaaactgattgattcttggatgggaaagggtgcagcaaaactgagagtagcaggtgttgtggctcccacacttcctcgtgaagatctggagaagattattgcacactttctaatacagcagtatcttaaagaagactacagttttacagcttatgctaccatttcgtatttgaaaataggacctaaagctaatcttctgaacaatgaggcacatgctattactatgcaagtgacaaagtccacgcagaactctttcagggctgaatcgtctcaaacttgtcattctgaacaaggtgataaaaagatggaggaaaaaaattcaggcaacttccagaagaaggctgcaaacatgcttcagcaatctggttctaagaatacaggagctaagaaaagaaaaatcgatgatgcctgatatgaatgttactaaattttctaattaaagatggtttatgcatgtatatgccattatttttgtagttagacaatagtttttaaaagaatttcatagatattttatatgtatggatctatattttcagagcttatctctgaagatctaaacttttgagaatgtttgaaaattagagatcatgaattatataattttccagtataaaacaagggaaaaatttttatgtaaaaccctttaaatgtaaaatatttgagaataagttcatacaatcgtcttaagttttttatgcctttatatacttagctatattttttcttttgacataactatctttttgaaagcaatattatactgacagaggctcactgagtgatactttaagttaaatatgtagatcaaggatgtccaatcttttggcttccctgagccacattggaagaagaattgtcttgggccgcacataaaatatgctaacactgatgatagctgatgagcttaaaaaaaaaattgcaagaaaaatctcatgttttaagaaagtttacaaaaaatgtaaaatatttgagaataagttcatgtaattgtcttaagttttttatgcctttatatacttagctatattttttcttttgacataaccatctttttgaaagcaatattatactgacagaggttcactgagtgatactttaagttaaatatgtagatcagggatgtccaatcttttggcttccctgagccacattggaagaagaattgtcttgggccgcacataaaatatgctaacactgacgatagctgatgagcttaaaaaaaaaaaaattgcaagaaaaatctcatgttttaagaaagtttacagatttgtgttgggctgcattcaaagctgttctgggctgcattagacccgtgggctagagttggacaagcttgtagatgatttcaggttataaaaccagaagtacaattcaacaaaaaaggagtaagtcatcaatataaatattagcaaacgagatattgctacatctctatttaaagtaaaatacaaccgattttaaagttcctgaaaccatagccatattttgacatttcacaaagaatggttctagtctactagagtacatttggctaagtagataacttacctaaatttgctccaaagctaaatcacaagtaaacatatttatgtttaaaacacagaaataaataacttaagatttttatctaagcggtcagtgttgtattggaaagatatatctataaataaactttgaactgatttcaaactt

SEQ ID NO: 25741 - DNA, 565 bp, Homo sapiens
  source 1..565: mol_type = unassigned DNA
gattggctgaacggaccgacccggaagggtggatgctctcagctggctggcgggaagattttactcccgagtagcggaaagatctgctcgaggcctgggtgctttggtgtcggagatccgagagtcggagatcggagagtcggacacaggacagtcggacaccggacagtcaaacaccggagagttagaccgggcttctcgaaagaaatttggattattttagaaacaaatttggaaagaaaaagaatggcgtccgtttcagctctaactgaggaactggattctataaccagtgagctacatgcagtagaaattcaaattcaagaacttacggaaaggcaacaagagcttattcagaaaaaaaaagtcctgacaaagaaaataaagcagtgtttagaggattctgatgccggggcaagcaatgaatatgattcttcacctgccgcttggaataaagaagattttccatggtctggtaaagttaaagatattctgcaaaatgtctttaaactggaaaagttcagaccacttcagcttgaaactattaacgtaacaatggctggaa

SEQ ID NO: 25742 - DNA, 578 bp, Homo sapiens
  source 1..578: mol_type = unassigned DNA
gaacggaccgacccggaagggtggatgctctcagctggctggcgggaagattttactcccgagtagcggaaagatctgctcgaggcctgggtgctttggtgtcggagatccgagagtcggagatcggagagtcggacacaggacagtcggacaccggacagtcaaacaccggagagttagaccgggcttctcggtggggagaggctctgggataactactgttacagctttgaagggtcaaggaaagaaatttggattattttagaaacaaatttggaaagaaaaagaatggcgtccgtttcagctctaactgaggaactggattctataaccagtgagctacatgcagtagaaattcaaattcaagaacttacggaaaggcaacaagagcttattcagaaaaaaaaagtcctgacaaagaaaataaagcagtgtttagaggattctgatgccggggcaagcaatgaatatgattcttcacctgccgcttggaataaagaagattttccatggtctggtaaagttaaagatattctgcaaaatgtctttaaactggaaaagttcagaccacttcagct

SEQ ID NO: 25743 - DNA, 579 bp, Homo sapiens
  source 1..579: mol_type = unassigned DNA
gtagcggaaagatctgctcgaggcctgggtgctttggtgtcggagatccgagagtcggagatcggagagtcggacacaggacagtcggacaccggacagtcaaacaccggagaggcgaggccggtctgtagcggatcacttcctttcgcccacacattggcggaggagaaaccggaaagttaatcactgccctgctctgagaactcgggcctttaggggcacgttcgcctgctgaccggtcttctgatctccccattcttttccatgcaggaggattggccaccaaagcctgtttattagcagctgccatttgttgaaagaaatttggattattttagaaacaaatttggaaagaaaaagaatggcgtccgtttcagctctaactgaggaactggattctataaccagtgagctacatgcagtagaaattcaaattcaagaacttacggaaaggcaacaagagcttattcagaaaaaaaaagtcctgacaaagaaaataaagcagtgtttagaggattctgatgccggggcaagcaatgaatatgattcttcacctgccgcttggaataaagaagattt

SEQ ID NO: 25744 - DNA, 600 bp, Homo sapiens
  source 1..600: mol_type = unassigned DNA
gagtagcggaaagatctgctcgaggcctgggtgctttggtgtcggagatccgagagtcggagatcggagagtcggacacaggacagtcggacaccggacagtcaaacaccggagagaggattggccaccaaagcctgtttattagcagctgccatttgttgaaagaaatttggattattttagaaacaaatttggaaagaaaaagaatggcgtccgtttcagctctaactgaggaactggattctataaccagtgagctacatgcagtagaaattcaaattcaagaacttacggaaaggcaacaagagcttattcagaaaaaaaaagtcctgacaaagaaaataaagcagtgtttagaggattctgatgccggggcaagcaatgaatatgattcttcacctgccgcttggaataaagaagattttccatggtctggtaaagttaaagatattctgcaaaatgtctttaaactggaaaagttcagaccacttcagcttgaaactattaacgtaacaatggctggaaaggaggtatttcttgttatgcctacaggaggtggaaagagcttatgttaccagttaccagcattatgttcagatg

SEQ ID NO: 25745 - DNA, 3683 bp, Homo sapiens
  source 1..3683: mol_type = unassigned DNA
atataagattgcgtgggttctgcctaaagctgaattcccagcgctttggcttctctgagttggggttgtgtataggggtcttcgaacagttccggaaccagccagcagcctttaattcttgggcggaccacggccggttctgtgttcttggctaagatgagcagccaccataccacctttccttttgaccctgagcggcgagtccggagtacgctgaagaaggtctttgggtttgactcttttaagacgcctttacaggagagtgcgaccatggctgtagtaaaaggtaacaaggacgtctttgtgtgcatgcccacaggggcaggaaaatccctatgctatcagctccctgctctgttggccaaaggcatcaccattgtagtctctcctctcattgctttgattcaggaccaagtggaccacttgctaaccctaaaggtacgagtaagttccctgaactcgaagctctctgcacaggaaaggaaggagctgcttgctgacctggagcgagaaaagccccagaccaagattctgtacatcaccccagagatggcagcttcatcctccttccagcccaccctgaactccctggtgtcccgccacctgctgtcttacttggtggtggatgaagctcattgtgtttcccaatgggggcatgactttcgtcctgactacttgcgtctgggtgccctgcgctcccgcctgggacatgccccttgtgtggctctgaccgccacagccaccccacaggtccaagaggacgtgtttgctgccctgcacctgaagaaaccagttgccatcttcaagactccctgcttccgggccaacctcttctatgatgtgcaattcaaggaactgatttctgatccctatgggaacctgaaggacttctgccttaaggctcttggacaggaggctgataaagggttatctggctgcggcattgtgtactgcaggactagagaggcttgtgaacagctggccatagagctcagctgcaggggtgtgaacgccaaggcttaccatgcagggctgaaggcctctgaaagaacgctggtgcagaacgactggatggaggagaaggtccctgtaattgttgcaaccattagttttgggatgggagtggataaagccaatgtcaggtttgtcgcccattggaatattgccaagtctatggctgggtactaccaggagtctggccgggctggcagggatgggaagccttcctggtgccgtctctattactccaggaatgaccgggaccaagtcagcttcctgatcaggaaggaagtagcaaaactccaggaaaagagaggaaacaaagcatctgataaagccactatcatggcctttgatgccctggtgaccttctgtgaagaactggggtgccgccatgccgccattgccaagtacttcggggatgcgctgcctgcctgcgccaaaggctgcgaccactgccagaaccccacggccgtgcggaggcggctggaggccttggagcgcagcagcagctggagcaagacctgcatcgggccctcccaggggaacggctttgaccccgagctgtatgagggaggccgcaagggctacggggacttcagcaggtatgacgaaggttctggaggcagcggggatgaaggcagagatgaggcccacaagcgggagtggaacctcttctatcagaagcagatgcagctgcgcaagggcaaagaccccaagatagaagaatttgtacccccagatgagaactgtcccctgaaagaggcttctagcaggaggatccccaggctgactgtgaaggcacgggagcactgcctgcggcttctggaggaggcgctgagcagcaaccgccagtcaacacgtaccgctgatgaagctgacctccgggccaaggccgtggagctggaacatgagacattccggaacgccaaggtggccaacctctacaaggccagcgtgctgaagaaggtggccgatatccacagagcctccaaggatgggcagccctatgacatgggaggcagtgccaagagctgcagtgcccaagctgagcccccggagcccaatgagtatgacattccaccagcctcccatgtgtactcgctcaaacccaagcgggtgggagctggtttccccaaaggctcctgcccgttccagacggccacggaactgatggagacaactcggatcagggagcaagccccccagcccgagcggggaggcgagcacgagcccccgagccggccctgtggcctcctggatgaggatgggagtgagcccctccctgggcccagaggggaggtccctggaggcagcgctcactatggggggccctcccctgagaagaaggcaaaaagttcctctgggggcagctcccttgccaagggccgggctagcaagaaacagcagctcctagccacagcggcccacaaggattctcagagcatcgcccgcttcttctgccgaagggtggaaagcccagctctgctggcatcagccccagaggcagaaggtgcctgcccctcctgtgagggggttcagggacccccgatggccccagagaagtacacaggggaggaagatggagccgggggacattcgcctgcccctccccagactgaggagtgcctcagggagaggccaagcacctgcccgcccagagaccagggcacccctgaagtccagcccacccctgcaaaggacacatggaagggcaagcggcctcgatcccagcaggagaacccagagagccagcctcagaagaggccacgcccctcagccaagccctccgtcgtagctgaggtcaagggcagcgtctcggccagcgaacagggcaccttgaatcccacggctcaagaccccttccagctctccgctcctggcgtctccttgaaggaggctgcaaatgttgtggtcaagtgcctcacccctttctacaaggagggcaagtttgcttccaaggagttgtttaaaggctttgcccgccacctctcacacttgctgactcagaagacctctcctggaaggagcgtgaaagaagaggcccagaacctcatcaggcacttcttccatggccgggcccggtgcgagagcgaagctgactggcatggcctgtgtggcccccagagatgaccaactgctggctgggcagggcccgcgtcctcccccagattctagcatgggtcatcctgggcctcacctgctgatgccagggccatcgtcttttctcagtccttctcctttccaaccatacttggctttggggatgaccccagacaccccctgaatccaggtcagaggtcagcccacctttctttctgcttgcaaagcctatagacccttctcagagcggtcctcatggctgggttttctgggacacatgtcgaggacagaaggtggagggtggtggagctgctgctggaagaaggggaaggaagagtggcccctccccgagttctaagtcaggatgaggcccacctgtccaaggtatcggaacctacccaggggaccctcagatcctccacccactcccccatccattacgatgccagcttccagccttgcccaggtcagagctgtggcagaggagaggcagccaggccctgttcctgctcagctcctgctcaggaaggccaggcctgacagatgtttgggagaggaataaagttgtgttgttgtggggc

SEQ ID NO: 25746 - DNA, 1741 bp, Homo sapiens
  source 1..1741: mol_type = unassigned DNA
acggatataagattgcgtgggttctgcctaaagctgaattcccagcgctttggcttctctgagttggggttgtgtataggggtcttcgaacagttccggaaccagccagcagcctttaattcttgggcggaccacggccggttctgtgttcttggctaagatgagcagccaccataccacctttccttttgaccctgagcggcgagtccggagtacgctgaagaaggtctttgggtttgactcttttaagacgcctttacaggagagtgcgaccatggctgtagtaaaaggtaacaaggacgtctttgtgtgcatgcccacaggggcaggaaaatccctatgctatcagctccctgctctgttggccaaaggcatcaccattgtagtctctcctctcattgctttgattcaggaccaagtggaccacttgctaaccctaaaggtacgagtaagttccctgaactcgaagctctctgcacaggaaaggaaggagctgcttgctgacctggagcgagaaaagccccagaccaagattctgtacatcaccccagagatggcagcttcatcctccttccagcccaccctgaactccctggtgtcccgccacctgctgtcttacttggtggtggatgaagctcattgtgtttcccaatgggggcatgactttcgtcctgactacttgcgtctgggtgccctgcgctcccgcctgggacatgccccttgtgtggctctgaccgccacagccaccccacaggtccaagaggacgtgtttgctgccctgcacctgaagaaaccagttgccatcttcaagactccctgcttccgggccaacctcttctatgatgtgcaattcaaggaactgatttctgatccctatgggaacctgaaggacttctgccttaaggctcttggacaggaggctgataaagggttatctggctgcggcattgtgtactgcaggactagagaggcttgtgaacagctggccatagagctcagctgcaggggtgtgaacgccaaggcttaccatgcagggctgaaggcctctgaaagaacgctggtgcagaacgactggatggaggagaaggtccctgtaattgttgcaaccattagttttgggatgggagtggataaagccaatgtcaggtttgtcgcccattggaatattgccaagtctatggctgggtactaccaggagtctggccgggctggcagggatgggaagccttcctggtgccgtctctattactccaggaatgaccgggaccaagtcagcttcctgatcaggaaggaagtagcaaaactccaggaaaagagaggaaacaaagcatctgataaagccactatcatggcctttgatgccctggtgaccttctgtgaagaactggggcgatggggcaggggccacggaaagagtctgagggctgcttggtgtagtcaggttgtgtccaggcatgcggagctgtgagtgcctgcaggagagacacccaggaggagtttttacattttggtctaaaaagctcttggattcatctcatctcatggaatgatcctgtcggatgacgctgacgtgattgcttcagacttagaggtgaataaattgaggtccagagaggtcacagtcacgaagctcatggtagactgaggccactaaacacccgtctcctgattttcagtggcgtcctcatttgcatacacctgggccatcttggtttttgcaagaaaaaagcgaggaaatcag

SEQ ID NO: 25747 - DNA, 3702 bp, Homo sapiens
  source 1..3702: mol_type = unassigned DNA
acggatataagattgcgtgggttctgcctaaagctgaattcccagcgctttggcttctctgagttggggttgtgtataggggtcttcgaacagttccggaaccagccagcagcctttaattcttgggcggaccacggccggttctgtgttcttggctaagatgagcagccaccataccacctttccttttgaccctgagcggcgagtccggagtacgctgaagaaggtctttgggtttgactcttttaagacgcctttacaggagagtgcgaccatggctgtagtaaaaggtaacaaggacgtctttgtgtgcatgcccacaggggcaggaaaatccctatgctatcagctccctgctctgttggccaaaggcatcaccattgtagtctctcctctcattgctttgattcaggaccaagtggaccacttgctaaccctaaaggtacgagtaagttccctgaactcgaagctctctgcacaggaaaggaaggagctgcttgctgacctggagcgagaaaagccccagaccaagattctgtacatcaccccagagatggcagcttcatcctccttccagcccaccctgaactccctggtgtcccgccacctgctgtcttacttggtggtggatgaagctcattgtgtttcccaatgggggcatgactttcgtcctgactacttgcgtctgggtgccctgcgctcccgcctgggacatgccccttgtgtggctctgaccgccacagccaccccacaggtccaagaggacgtgtttgctgccctgcacctgaagaaaccagttgccatcttcaagactccctgcttccgggccaacctcttctatgatgtgcaattcaaggaactgatttctgatccctatgggaacctgaaggacttctgccttaaggctcttggacaggaggctgataaagggttatctggctgcggcattgtgtactgcaggactagagaggcttgtgaacagctggccatagagctcagctgcaggggtgtgaacgccaaggcttaccatgcagggctgaaggcctctgaaagaacgctggtgcagaacgactggatggaggagaaggtccctgtaattgttgcaaccattagttttgggatgggagtggataaagccaatgtcaggtttgtcgcccattggaatattgccaagtctatggctgggtactaccaggagtctggccgggctggcagggatgggaagccttcctggtgccgtctctattactccaggaatgaccgggaccaagtcagcttcctgatcaggaaggaagtagcaaaactccaggaaaagagaggaaacaaagcatctgataaagccactatcatggcctttgatgccctggtgaccttctgtgaagaactggggtaagtgacttattttatatgtggagcaaagtgtcagtgagatcatttacttccccggcacgccctagttaagcagctgacataagacagcccgtaggctaccaagggacacctgcctgcaaaggctgttgtgtcgggcagtgtggaagtcaggaccttgctcttctctattggaggccccgggatctctcgcagtgtggggatttgctcagtattctgagtggtgtccttccctccactccaccctcttctgggatggctggccccacaagccactcagttccaagggatgtgaccagctctgagccatcggctttgtggtcatcatgtgccaccgagctgggacttctggcatcacttgagtagtcctcacccttatccaggacccacacagaagcctgtggccccacttacctcggggagtcatgtgctttgaactcacgcatctgttttacctgcatctgcaggcgatggggcaggggccacggaaagagtctgagggctgcttggtgtagtcaggttgtgtccaggcatgcggagctgtgagtgcctgcaggagagacacccaggaggagtttttacattttggtctaaaaagctcttggattcatctcatctcatggaatgatcctgtcggatgacgctgacgtgattgcttcagacttagaggtgaataaattgaggtccagagaggtcacagtcacgaagctcatggtagactgaggccactaaacacccgtctcctgattttcagtggcgtcctcatttgcatacacctgggccatcttggtttttgcaagaaaaaagcgaggaaatcagagaaactctttgggctgtgtgtttttatttccacctcctcctgttgaccagtgagtcggtggcttctggactgaagctattttcttctccaaactgctgtctctaatttggcctctgtggcaagaccacgcccagcaaaagtggtcggctgcagtgccaggaccacccttgcctgcagcctttgcgaccagagcccttttcaagcacaattaatatgggagttgctaaatttggccttcttaggcttcttgagcagagctcttatttctggtgaggaatgaaagggccaagtgttcctgttcattgtgagtcctgtttgctgaaaaaagctctggggctgtctgaggctctggaatgctctctggagggttaactctgcctgtccccagggtctgctccgcctgccaggcaagggaacaggtcctcccaagggcctctgccttcatttctcctgtcaccttccggggagctgggacttcttagtgcatcagtggcctggttgccaggggctggggtccaggcatctgtggactcaaggagtccaggtgacggtgttgcgctgcctcttgagcagcctcgtgcctgtctcctttgctacatgtgatgattctgaaatccaggcagcaggctggaataaacgctgctggtatgtctgtattggctactgttctttgaataagtgaatgtttctttattgcataactggcgtgtagcacaaagaaaaagccccttctccaccagatatttgcttcctaagaatagttctcattggaggctgaggtcgaagcagcctcccaccagcgatcccttggggcgggcacctggcagtgagggacagagctagtggggtgggctcagcagaagtgggtgcatttctgcaaaggaagctgtaggtttcttgtcagtttgttgtggggtctgaggcacatgggagtgggaccagcagaaaagatactcaggtcagttaactaatgaggcggggctgtggcagccagcggttttcctctcttctctatctgtagctactttctctgggctgcagccttgaaaaagcagtgtttgattattcataacaatgagtgtcttttagtgtcacagggaacagttattaggtttgaagcaacctccagcttgaggcctcggcatcttgagatggaagagcagccttgtgtttagacctggattgaattgggccctgttgtttcctgggatcttggggctgggggtgcccaacagcctggcatcttcttgtttctctgtgtgtttactcattcattcatttattcagctgataaatattgactgatgccagctctgtgccaggcacattggacatgggggatacactagtgggcagaaatagccccgtcccagagccggccatggtggctcatacctgttataccagcactttgggaggctgaagtgggaggatcgcttgagcctgggagttcaagaccagcctgggcaacatggcaagaccctgtctctact

SEQ ID NO: 25748 - DNA, 3440 bp, Homo sapiens
  source 1..3440: mol_type = unassigned DNA
aagattgcgtgggttctgcctaaagctgaattcccagcgctttggcttctctgagttggggttgtgtataggggtcttcgaacagttccggaaccagccagcagcctttaattcttgggcggaccacggccggttctgtgttcttggctaagatgagcagccaccataccacctttccttttgaccctgagcggcgagtccggagtacgctgaagaaggtctttgggtttgactcttttaagacgcctttacaggagagtgcgaccatggctgtagtaaaaggtaacaaggacgtctttgtgtgcatgcccacaggggcaggaaaatccctatgctatcagctccctgctctgttggccaaaggcatcaccattgtagtctctcctctcattgctttgattcaggaccaagtggaccacttgctaaccctaaaggtacgagtaagttccctgaactcgaagctctctgcacaggaaaggaaggagctgcttgctgacctggagcgagaaaagccccagaccaagattctgtacatcaccccagagatggcagcttcatcctccttccagcccaccctgaactccctggtgtcccgccacctgctgtcttacttggtggtggatgaagctcattgtgtttcccaatgggggcatgactttcgtcctgactacttgcgtctgggtgccctgcgctcccgcctgggacatgccccttgtgtggctctgaccgccacagccaccccacaggtccaagaggacgtgtttgctgccctgcacctgaagaaaccagttgccatcttcaagactccctgcttccgggccaacctcttctatgatgtgcaattcaaggaactgatttctgatccctatgggaacctgaaggacttctgccttaaggctcttggacaggaggctgataaagggttatctggctgcggcattgtgtactgcaggactagagaggcttgtgaacagctggccatagagctcagctgcaggggtgtgaacgccaaggcttaccatgcagggctgaaggcctctgaaagaacgctggtgcagaacgactggatggaggagaaggtccctgtaattgttgcaaccattagttttgggatgggagtggataaagccaatgtcaggtttgtcgcccattggaatattgccaagtctatggctgggtactaccaggagtctggccgggctggcagggatgggaagccttcctggtgccgtctctattactccaggaatgaccgggaccaagtcagcttcctgatcaggaaggaagtagcaaaactccaggaaaagagaggaaacaaagcatctgataaagccactatcatggcctttgatgccctggtgaccttctgtgaagaactggggtgccgccatgccgccattgccaagtacttcggggatgcgctgcctgcctgcgccaaaggctgcgaccactgccagaaccccacggccgtgcggaggcggctggaggccttggagcgcagcagcagctggagcaagacctgcatcgggccctcccaggggaacggctttgaccccgagctgtatgagggaggccgcaagggctacggggacttcagcaggtatgacgaaggttctggaggcagcggggatgaaggcagagatgaggcccacaagcgggagtggaacctcttctatcagaagcagatgcagctgcgcaagggcaaagaccccaagatagaagaatttgtacccccagatgagaactgtcccctgaaagaggcttctagcaggaggatccccaggctgactgtgaaggcacgggagcactgcctgcggcttctggaggaggcgctgagcagcaaccgccagtcaacacgtaccgctgatgaagctgacctccgggccaaggccgtggagctggaacatgagacattccggaacgccaaggtggccaacctctacaaggccagcgtgctgaagaaggtggccgatatccacagagcctccaaggatgggcagccctatgacatgggaggcagtgccaagagctgcagtgcccaagctgagcccccggagcccaatgagtatgacattccaccagcctcccatgtgtactcgctcaaacccaagcgggtgggagctggtttccccaaaggctcctgcccgttccagacggccacggaactgatggagacaactcggatcagggagcaagccccccagcccgagcggggaggcgagcacgagcccccgagccggccctgtggcctcctggatgaggatgggagtgagcccctccctgggcccagaggggaggtccctggaggcagcgctcactatggggggccctcccctgagaagaaggcaaaaagttcctctgggggcagctcccttgccaagggccgggctagcaagaaacagcagctcctagccacagcggcccacaaggattctcagagcatcgcccgcttcttctgccgaagggtggaaagcccagctctgctggcatcagccccagaggcagaaggtgcctgcccctcctgtgagggggttcagggacccccgatggccccagagaagtacacaggggaggaagatggagccgggggacattcgcctgcccctccccagactgaggagtgcctcagggagaggccaagcacctgcccgcccagagaccagggcacccctgaagtccagcccacccctgcaaaggacacatggaagggcaagcggcctcgatcccagcaggagaacccagagagccagcctcagaagaggccacgcccctcagccaagccctccgtcgtagctgaggtcaagggcagcgtctcggccagcgaacagggcaccttgaatcccacggctcaagaccccttccagctctccgctcctggcgtctccttgaaggaggctgcaaatgttgtggtcaagtgcctcacccctttctacaaggagggcaagtttgcttccaaggagttgtttaaaggctttgcccgccacctctcacacttgctgactcagaagacctctcctggaaggagcgtgaaagaagaggcccagaacctcatcaggcacttcttccatggccgggcccggtgcgagagcggtcctcatggctgggttttctgggacacatgtcgaggacagaaggtggagggtggtggagctgctgctggaagaaggggaaggaagagtggcccctccccgagttctaagtcaggatgaggcccacctgtccaaggtatcggaacctacccaggggaccctcagatcctccacccactcccccatccattacgatgccagcttccagccttgcccaggtcagagctgtggcagaggagaggcagccaggccctgttcctgctcagctcctgctcaggaaggccaggcctgacagatgtttgggagaggaataaagttgtgttgttgtggggcatgcaggcgtgcacacag

SEQ ID NO: 25749 - DNA, 3089 bp, Homo sapiens
  source 1..3089: mol_type = unassigned DNA
tctgtggccattgccactcacctgggagctcaggtgttgggggctgagcagcagtgccccagcgcggagcctccacgtgctgtcctcgtacttccttcgtgggcgccgctgctcccctgggcgcctcagcccagctcctctgctgacagccagctgctgtctctgcctggcttttttgttgttggtcgtcctggagatccaagtgtcaaattaccgtcgcgagggggagcccgaggaagccctgcttgggaacttgtcctccaacttcatgtcccggtgcctcacctctgccctgagagcgctgctcagggacaagacaagctccctctctcctcctccttcctcctcctctccctctccccgactcccacgccgtgggctgggcctgggttgggagctgaagaaagaagtcggctctctgccttcctggccaggaggaccctggggaggctccacctgagcctgtggaggggagtcctgcagcgctctcaggtctggggcacccaccctgccctcaggaaggccaccccttctgtccctctggccactccctggctggtccctccctctggcctctctcaggaacaacagtaaacagtggggagctggtggccctctcaagctgagcaggaggctttgcaaccagtccctggggaggcccttgtgccgctcagcatctgaaggcgtcttgggggagaacttggaatcctgagtgacctgggagtggcctgcgcgcccggcaaggcgcctcatgttccttgtgaggtgccgccatgccgccattgccaagtacttcggggatgcgctgcctgcctgcgccaaaggctgcgaccactgccagaaccccacggccgtgcggaggcggctggaggccttggagcgcagcagcagctggagcaagacctgcatcgggccctcccaggggaacggctttgaccccgagctgtatgagggaggccgcaagggctacggggacttcagcaggtatgacgaaggttctggaggcagcggggatgaaggcagagatgaggcccacaagcgggagtggaacctcttctatcagaagcagatgcagctgcgcaagggcaaagaccccaagatagaagaatttgtacccccagatgagaactgtcccctgaaagaggcttctagcaggaggatccccaggctgactgtgaaggcacgggagcactgcctgcggcttctggaggaggcgctgagcagcaaccgccagtcaacacgtaccgctgatgaagctgacctccgggccaaggccgtggagctggaacatgagacattccggaacgccaaggtggccaacctctacaaggccagcgtgctgaagaaggtggccgatatccacagagcctccaaggatgggcagccctatgacatgggaggcagtgccaagagctgcagtgcccaagctgagcccccggagcccaatgagtatgacattccaccagcctcccatgtgtactcgctcaaacccaagcgggtgggagctggtttccccaaaggctcctgcccgttccagacggccacggaactgatggagacaactcggatcagggagcaagccccccagcccgagcggggaggcgagcacgagcccccgagccggccctgtggcctcctggatgaggatgggagtgagcccctccctgggcccagaggggaggtccctggaggcagcgctcactatggggggccctcccctgagaagaaggcaaaaagttcctctgggggcagctcccttgccaagggccgggctagcaagaaacagcagctcctagccacagcggcccacaaggattctcagagcatcgcccgcttcttctgccgaagggtggaaagcccagctctgctggcatcagccccagaggcagaaggtgcctgcccctcctgtgagggggttcagggacccccgatggccccagagaagtacacaggggaggaagatggagccgggggacattcgcctgcccctccccagactgaggagtgcctcagggagaggccaagcacctgcccgcccagagaccagggcacccctgaagtccagcccacccctgcaaaggacacatggaagggcaagcggcctcgatcccagcaggagaacccagagagccagcctcagaagaggccacgcccctcagccaagccctccgtcgtagctgaggtcaagggcagcgtctcggccagcgaacagggcaccttgaatcccacggctcaagaccccttccagctctccgctcctggcgtctccttgaaggaggctgcaaatgttgtggtcaagtgcctcacccctttctacaaggagggcaagtttgcttccaaggagttgtttaaaggctttgcccgccacctctcacacttgctgactcagaagacctctcctggaaggagcgtgaaagaagaggcccagaacctcatcaggcacttcttccatggccgggcccggtgcgagagcgaagctgactggcatggcctgtgtggcccccagagatgaccaactgctggctgggcagggcccgcgtcctcccccagattctagcatgggtcatcctgggcctcacctgctgatgccagggccatcgtcttttctcagtccttctcctttccaaccatacttggctttggggatgaccccagacaccccctgaatccaggtcagaggtcagcccacctttctttctgcttgcaaagcctatagacccttctcagagcggtcctcatggctgggttttctgggacacatgtcgaggacagaaggtggagggtggtggagctgctgctggaagaaggggaaggaagagtggcccctccccgagttctaagtcaggatgaggcccacctgtccaaggtatcggaacctacccaggggaccctcagatcctccacccactcccccatccattacgatgccagcttccagccttgcccaggtcagagctgtggcagaggagaggcagccaggccctgttcctgctcagctcctgctcaggaaggccaggcctgacagatgtttgggagaggaataaagttgtgttgttgtggggcatgcaggcgtgcacacagcccttttc

SEQ ID NO: 25750 - DNA, 808 bp, Homo sapiens
  source 1..808: mol_type = unassigned DNA
gatataaagctcctacagctacctggcctgagaagccaactcagactcagccaacagagattgttgatttgcctcttaagcaagagattcattgcagctcagcatggctcagaccagctcatacttcatgctgatctcctgcctgatgtttctgtctcagagccaaggccaagaggcccagacagagttgccccaggcccggatcagctgcccagaaggcaccaatgcctatcgctcctactgctactactttaatgaagaccgtgagacctgggttgatgcagatctctattgccagaacatgaattcgggcaacctggtgtctgtgctcacccaggccgagggtgcctttgtggcctcactgattaaggagagtggcactgatgacttcaatgtctggattggcctccatgaccccaaaaagaaccgccgctggcactggagcagtgggtccctggtctcctacaagtcctggggcattggagccccaagcagtgttaatcctggctactgtgtgagcctgacctcaagcacaggattccagaaatggaaggatgtgccttgtgaagacaagttctcctttgtctgcaagttcaaaaactagaggcaactggaaaatacatgtctagaactgatccagcaattacaacggagtcaaaaattaaaccggaccatctctccaactcaactcaacctggacactctcttctctgctgagtttgccttgttaatcttcaatagttttacctaccccagtctttggaaccctaaataataaaaataaacatgtttccactattgtgctgtc

SEQ ID NO: 25751 - DNA, 938 bp, Homo sapiens
  source 1..938: mol_type = unassigned DNA
catccctgagatctttttataaaaaacccagtctttgctgaccagacaaagcataccagatctcaccagagagtcctaggggactacagaaggaaaaagacaagaggcagtaggatatctgtgtgtcctcccgctgaccacacttcctttagtgacccgattgcctcctcaagtcgcagacactatgctgcctcccatggccctgcccagtgtgtcctggatgctgctttcctgcctcattctcctgtgtcaggttcaaggtgaagaaacccagaaggaactgccctctccacggatcagctgtcccaaaggctccaaggcctatggctccccctgctatgccttgtttttgtcaccaaaatcctggatggatgcagatctggcttgccagaagcggccctctggaaaactggtgtctgtgctcagtggggctgagggatccttcgtgtcctccctggtgaggagcattagtaacagctattcatacatctggattgggctccatgaccccacacagggctctgagcctgatggagatggatgggagtggagtagcactgatgtgatgaattactttgcatgggagaaaaatccctccaccatcttaaaccctggccactgtgggagcctgtcaagaagcacaggatttctgaagtggaaagattataactgtgatgcaaagttaccctatgtctgcaagttcaaggactagggcaggtgggaagtcagcagcctgagcttggcgtgcagctcatcatggacatgagaccagtgtgaagactcaccctggaagagaatattctccccaaactgccctacctgactaccttgtcatgatcctccttctttttcctttttcttcaccttcatttcaggcttttctctgtcttccatgtcttgagatctcagagaataataataaaaatgttactttatac

SEQ ID NO: 25752 - DNA, 856 bp, Homo sapiens
  source 1..856: mol_type = unassigned DNA
attcactccagtgaccatccctgagatctttttataaaaaacccagtctttgctgaccagacaaagcataccagatctcaccagagagtcgcagacactatgctgcctcccatggccctgcccagtgtgtcctggatgctgctttcctgcctcattctcctgtgtcaggttcaaggtgaagaaacccagaaggaactgccctctccacggatcagctgtcccaaaggctccaaggcctatggctccccctgctatgccttgtttttgtcaccaaaatcctggatggatgcagatctggcttgccagaagcggccctctggaaaactggtgtctgtgctcagtggggctgagggatccttcgtgtcctccctggtgaggagcattagtaacagctattcatacatctggattgggctccatgaccccacacagggctctgagcctgatggagatggatgggagtggagtagcactgatgtgatgaattactttgcatgggagaaaaatccctccaccatcttaaaccctggccactgtgggagcctgtcaagaagcacaggatttctgaagtggaaagattataactgtgatgcaaagttaccctatgtctgcaagttcaaggactagggcaggtgggaagtcagcagcctgagcttggcgtgcagctcatcatggacatgagaccagtgtgaagactcaccctggaagagaatattctccccaaactgccctacctgactaccttgtcatgatcctccttctttttcctttttcttcaccttcatttcaggcttttctctgtcttccatgtcttgagatctcagagaataataataaaaatgttactttatacgta

SEQ ID NO: 25753 - DNA, 575 bp, Homo sapiens
  source 1..575: mol_type = unassigned DNA
cccagtctttgctgaccagacaaagcataccagatctcaccagagagtcctaggggactacagaaggaaaaagacaagaggcagtaggatatctgtgtgtcctcccgctgaccacacttcctttagtgacccgattgcctcctcaagtcgcagacactatgctgcctcccatggccctgcccagtgtgtcctggatgctgctttcctgcctcattctcctgtgtcaggttcaaggtgaagaaacccagaaggaactgccctctccacggatcagctgtcccaaaggctccaaggcctatggctccccctgctatgccttgtttttgtcaccaaaatcctggatggatgcagatggctctgagcctgatggagatggatgggagtggagtagcactgatgtgatgaattactttgcatgggagaaaaatccctccaccatcttaaaccctggccactgtgggagcctgtcaagaagcacaggatttctgaagtggaaagattataactgtgatgcaaagttaccctatgtctgcaagttcaaggactagggcaggtgggaagtcagcagcctgagc

SEQ ID NO: 25754 - DNA, 1357 bp, Homo sapiens
  source 1..1357: mol_type = unassigned DNA
gttcttttcctggctagtcaaagcacaccttacgtacattctgaagccgtctcttatatgattcatttttttcactgtagataagacttttatggatggattgtttttctcaaataatattatcgctttgtgactaaagtaaagattattaattcctgaggcaagaagatataaaagctccagaaacgttgactgggaccactggagacactgaagaaggcaggggcccttagagtcttggttgccaaacagatttgcagatcaaggagaacccaggagtttcaaagaagcgctagtaaggtctctgagatccttgcactagctacatcctcagggtaggaggaagatggcttccagaagcatgcggctgctcctattgctgagctgcctggccaaaacaggagtcctgggtgatatcatcatgagacccagctgtgctcctggatggttttaccacaagtccaattgctatggttacttcaggaagctgaggaactggtctgatgccgagctcgagtgtcagtcttacggaaacggagcccacctggcatctatcctgagtttaaaggaagccagcaccatagcagagtacataagtggctatcagagaagccagccgatatggattggcctgcacgacccacagaagaggcagcagtggcagtggattgatggggccatgtatctgtacagatcctggtctggcaagtccatgggtgggaacaagcactgtgctgagatgagctccaataacaactttttaacttggagcagcaacgaatgcaacaagcgccaacacttcctgtgcaagtaccgaccatagagcaagaatcaagattctgctaactcctgcacagccccgtcctcttcctttctgctagcctggctaaatctgctcattatttcagaggggaaacctagcaaactaagagtgataagggccctactacactggcttttttaggcttagagacagaaactttagcattggcccagtagtggcttctagctctaaatgtttgccccgccatccctttccacagtatccttcttccctcctcccctgtctctggctgtctcgagcagtctagaagagtgcatctccagcctatgaaacagctgggtctttggccataagaagtaaagatttgaagacagaaggaagaaactcaggagtaagcttctagaccccttcagcttctacacccttctgccctctctccattgcctgcaccccaccccagccactcaactcctgcttgtttttcctttggccatgggaaggtttaccagtagaatccttgctaggttgatgtgggccatacattcctttaataaaccattgtgtacataagag

SEQ ID NO: 25755 - DNA, 1517 bp, Homo sapiens
  source 1..1517: mol_type = unassigned DNA
ataagacttttatggatggattgtttttctcaaataatattatcgctttgtgactaaagtaaagattattaattcctgaggcaagaagatataaaagctccagaaacgttgactgggaccactggagacactgaagaaggcaggggcccttagagtcttggttgccaaacagaatgcccatatccgtcttacctgtgaggaagcttgccttgggcgccctctgctggccctcctgaagctaacaggggcgagtgctcggtggtttacaaattgcctccatgcagactatgaaactgttcagcctgctatagttagatctctggcactggcccaggaggtcttgcagatttgcagatcaaggagaacccaggagtttcaaagaagcgctagtaaggtctctgagatccttgcactagctacatcctcagggtaggaggaagatggcttccagaagcatgcggctgctcctattgctgagctgcctggccaaaacaggagtcctgggtgatatcatcatgagacccagctgtgctcctggatggttttaccacaagtccaattgctatggttacttcaggaagctgaggaactggtctgatgccgagctcgagtgtcagtcttacggaaacggagcccacctggcatctatcctgagtttaaaggaagccagcaccatagcagagtacataagtggctatcagagaagccagccgatatggattggcctgcacgacccacagaagaggcagcagtggcagtggattgatggggccatgtatctgtacagatcctggtctggcaagtccatgggtgggaacaagcactgtgctgagatgagctccaataacaactttttaacttggagcagcaacgaatgcaacaagcgccaacacttcctgtgcaagtaccgaccatagagcaagaatcaagattctgctaactcctgcacagccccgtcctcttcctttctgctagcctggctaaatctgctcattatttcagaggggaaacctagcaaactaagagtgataagggccctactacactggcttttttaggcttagagacagaaactttagcattggcccagtagtggcttctagctctaaatgtttgccccgccatccctttccacagtatccttcttccctcctcccctgtctctggctgtctcgagcagtctagaagagtgcatctccagcctatgaaacagctgggtctttggccataagaagtaaagatttgaagacagaaggaagaaactcaggagtaagcttctagaccccttcagcttctacacccttctgccctctctccattgcctgcaccccaccccagccactcaactcctgcttgtttttcctttggccatgggaaggtttaccagtagaatccttgctaggttgatgtgggccatacattcctttaataaaccattgtgtacataagaggttgctgtgttccagttcagtaatggtgaatgtggaaaagtgaaataagaccaagaaatacaccca

SEQ ID NO: 25756 - DNA, 2327 bp, Homo sapiens
  source 1..2327: mol_type = unassigned DNA
ataagacttttatggatggattgtttttctcaaataatattatcgctttgtgactaaagtaaagattattaattcctgaggcaagaagatataaaagctccagaaacgttgactgggaccactggagacactgaagaaggcaggggcccttagagtcttggttgccaaacagatttgcagatcaaggagaacccaggagtttcaaagaagcgctagtaaggtctctgagatccttgcactagctacatcctcagggtaggaggaagatggcttccagaagcatgcggctgctcctattgctgagctgcctggccaaaacaggagtcctgggtgatatcatcatgagacccagctgtgctcctggatggttttaccacaagtccaattgctatggttacttcaggaagctgaggaactggtctgatgccgaggtaagaaacttgctgcctgcttggcctggcctttctagagcaaaggaccagccagagccccagatctcatttgattcaggatcaagtgtccttcctgggcactatgaagagaagcccctttggctggtgaaatggagagaagagggttgtgtgttcaactcattcaattctgtaagcattgctgaagcaggtgctgtatgccagaccctagatgggctacaagcacatacggatacataggaaagagcccctaccctcagcaagctcactgtcagtaaaggagacagaaatacatcaatcaaaggaggaagagaagatgaggaattcacagaaaggataatggagtttctgtacaagatttaccagaaagagagtggtgtgtagacatgcctggagcagacaccttggagccgctgacagaaggtgaagcagtccaagaaaatgtggaaacttttccgctgctctacacagtccacaaacctgtccattttatttcgttgaagctttgtctgagagataaccaaatagacagtcaaagtaagttatctcagccacatatggggagtggatgctgctgaattgtgattaattgggggagccatataggtacatttggcatgatctgggcctatgcggtcttacaatccctgtataaaactagacaatgaaaaacagaaaacaaaacaaacaaacaaaaaaacaagaacgaagcacctaccacatgccagctactgaggctatgaaggtattctcccgccttagaaagcccaggattaatgcaggattgcgacatttaaacagaacatttccatacagcatgagtataaatgactttcccaagtttacactgagagtaactgacacagcaaccccagcaaagtctgagctgagtcctgaataattgtataaaaaggggagagaaacagagtgaagaaagggtttcccagactctgtcccaggaaagaaaatgagctcgtggagaggaatagactttctctatgaaaacagagggaacaaagaggaagatgtctgggaaccgaggagtaatagagacctgagtttacatcactactctgccactccctaggtacctccctttacctgtttccctactggaaagtgggataatactttttacctcatggacttgtcaggaggattcattaaaacgactcgcataaagcctatgccacatggtagatgccaattcagggtctcaagaaagaacagcccacaggattgacactgaaccttaacaaagttaacaggaccaaggtgcagagagggtgctaggacagcgaagccaaagaggacccctcaaacccaacaagagctgtgcggctccctgattcctcgccagtgttgctaccgcccttggctcttcttgcatggctggctcttgagacccctggaagctgatggaggcaacgtgagaagcacatggacatccgaccttgagcttgagaggcagaggcctgagttctagttacagccccagcagtaccagttgtgtggactgggagggaggctatcacgtacatacttcaagcctccaaacctgtttccccttctgacacaggatcttctgtggctggtatagagtgggcactcaataaatgctgtctggtcgtctggctggcatgcctcatgggcctgagaattgaatagaattacagtgatagaagcatgctggtattgtaagtggtttgtaagtgtgaggactaaattattattaaatagtaatcacatctaatcttggataaattagtaaaagcaagaatgggagcagtaaaaacctaagcaacccgaactaaaattttattgaattaattcaatttcttgtcatgtaacacaaccccagaagagaataaaataaagtttatatacatacaccca

SEQ ID NO: 25757 - DNA, 641 bp, Homo sapiens
  source 1..641: mol_type = unassigned DNA
ataagacttttatggatggattgtttttctcaaataatattatcgctttgtgactaaagtaaagattattaattcctgaggcaagaagatataaaagctccagaaacgttgactgggaccactggagacactgaagaaggcaggggcccttagagtcttggttgccaaacagatttgcagatcaaggagaacccaggagtttcaaagaagcgctagtaaggtctctgagatccttgcactagctacatcctcagggtaggaggaagatggcttccagaagcatgcggctgctcctattgctgagctgcctggccaaaacaggagtcctgggtgatatcatcatgagacccagctgtgctcctggatggttttaccacaagtccaattgctatggttacttcaggaagctgaggaactggtctgatgccgagctcgagtgtcagtcttacggaaacggagcccacctggcatctatcctgagtttaaaggaagccagcaccatagcagagtacataagtggctatcagagaagccagccgatatggattggcctgcacgacccacagaagcagccactcaactcctgcttgtttttcctttggccatgggaaggtttaccagtagaatccttgctaggttga

SEQ ID NO: 25758 - DNA, 1356 bp, Homo sapiens
  source 1..1356: mol_type = unassigned DNA
acaaacaccaaggagtggaggtcagagtgtcacttttttgttttctttttgaaagatcattcgagaaacacgtcactgatctcccctgcgaccatgtcttccattaagattgagtgtgttttgccagagaactgccggtgtggtgagtctccagtatgggaggaagtgtccaactctctgctctttgtagacattcctgcaaaaaaggtttgccggtgggattcattcaccaagcaagtacagcgagtgaccatggatgccccagtcagctccgtggctcttcgccagtcgggaggctatgttgccaccattggaacaaagttctgtgctttgaactggaaagaacaatcagcagttgtcttggccacggtggataacgacaagaaaaacaatcgcttcaatgatgggaaggtggatcccgccgggaggtactttgctggcaccatggctgaggaaacagctccagcagttcttgagcggcaccagggggccctgtactccctctttcctgatcaccacgtgaaaaagtactttgaccaggtggacatttccaatggtttggattggtcgctagaccacaaaatcttctattacattgacagcctgtcctactccgtggatgcctttgactatgacctgcagacaggacagatctccaaccgcagaagtgtttacaagctagaaaaggaagaacaaatcccagatggaatgtgtattgatgctgaggggaagctctgggtggcctgttacaatggaggaagagtgattcgtttagatcctgtgacagggaaaagacttcaaactgtgaagttgcctgttgataaaacaacttcatgctgctttggagggaagaattactctgaaatgtatgtgacctgcgcccgggatgggatggaccccgagggtcttttgaggcaacctgaagctggtggaattttcaagataactggtctgggggtcaaaggaattgctccctactcctatgcgggatgaggacaggtcttctttcctgccagagggagctctgaagacaactagagaattctgggcctgaaatttcaatctagttagaaagaaaaatgaggcaatgattttattaacagcgttaagttttaatttacaacttttaaaaggcagagcatttttaacaaggggtgacaggtggttttgataacacacttataaggctttctgtaaaaggtactatagaagggcgaagaatcgttcaactgtcaatcagcctcttgattctttgtaaattgccagggtgggtgggtacatatctcttcttgattctgcatttcatacttaactatattaaagcttcaaggaacaataaatagtaacctggtaatg

SEQ ID NO: 25759 - DNA, 1611 bp, Homo sapiens
  source 1..1611: mol_type = unassigned DNA
ccgagccaggccggcctccccgccccctccctggaaaggaaaggccccggcgacaacagagccagacccgctcatcccgatctcccagaaggcgactgacagctgactgccagaaggagatcgcgccaggagactgactgctctgtgcccacccggggacccgggcccgttcagccgggctggctggtgcgccctctgcaaagcctgcgccagggaggaggcaggctcaaccttcagattcccagggcctctctgtcgctgtcgccgtcgccgtcgcccgaggtcccagcggctctaccagattgttgtggaggcctctcacccgcacagatctcccctgcgaccatgtcttccattaagattgagtgtgttttgccagagaactgccggtgtggtgagtctccagtatgggaggaagtgtccaactctctgctctttgtagacattcctgcaaaaaaggtttgccggtgggattcattcaccaagcaagtacagcgagtgaccatggatgccccagtcagctccgtggctcttcgccagtcgggaggctatgttgccaccattggaacaaagttctgtgctttgaactggaaagaacaatcagcagttgtcttggccacggtggataacgacaagaaaaacaatcgcttcaatgatgggaaggtggatcccgccgggaggtactttgctggcaccatggctgaggaaacagctccagcagttcttgagcggcaccagggggccctgtactccctctttcctgatcaccacgtgaaaaagtactttgaccaggtggacatttccaatggtttggattggtcgctagaccacaaaatcttctattacattgacagcctgtcctactccgtggatgcctttgactatgacctgcagacaggacagatctccaaccgcagaagtgtttacaagctagaaaaggaagaacaaatcccagatggaatgtgtattgatgctgaggggaagctctgggtggcctgttacaatggaggaagagtgattcgtttagatcctgtgacagggaaaagacttcaaactgtgaagttgcctgttgataaaacaacttcatgctgctttggagggaagaattactctgaaatgtatgtgacctgcgcccgggatgggatggaccccgagggtcttttgaggcaacctgaagctggtggaattttcaagataactggtctgggggtcaaaggaattgctccctactcctatgcgggatgaggacaggtcttctttcctgccagagggagctctgaagacaactagagaattctgggcctgaaatttcaatctagttagaaagaaaaatgaggcaatgattttattaacagcgttaagttttaatttacaacttttaaaaggcagagcatttttaacaaggggtgacaggtggttttgataacacacttataaggctttctgtaaaaggtactatagaagggcgaagaatcgttcaactgtcaatcagcctcttgattctttgtaaattgccagggtgggtgggtacatatctcttcttgattctgcatttcatacttaactatattaaagcttcaaggaacaataaatagtaacctggtaatgacc

SEQ ID NO: 25760 - DNA, 2235 bp, Homo sapiens
  source 1..2235: mol_type = unassigned DNA
gtgcccgagccaggccggcctccccgccccctccctggaaaggaaaggccccggcgacaacagagccagacccgctcatcccgatctcccagaaggcgactgacagctgactgccagaaggagatcgcgccaggagactgactgctctgtgcccacccggggacccgggcccgttcagccgggctggctggtgcgccctctgcaaagcctgcgccagggaggaggcaggctcaaccttcagattcccagggcctctctgtcgctgtcgccgtcgccgtcgcccgaggtcccagcggctctaccagattgttgtggaggcctctcacccgcacagataatttttctctgtcttctcccagttcgctggtcatggtctctggcctaaagtcccagcatagactgttcctctcctgtggagtctaacactctttgccaaactggcacggtgtcttcctgggaagcaagaaatcactgagggcctgtcagttcctgccagggtggttcgatgctgtccttttctccactccttccatggtctgcgttggaaaatgtgtgttagttcgaattcagcgagttctcattggggtgaacatagtcctaaaaatgcagttcataaaaatcaaccacacagagaagaaaaataaataaatcagtaaagcagctcagaaaaatgcaggtgtggcgggccctggcctctgcaccctcatagaggggctcaacagcatcaacagaaggtgggggagcagaaggtgccctgcagacacccagaggggccaccaatgagcaaactgccagctccctgacccgccctggggcccagggtattgacataaaggacggccttgcactatttcaacagccagttctctgagggtcacaaacaccaaggagtggaggtcagagtgtcacttttttgttttctttttgaaagatcattcgagaaacacgtcactgatctcccctgcgaccatgtcttccattaagattgagtgtgttttgccagagaactgccggtgtggtgagtctccagtatgggaggaagtgtccaactctctgctctttgtagacattcctgcaaaaaaggtttgccggtgggattcattcaccaagcaagtacagcgagtgaccatggatgccccagtcagctccgtggctcttcgccagtcgggaggctatgttgccaccattggaacaaagttctgtgctttgaactggaaagaacaatcagcagttgtcttggccacggtggataacgacaagaaaaacaatcgcttcaatgatgggaaggtggatcccgccgggaggtactttgctggcaccatggctgaggaaacagctccagcagttcttgagcggcaccagggggccctgtactccctctttcctgatcaccacgtgaaaaagtactttgaccaggtggacatttccaatggtttggattggtcgctagaccacaaaatcttctattacattgacagcctgtcctactccgtggatgcctttgactatgacctgcagacaggacagatctccaaccgcagaagtgtttacaagctagaaaaggaagaacaaatcccagatggaatgtgtattgatgctgaggggaagctctgggtggcctgttacaatggaggaagagtgattcgtttagatcctgtgacagggaaaagacttcaaactgtgaagttgcctgttgataaaacaacttcatgctgctttggagggaagaattactctgaaatgtatgtgacctgcgcccgggatgggatggaccccgagggtcttttgaggcaacctgaagctggtggaattttcaagataactggtctgggggtcaaaggaattgctccctactcctatgcgggatgaggacaggtcttctttcctgccagagggagctctgaagacaactagagaattctgggcctgaaatttcaatctagttagaaagaaaaatgaggcaatgattttattaacagcgttaagttttaatttacaacttttaaaaggcagagcatttttaacaaggggtgacaggtggttttgataacacacttataaggctttctgtaaaaggtactatagaagggcgaagaatcgttcaactgtcaatcagcctcttgattctttgtaaattgccagggtgggtgggtacatatctcttcttgattctgcatttcatacttaactatattaaagcttcaaggaacaataaatagtaacctggtaatgacc

SEQ ID NO: 25761 - DNA, 2019 bp, Homo sapiens
  source 1..2019: mol_type = unassigned DNA
gtgcccgagccaggccggcctccccgccccctccctggaaaggaaaggccccggcgacaacagagccagacccgctcatcccgatctcccagaaggcgactgacagctgactgccagaaggagatcgcgccaggagactgactgctctgtgcccacccggggacccgggcccgttcagccgggctggctggtgcgccctctgcaaagcctgcgccagggaggaggcaggctcaaccttcagattcccagggcctctctgtcgctgtcgccgtcgccgtcgcccgaggtcccagcggctctaccagattgttgtggaggcctctcacccgcacagataatttttctctgtcttctcccagttcgctggtcatggtctctggcctaaagtcccagcatagactgttcctctcctgtggagtctaacactctttgccaaactggcacggtgtcttcctgggaagcaagaaatcactgagggcctgtcagttcctgccagggtggttcgatgctgtccttttctccactccttccatggtctgcgttggaaaatgtgtgttagttcgaattcagcgagttctcattggggtgaacatagtcctaaaaatgcagttcataaaaatcaaccacacagagaagaaaaataaataaatcagtaaagcagctcagaaaaatgcaggtgtggcgggccctggcctctgcaccctcatagaggggctcaacagcatcaacagaaggtgggggagcagaaggtgccctgcagacacccagaggggccaccaatgagcaaactgccagctccctgacccgccctggggcccagggtattgacataaaggacggccttgcactatttcaacagccagttctctgagggtcacaaacaccaaggagtggaggtcagagtgtcacttttttgttttctttttgaaagatcattcgagaaacacgtcactgatctcccctgcgaccatgtcttccattaagattgagtgtgttttgccagagaactgccggtgtggtgagtctccagtatgggaggaagtgtccaactctctgctctttgtagacattcctgcaaaaaaggtttgccggtgggattcattcaccaagcaagtacagcgagtgaccatggatgccccagtcagctccgtggctcttcgccagtcgggaggctatgttgccaccattggaacaaagttctgtgctttgaactggaaagaacaatcagcagttgtcttggccacggtggataacgacaagaaaaacaatcgcttcaatgatgggaaggtggatcccgccgggaggtactttgctgccaaccgcagaagtgtttacaagctagaaaaggaagaacaaatcccagatggaatgtgtattgatgctgaggggaagctctgggtggcctgttacaatggaggaagagtgattcgtttagatcctgtgacagggaaaagacttcaaactgtgaagttgcctgttgataaaacaacttcatgctgctttggagggaagaattactctgaaatgtatgtgacctgcgcccgggatgggatggaccccgagggtcttttgaggcaacctgaagctggtggaattttcaagataactggtctgggggtcaaaggaattgctccctactcctatgcgggatgaggacaggtcttctttcctgccagagggagctctgaagacaactagagaattctgggcctgaaatttcaatctagttagaaagaaaaatgaggcaatgattttattaacagcgttaagttttaatttacaacttttaaaaggcagagcatttttaacaaggggtgacaggtggttttgataacacacttataaggctttctgtaaaaggtactatagaagggcgaagaatcgttcaactgtcaatcagcctcttgattctttgtaaattgccagggtgggtgggtacatatctcttcttgattctgcatttcatacttaactatattaaagcttcaaggaacaataaatagtaacctggtaatgacc

SEQ ID NO: 25762 - DNA, 6382 bp, Homo sapiens
  source 1..6382: mol_type = unassigned DNA
caggggcgcagctgctgggcgtgcatccgaaaggtgagagccagagagcgagcagagggggcgggcaggccacgaaaatgtcctcggccgtggggccccgcggtcctcgcccacccacggtgcctccccccatgcaagagctgcccgacctgagccacctgaccgaagaggagaggaacattatcatggcagtgatggaccggcagaaggaagaggaggaaaaagaagaagccatgctcaagtgtgttgtcagggacatggcgaagcctgctgcctgcaaaacaccaagaaatgctgaaaaccagccccaccaaccttcaccgagattgcatcaacagtttgaaagctataaggaacaagtgagaaaaataggggaagaagcgcggcgttaccagggcgagcacaaagacgatgctccgacttgtggaatctgtcataaaacaaagtttgctgatgggtgcggtcatctctgctcctattgtcgcactaagttctgtgcgcgctgcggaggccgcgtgtctctacggtcaaacaacgaagataaatatgttatgtgggtatgcaatttatgtcgaaagcaacaagaaatcttaaccaaatctggggcatggttctttggaagtggccctcagcagacaagtcaggatggaaccctgagtgatacagctacaggtgctggctctgaggtaccaagagaaaagaaagcacgactccaagagcgatcgcggtctcagacacccctaagcacagcagctgcctcctcccaggatgctgctcctcccagcgcaccaccagacaggagcaaaggggctgagccctcgcagcaagccttggggcctgaacagaagcaggcttcatccaggtctagaagtgaacctcctagagagagaaagaagaccccagggctttccgagcagaatggcaaaggagccctgaagagcgagcggaaacgcgtgccaaagacctcagcgcagcccgtggagggggccgtcgaagaacgggagcgcaaagaaaggcgggaaagccgaaggcttgagaaagggcgatcacaggattacccagacacgccggaaaaacgggatgagggcaaagcggcggatgaggaaaagcaaagaaaagaggaggattatcagaccaggtaccgcagcgacccgaacctagctcggtacccggtgaaaccgccgcctgaggagcagcagatgcgcatgcacgcccgggtgtcccgcgccaggcacgagcggcgccacagcgacgtggcgctcccgcgcaccgaggcgggcgcggcgctgccggagggcaaggccggcaaacgcgcgccggcggcagccagggcctcgccgccggactcgccgcgggcttactcggctgagagaactgcggagaccagggcgccgggcgccaagcagctaacgaaccacagcccgccggcgcccagacatgggccggttcccgcagaagccccggagctcaaagcccaggagcccctcaggaagcagagccgcctggaccccagctcggcggtcctcatgcggaaggccaagcgcgagaaggtggagaccatgctgcggaacgactctttgagctcagaccagtccgagtcggtgcggccgtccccgcccaagccgcaccggtccaagagaggcggcaagaagcggcagatgtcggtgagcagctctgaggaggagggcgtgtcgacgcccgagtacaccagctgcgaggacgtggagctggagagcgagagcgtcagcgagaaaggtgatttggattattactggttggatcctgccacgtggcacagccgggagacatcacctattagttcgcatcctgtaacgtggcaaccatctaaagagggggaccgattaattggacgtgttattcttaacaagagaacaaccatgcccaaagactcaggtgcattgctgggtctgaaagttgttggaggaaaaatgactgacttaggacgacttggtgctttcatcaccaaagtaaagaagggtagcctagcagatgtagttggacacctaagagcaggggatgaagttctagaatggaatggtaaacccctgccgggagctacaaatgaagaagtttacaacattattttagaatcaaaatcagaacctcaagttgaaattattgtttcaaggcctattggtgacattccccggattcctgagagctcccaccctccactggagtccagttcaagttcctttgaatctcagaagatggaaaggccttccatttctgttatttctccaacaagtcctggagctctaaaagatgccccacaagtcttaccagggcaactttctgtgaagttgtggtatgataaagtgggacaccagctgattgtaaatgttctgcaagcaacagatctacctgctagagtagatggacgtcctcgaaatccctatgtaaaaatgtattttcttccagatagaagtgataaaagtaaaaggaggaccaaaacagtaaagaaaatactagaaccaaaatggaatcaaacttttgtctattcacatgtacatcgtagagattttagagaacgaatgttagaaataactgtgtgggaccaaccaagagtgcaagaagaagaaagtgaatttcttggagagatcctcatagaattggagacagcgcttttagatgatgaaccgcattggtataaacttcagacacatgatgagtcttcactacctctgcctcagccatcacctttcatgccaaggcgacatattcatggagaaagctctagcaaaaagctacaaagatctcagcgaatcagtgatagtgacatctcagattatgaggttgatgatggtattggcgtagttcctccaggctataggtctagtgctagagaaagtaaatctacaacattaactgtgccagaacagcaaagaacaactcatcaccgctcacgttcagtatctcctcatcgcggcaatgatcagggaaagccgcgttcacgtttaccaaatgtgccattacagaggagtttagatgaaattcatccaacaagaaggtcacgttctccaaccagacaccatgatgcctcccgaagtccagttgatcatagaaccagagatgtggatagtcagtatttatcagaacaagacagaatgcaccgacagagaagtccaacacaatctcctccagcagacacatcgttcagcagtcgcaggggaagacagctcccacaagtgccagtgagaagcggcagtatagaacaagagtcgggccacaaaaagttaaaaagtaccatccagagaagcacagaaacaggcatggcagctgaaatgagaaagatggtaaggcagccgagccgagagtctactgatggcagcatcaacagttacagctctgagggcaatttaatatttcctggagtgcgactgggagctgacagtcaattcagtgattttcttgatggattgggaccagcccagcttgttggccgccaaacccttgccacccctgcaatgggtgatatacaaataggaatggaggacaaaaagggccaattagaagtggaagtcattagagcacgaagcctcacacaaaagcctggttccaaatctacacctgctccatatgtcaaagtatatcttttggaaaatggggcctgtatagccaagaagaagacaagaattgcacgaaaaacccttgatcctttgtatcagcagtctctggtttttgatgaaagtccacagggtaaagttcttcaggtgattgtctggggagactatggcagaatggaccacaaatgctttatgggtgtggctcagatcttgttggaagaactcgacctgtccagcatggtgatcggatggtacaaattgttcccaccgtcctcactggtggatcccacactcactcccctcacccggcgggcttcccagtcatctctggaaagttcaactgggcctccctgtattcgatcatagtgaactcataccagagtcattccaataaaactctacttttcaggataataatctgaaccagatatttcatgatcgaaagcattgttggagacagacaatcaacttgtgttttgcctgtagtagtttttcaataatatgtcccaattgttatttaaaacatggcttcatatgacagaacaaggcaatctatcaaatttacaggaagaatcaacatgctggtgagagtcactgatgcttctaacaaatagaaaaagaggaaactttaaatccacgcatacacgtacacacacacatgcacacacacacacaccaaattgaacaaactggaaactctcactctgtgaaaagttgtattctacacatttctgcacagaccacaagcagtgttatttccctgatgtttgagttgttttgttcttttgtgtgttttgtttatttgtgtgttgtttgttggttttcgtttcttgagtttttgttttgttttcaccacatctgttatttccactagtttttttttggctgtgtcatgacaggcctcatgatgctaacagagattcttcccttcttttttccaaaagcaccaaaaaaaagggctgaagtagtctctgtagcatctccccaaagtgttaaacagctacataaggtgaagccaaggaagggtttcactagctttcattttataattatttaaagtcttatgtgtggatacccaagagacaaaaagttatcttccaaaataaataatcacagaagtacttttttaatgaagagcctatctgtttgcattctagaaaattaatttatggtttccattgttttgcatggaagacttttaaagaagtcaatctgcaactaatgctggggactaaaactaactgcataattgtactttgaaaacactccttgtaatgcctttttcttcctgatattaaaaaaatgctcatgtgtataaaccatactttgacttcccaaaaatggtgactaggaatggatttgagcctaagacactttgagctatgcccaggcttctcagccatacctcagtgtagacacatccatctgccctggaaagagcatggtatgagctgttcaatattccactggaaattccagttgaaatattctgcactaaactattgtttttattgaattttagtttacatttctttgagattgatgcaagcacaaagcttgattttttaatgcaaagtatcttactttttggggggaaaataaacaaaatgaactttcaatttgcattttcatttagtttctcttggccttgaatttcccttgtgacattctgtacatgtgctacaaactgcagtctctgcaggtgcattgatatgttctccctccttttatgagtcactccacttttgtgattacacaaatagagcagcatgacttggaactgttcagagctgcatgcacattttgtaaaaaaaaaaaattttaaaaagaaaagaaacaaaaggttatttaataatgtatgttagttccacataggccagcttgtatgttgcatgtacttgtacagtttgcttgttaattactataccgaaataaccaagaaatctaagccatccacttttgttatagacattttgcaggttttagccagactcagtctctgggtctgtggtgaaatgtctatagatggactttattttttaccctccggaaaacgtgatgtagtacggaccaaattccttctaataaatattttggtgtagattcctactgtggggctgtaacacatgtagacactgtgtacacactaggttttaattcatagacatactgcctgcaccaagtgaattatttattattatttacacatgccagaattatctgcccatcattccacagggcacagattgaccactgctcaccatgctgagtaggaggaactgaagcattggtgcacttctactagattccgttctgtcttagtggccaacaatcaactgattataattgggtagtatctttctattttgaccacttgtcttaacactcccctgtgcttttaaatgaaattccaattcatgtatgtaaacatgtttaataaaatttacttttcatgtcagtcagtagccatatgtgttctatgtcttgccagatttccattgtgggttctatggtgcaaaatgggagccaggccatgggaaggggaggctggggtttgttgtctgctgcgggcatttgacttgacttgtcactgcactatattatgtcttaatcgatggcccaaagggtactttgcatcacatacaagttttcacttcgtcagcctgtctaagtgagcacatgactatacttctgaaaagtggcattattaaaaataataaatctcagtaagaatcaaatggaaggttgttttctgctgctgtttgaatgtgctaataaaagagacaactctattg

SEQ ID NO: 25763 - DNA, 6934 bp, Homo sapiens
  source 1..6934: mol_type = unassigned DNA
caggggcgcagctgctgggcgtgcatccgaaaggtgagagccagagagcgagcagagggggcgggcaggccacgaaaatgtcctcggccgtggggccccgcggtcctcgcccacccacggtgcctccccccatgcaagagctgcccgacctgagccacctgaccgaagaggagaggaacattatcatggcagtgatggaccggcagaaggaagaggaggaaaaagaagaagccatgctcaagtgtgttgtcagggacatggcgaagcctgctgcctgcaaaacaccaagaaatgctgaaaaccagccccaccaaccttcaccgagattgcatcaacagtttgaaagctataaggaacaagtgagaaaaataggggaagaagcgcggcgttaccagggcgagcacaaagacgatgctccgacttgtggaatctgtcataaaacaaagtttgctgatgggtgcggtcatctctgctcctattgtcgcactaagttctgtgcgcgctgcggaggccgcgtgtctctacggtcaaacaacgaagacatttgtgttatgtgggtatgcaatttatgtcgaaagcaacaagaaatcttaaccaaatctggggcatggttctttggaagtggccctcagcagacaagtcaggatggaaccctgagtgatacagctacaggtgctggctctgaggtaccaagagaaaagaaagcacgactccaagagcgatcgcggtctcagacacccctaagcacagcagctgcctcctcccaggatgctgctcctcccagcgcaccaccagacaggagcaaaggggctgagccctcgcagcaagccttggggcctgaacagaagcaggcttcatccaggtctagaagtgaacctcctagagagagaaagaagaccccagggctttccgagcagaatggcaaaggagccctgaagagcgagcggaaacgcgtgccaaagacctcagcgcagcccgtggagggggccgtcgaagaacgggagcgcaaagaaaggcgggaaagccgaaggcttgagaaagggcgatcacaggattacccagacacgccggaaaaacgggatgagggcaaagcggcggatgaggaaaagcaaagaaaagaggaggattatcagaccaggtaccgcagcgacccgaacctagctcggtacccggtgaaaccgccgcctgaggagcagcagatgcgcatgcacgcccgggtgtcccgcgccaggcacgagcggcgccacagcgacgtggcgctcccgcgcaccgaggcgggcgcggcgctgccggagggcaaggccggcaaacgcgcgccggcggcagccagggcctcgccgccggactcgccgcgggcttactcggctgagagaactgcggagaccagggcgccgggcgccaagcagctaacgaaccacagcccgccggcgcccagacatgggccggttcccgcagaagccccggagctcaaagcccaggagcccctcaggaagcagagccgcctggaccccagctcggcggtcctcatgcggaaggccaagcgcgagaaggtggagaccatgctgcggaacgactctttgagctcagaccagtccgagtcggtgcggccgtccccgcccaagccgcaccggtccaagagaggcggcaagaagcggcagatgtcggtgagcagctctgaggaggagggcgtgtcgacgcccgagtacaccagctgcgaggacgtggagctggagagcgagagcgtcagcgagaaaggtgatttggattattactggttggatcctgccacgtggcacagccgggagacatcacctattagttcgcatcctgtaacgtggcaaccatctaaagagggggaccgattaattggacgtgttattcttaacaagagaacaaccatgcccaaagactcaggtgcattgctgggtctgaaagttgttggaggaaaaatgactgacttaggacgacttggtgctttcatcaccaaagtaaagaagggtagcctagcagatgtagttggacacctaagagcaggggatgaagttctagaatggaatggtaaacccctgccgggagctacaaatgaagaagtttacaacattattttagaatcaaaatcagaacctcaagttgaaattattgtttcaaggcctattggtgacattccccggattcctgagagctcccaccctccactggagtccagttcaagttcctttgaatctcagaagatggaaaggccttccatttctgttatttctccaacaagtcctggagctctaaaagatgccccacaagtcttaccagggcaactttctgtgaagttgtggtatgataaagtgggacaccagctgattgtaaatgttctgcaagcaacagatctacctgctagagtagatggacgtcctcgaaatccctatgtaaaaatgtattttcttccagatagaagtgataaaagtaaaaggaggaccaaaacagtaaagaaaatactagaaccaaaatggaatcaaacttttgtctattcacatgtacatcgtagagattttagagaacgaatgttagaaataactgtgtgggaccaaccaagagtgcaagaagaagaaagtgaatttcttggagagatcctcatagaattggagacagcgcttttagatgatgaaccgcattggtataaacttcagacacatgatgagtcttcactacctctgcctcagccatcacctttcatgccaaggcgacatattcatggagaaagctctagcaaaaagctacaaagatctcagcgaatcagtgatagtgacatctcagattatgaggttgatgatggtattggcgtagttcctccaggctataggtctagtgctagagaaagtaaatctacaacattaactgtgccagaacagcaaagaacaactcatcaccgctcacgttcagtatctcctcatcgcggcaatgatcagggaaagccgcgttcacgtttaccaaatgtgccattacagaggagtttagatgaaattcatccaacaagaaggtcacgttctccaaccagacaccatgatgcctcccgaagtccagttgatcatagaaccagagatgtggatagtcagtatttatcagaacaagacagtgagcttcttatgctgcccagagcaaaacgaggacgaagtgcagaatgcctacatactaccagaatgcaccgacagagaagtccaacacaatctcctccagcagacacatcgttcagcagtcgcaggggaagacagctcccacaagtgccagtgagaagcggcagtatagaacaagcaagcttagtagtggaggagcgaacaagacagatgaaaatgaaagtgcatcgatttaagcagacaacagggtctggttctagtcaagaacttgatcgcgagcaatattccaagtataacatacataaagatcagtacagaagctgtgataacgtctctgccaaatcatcagatagtgatgtcagtgatgtttccgccatttcccgaaccagcagtgcctcacgcctcagcagcacaagctttatgtcagagcaatctgagcgccccaggggtagaatcagacggatggggacttcaggaagatccatcatgaagagcaccagtgtcagtggagagatgtacacactggagcataatgacggcagccagtcagacacagctgtgggtacagttggagcaggtggaaagaaacggagatccagccttagtgccaaagtggttgccatagtgtctcgaaggagtagaagcacatcccagcttagtcaaacagagtcgggccacaaaaagttaaaaagtaccatccagagaagcacagaaacaggcatggcagctgaaatgagaaagatggtaaggcagccgagccgagagtctactgatggcagcatcaacagttacagctctgagggcaatttaatatttcctggagtgcgactgggagctgacagtcaattcagtgattttcttgatggattgggaccagcccagcttgttggccgccaaacccttgccacccctgcaatgggtgatatacaaataggaatggaggacaaaaagggccaattagaagtggaagtcattagagcacgaagcctcacacaaaagcctggttccaaatctacacctgctccatatgtcaaagtatatcttttggaaaatggggcctgtatagccaagaagaagacaagaattgcacgaaaaacccttgatcctttgtatcagcagtctctggtttttgatgaaagtccacagggtaaagttcttcaggtgattgtctggggagactatggcagaatggaccacaaatgctttatgggtgtggctcagatcttgttggaagaactcgacctgtccagcatggtgatcggatggtacaaattgttcccaccgtcctcactggtggatcccacactcactcccctcacccggcgggcttcccagtcatctctggaaagttcaactgggcctccctgtattcgatcatagtgaactcataccagagtcattccaataaaactctacttttcaggataataatctgaaccagatatttcatgatcgaaagcattgttggagacagacaatcaacttgtgttttgcctgtagtagtttttcaataatatgtcccaattgttatttaaaacatggcttcatatgacagaacaaggcaatctatcaaatttacaggaagaatcaacatgctggtgagagtcactgatgcttctaacaaatagaaaaagaggaaactttaaatccacgcatacacgtacacacacacatgcacacacacacacaccaaattgaacaaactggaaactctcactctgtgaaaagttgtattctacacatttctgcacagaccacaagcagtgttatttccctgatgtttgagttgttttgttcttttgtgtgttttgtttatttgtgtgttgtttgttggttttcgtttcttgagtttttgttttgttttcaccacatctgttatttccactagtttttttttggctgtgtcatgacaggcctcatgatgctaacagagattcttcccttcttttttccaaaagcaccaaaaaaaagggctgaagtagtctctgtagcatctccccaaagtgttaaacagctacataaggtgaagccaaggaagggtttcactagctttcattttataattatttaaagtcttatgtgtggatacccaagagacaaaaagttatcttccaaaataaataatcacagaagtacttttttaatgaagagcctatctgtttgcattctagaaaattaatttatggtttccattgttttgcatggaagacttttaaagaagtcaatctgcaactaatgctggggactaaaactaactgcataattgtactttgaaaacactccttgtaatgcctttttcttcctgatattaaaaaaatgctcatgtgtataaaccatactttgacttcccaaaaatggtgactaggaatggatttgagcctaagacactttgagctatgcccaggcttctcagccatacctcagtgtagacacatccatctgccctggaaagagcatggtatgagctgttcaatattccactggaaattccagttgaaatattctgcactaaactattgtttttattgaattttagtttacatttctttgagattgatgcaagcacaaagcttgattttttaatgcaaagtatcttactttttggggggaaaataaacaaaatgaactttcaatttgcattttcatttagtttctcttggccttgaatttcccttgtgacattctgtacatgtgctacaaactgcagtctctgcaggtgcattgatatgttctccctccttttatgagtcactccacttttgtgattacacaaatagagcagcatgacttggaactgttcagagctgcatgcacattttgtaaaaaaaaaaaattttaaaaagaaaagaaacaaaaggttatttaataatgtatgttagttccacataggccagcttgtatgttgcatgtacttgtacagtttgcttgttaattactataccgaaataaccaagaaatctaagccatccacttttgttatagacattttgcaggttttagccagactcagtctctgggtctgtggtgaaatgtctatagatggactttattttttaccctccggaaaacgtgatgtagtacggaccaaattccttctaataaatattttggtgtagattcctactgtggggctgtaacacatgtagacactgtgtacacactaggttttaattcatagacatactgcctgcaccaagtgaattatttattattatttacacatgccagaattatctgcccatcattccacagggcacagattgaccactgctcaccatgctgagtaggaggaactgaagcattggtgcacttctactagattccgttctgtcttagtggccaacaatcaactgattataattgggtagtatctttctattttgaccacttgtcttaacactcccctgtgcttttaaatgaaattccaattcatgtatgtaaacatgtttaataaaatttacttttcatgtcagtcagtagccatatgtgttctatgtcttgccagatttccattgtgggttctatggtgcaaaatgggagccaggccatgggaaggggaggctggggtttgttgtctgctgcgggcatttgacttgacttgtcactgcactatattatgtcttaatcgatggcccaaagggtactttgcatcacatacaagttttcacttcgtcagcctgtctaagtgagcacatgactatacttctgaaaagtggcattattaaaaataataaatctcagtaagaatcaaatggaaggttgttttctgctgctgtttgaatgtgctaataaaagagacaactctattg

SEQ ID NO: 25764 - DNA, 6622 bp, Homo sapiens
  source 1..6622: mol_type = unassigned DNA
caggggcgcagctgctgggcgtgcatccgaaaggtgagagccagagagcgagcagagggggcgggcaggccacgaaaatgtcctcggccgtggggccccgcggtcctcgcccacccacggtgcctccccccatgcaagagctgcccgacctgagccacctgaccgaagaggagaggaacattatcatggcagtgatggaccggcagaaggaagaggaggaaaaagaagaagccatgctcaagtgtgttgtcagggacatggcgaagcctgctgcctgcaaaacaccaagaaatgctgaaaaccagccccaccaaccttcaccgagattgcatcaacagtttgaaagctataaggaacaagtgagaaaaataggggaagaagcgcggcgttaccagggcgagcacaaagacgatgctccgacttgtggaatctgtcataaaacaaagtttgctgatgggtgcggtcatctctgctcctattgtcgcactaagttctgtgcgcgctgcggaggccgcgtgtctctacggtcaaacaacgaaaataaaattgttatgtgggtatgcaatttatgtcgaaagcaacaagaaatcttaaccaaatctggggcatggttctttggaagtggccctcagcagacaagtcaggatggaaccctgagtgatacagctacaggtgctggctctgaggtaccaagagaaaagaaagcacgactccaagagcgatcgcggtctcagacacccctaagcacagcagctgcctcctcccaggatgctgctcctcccagcgcaccaccagacaggagcaaaggggctgagccctcgcagcaagccttggggcctgaacagaagcaggcttcatccaggtctagaagtgaacctcctagagagagaaagaagaccccagggctttccgagcagaatggcaaaggagccctgaagagcgagcggaaacgcgtgccaaagacctcagcgcagcccgtggagggggccgtcgaagaacgggagcgcaaagaaaggcgggaaagccgaaggcttgagaaagggcgatcacaggattacccagacacgccggaaaaacgggatgagggcaaagcggcggatgaggaaaagcaaagaaaagaggaggattatcagaccaggtaccgcagcgacccgaacctagctcggtacccggtgaaaccgccgcctgaggagcagcagatgcgcatgcacgcccgggtgtcccgcgccaggcacgagcggcgccacagcgacgtggcgctcccgcgcaccgaggcgggcgcggcgctgccggagggcaaggccggcaaacgcgcgccggcggcagccagggcctcgccgccggactcgccgcgggcttactcggctgagagaactgcggagaccagggcgccgggcgccaagcagctaacgaaccacagcccgccggcgcccagacatgggccggttcccgcagaagccccggagctcaaagcccaggagcccctcaggaagcagagccgcctggaccccagctcggcggtcctcatgcggaaggccaagcgcgagaaggtggagaccatgctgcggaacgactctttgagctcagaccagtccgagtcggtgcggccgtccccgcccaagccgcaccggtccaagagaggcggcaagaagcggcagatgtcggtgagcagctctgaggaggagggcgtgtcgacgcccgagtacaccagctgcgaggacgtggagctggagagcgagagcgtcagcgagaaaggtgatttggattattactggttggatcctgccacgtggcacagccgggagacatcacctattagttcgcatcctgtaacgtggcaaccatctaaagagggggaccgattaattggacgtgttattcttaacaagagaacaaccatgcccaaagactcaggtgcattgctgggtctgaaagttgttggaggaaaaatgactgacttaggacgacttggtgctttcatcaccaaagtaaagaagggtagcctagcagatgtagttggacacctaagagcaggggatgaagttctagaatggaatggtaaacccctgccgggagctacaaatgaagaagtttacaacattattttagaatcaaaatcagaacctcaagttgaaattattgtttcaaggcctattggtgacattccccggattcctgagagctcccaccctccactggagtccagttcaagttcctttgaatctcagaagatggaaaggccttccatttctgttatttctccaacaagtcctggagctctaaaagatgccccacaagtcttaccagggcaactttctgtgaagttgtggtatgataaagtgggacaccagctgattgtaaatgttctgcaagcaacagatctacctgctagagtagatggacgtcctcgaaatccctatgtaaaaatgtattttcttccagatagaagtgataaaagtaaaaggaggaccaaaacagtaaagaaaatactagaaccaaaatggaatcaaacttttgtctattcacatgtacatcgtagagattttagagaacgaatgttagaaataactgtgtgggaccaaccaagagtgcaagaagaagaaagtgaatttcttggagagatcctcatagaattggagacagcgcttttagatgatgaaccgcattggtataaacttcagacacatgatgagtcttcactacctctgcctcagccatcacctttcatgccaaggcgacatattcatggagaaagctctagcaaaaagctacaaagatctcagcgaatcagtgatagtgacatctcagattatgaggttgatgatggtattggcgtagttcctccagtaggctataggtctagtgctagagaaagtaaatctacaacattaactgtgccagaacagcaaagaacaactcatcaccgctcacgttcagtatctcctcatcgcggcaatgatcagggaaagccgcgttcacgtttaccaaatgtgccattacagaggagtttagatgaaattcatccaacaagaaggtcacgttctccaaccagacaccatgatgcctcccgaagtccagttgatcatagaaccagagatgtggatagtcagtatttatcagaacaagacagtgagcttcttatgctgcccagagcaaaacgaggacgaagtgcagaatgcctacatactaccagtgaactgcagccctttcttgacagggctaggagtgctagtaccaactgcttgagaccagatactagtttgcattcaccagaacgagaaaggggtagatggtccccctccctagataggagacgacctcctagtcccaggattcaaatccagcatgcgtctccggagaatgacagaatgcaccgacagagaagtccaacacaatctcctccagcagacacatcgttcagcagtcgcaggggaagacagctcccacaagtgccagtgagaagcggcagtatagaacaagagtcgggccacaaaaagttaaaaagtaccatccagagaagcacagaaacaggcatggcagctgaaatgagaaagatggtaaggcagccgagccgagagtctactgatggcagcatcaacagttacagctctgagggcaatttaatatttcctggagtgcgactgggagctgacagtcaattcagtgattttcttgatggattgggaccagcccagcttgttggccgccaaacccttgccacccctgcaatgggtgatatacaaataggaatggaggacaaaaagggccaattagaagtggaagtcattagagcacgaagcctcacacaaaagcctggttccaaatctacacctgctccatatgtcaaagtatatcttttggaaaatggggcctgtatagccaagaagaagacaagaattgcacgaaaaacccttgatcctttgtatcagcagtctctggtttttgatgaaagtccacagggtaaagttcttcaggtgattgtctggggagactatggcagaatggaccacaaatgctttatgggtgtggctcagatcttgttggaagaactcgacctgtccagcatggtgatcggatggtacaaattgttcccaccgtcctcactggtggatcccacactcactcccctcacccggcgggcttcccagtcatctctggaaagttcaactgggcctccctgtattcgatcatagtgaactcataccagagtcattccaataaaactctacttttcaggataataatctgaaccagatatttcatgatcgaaagcattgttggagacagacaatcaacttgtgttttgcctgtagtagtttttcaataatatgtcccaattgttatttaaaacatggcttcatatgacagaacaaggcaatctatcaaatttacaggaagaatcaacatgctggtgagagtcactgatgcttctaacaaatagaaaaagaggaaactttaaatccacgcatacacgtacacacacacatgcacacacacacacaccaaattgaacaaactggaaactctcactctgtgaaaagttgtattctacacatttctgcacagaccacaagcagtgttatttccctgatgtttgagttgttttgttcttttgtgtgttttgtttatttgtgtgttgtttgttggttttcgtttcttgagtttttgttttgttttcaccacatctgttatttccactagtttttttttggctgtgtcatgacaggcctcatgatgctaacagagattcttcccttcttttttccaaaagcaccaaaaaaaagggctgaagtagtctctgtagcatctccccaaagtgttaaacagctacataaggtgaagccaaggaagggtttcactagctttcattttataattatttaaagtcttatgtgtggatacccaagagacaaaaagttatcttccaaaataaataatcacagaagtacttttttaatgaagagcctatctgtttgcattctagaaaattaatttatggtttccattgttttgcatggaagacttttaaagaagtcaatctgcaactaatgctggggactaaaactaactgcataattgtactttgaaaacactccttgtaatgcctttttcttcctgatattaaaaaaatgctcatgtgtataaaccatactttgacttcccaaaaatggtgactaggaatggatttgagcctaagacactttgagctatgcccaggcttctcagccatacctcagtgtagacacatccatctgccctggaaagagcatggtatgagctgttcaatattccactggaaattccagttgaaatattctgcactaaactattgtttttattgaattttagtttacatttctttgagattgatgcaagcacaaagcttgattttttaatgcaaagtatcttactttttggggggaaaataaacaaaatgaactttcaatttgcattttcatttagtttctcttggccttgaatttcccttgtgacattctgtacatgtgctacaaactgcagtctctgcaggtgcattgatatgttctccctccttttatgagtcactccacttttgtgattacacaaatagagcagcatgacttggaactgttcagagctgcatgcacattttgtaaaaaaaaaaaattttaaaaagaaaagaaacaaaaggttatttaataatgtatgttagttccacataggccagcttgtatgttgcatgtacttgtacagtttgcttgttaattactataccgaaataaccaagaaatctaagccatccacttttgttatagacattttgcaggttttagccagactcagtctctgggtctgtggtgaaatgtctatagatggactttattttttaccctccggaaaacgtgatgtagtacggaccaaattccttctaataaatattttggtgtagattcctactgtggggctgtaacacatgtagacactgtgtacacactaggttttaattcatagacatactgcctgcaccaagtgaattatttattattatttacacatgccagaattatctgcccatcattccacagggcacagattgaccactgctcaccatgctgagtaggaggaactgaagcattggtgcacttctactagattccgttctgtcttagtggccaacaatcaactgattataattgggtagtatctttctattttgaccacttgtcttaacactcccctgtgcttttaaatgaaattccaattcatgtatgtaaacatgtttaataaaatttacttttcatgtcagtcagtagccatatgtgttctatgtcttgccagatttccattgtgggttctatggtgcaaaatgggagccaggccatgggaaggggaggctggggtttgttgtctgctgcgggcatttgacttgacttgtcactgcactatattatgtcttaatcgatggcccaaagggtactttgcatcacatacaagttttcacttcgtcagcctgtctaagtgagcacatgactatacttctgaaaagtggcattattaaaaataataaatctcagtaagaatcaaatggaaggttgttttctgctgctgtttgaatgtgctaataaaagagacaactctattg

SEQ ID NO: 25765 - DNA, 7132 bp, Homo sapiens
  source 1..7132: mol_type = unassigned DNA
caggggcgcagctgctgggcgtgcatccgaaaggtgagagccagagagcgagcagagggggcgggcaggccacgaaaatgtcctcggccgtggggccccgcggtcctcgcccacccacggtgcctccccccatgcaagagctgcccgacctgagccacctgaccgaagaggagaggaacattatcatggcagtgatggaccggcagaaggaagaggaggaaaaagaagaagccatgctcaagtgtgttgtcagggacatggcgaagcctgctgcctgcaaaacaccaagaaatgctgaaaaccagccccaccaaccttcaccgagattgcatcaacagtttgaaagctataaggaacaagtgagaaaaataggggaagaagcgcggcgttaccagggcgagcacaaagacgatgctccgacttgtggaatctgtcataaaacaaagtttgctgatgggtgcggtcatctctgctcctattgtcgcactaagttctgtgcgcgctgcggaggccgcgtgtctctacggtcaaacaacgaagataaatatgttatgtgggtatgcaatttatgtcgaaagcaacaagaaatcttaaccaaatctggggcatggttctttggaagtggccctcagcagacaagtcaggatggaaccctgagtgatacagctacaggtgctggctctgaggtaccaagagaaaagaaagcacgactccaagagcgatcgcggtctcagacacccctaagcacagcagctgcctcctcccaggatgctgctcctcccagcgcaccaccagacaggagcaaaggggctgagccctcgcagcaagccttggggcctgaacagaagcaggcttcatccaggtctagaagtgaacctcctagagagagaaagaagaccccagggctttccgagcagaatggcaaaggagccctgaagagcgagcggaaacgcgtgccaaagacctcagcgcagcccgtggagggggccgtcgaagaacgggagcgcaaagaaaggcgggaaagccgaaggcttgagaaagggcgatcacaggattacccagacacgccggaaaaacgggatgagggcaaagcggcggatgaggaaaagcaaagaaaagaggaggattatcagaccaggtaccgcagcgacccgaacctagctcggtacccggtgaaaccgccgcctgaggagcagcagatgcgcatgcacgcccgggtgtcccgcgccaggcacgagcggcgccacagcgacgtggcgctcccgcgcaccgaggcgggcgcggcgctgccggagggcaaggccggcaaacgcgcgccggcggcagccagggcctcgccgccggactcgccgcgggcttactcggctgagagaactgcggagaccagggcgccgggcgccaagcagctaacgaaccacagcccgccggcgcccagacatgggccggttcccgcagaagccccggagctcaaagcccaggagcccctcaggaagcagagccgcctggaccccagctcggcggtcctcatgcggaaggccaagcgcgagaaggtggagaccatgctgcggaacgactctttgagctcagaccagtccgagtcggtgcggccgtccccgcccaagccgcaccggtccaagagaggcggcaagaagcggcagatgtcggtgagcagctctgaggaggagggcgtgtcgacgcccgagtacaccagctgcgaggacgtggagctggagagcgagagcgtcagcgagaaaggtgatttggattattactggttggatcctgccacgtggcacagccgggagacatcacctattagttcgcatcctgtaacgtggcaaccatctaaagagggggaccgattaattggacgtgttattcttaacaagagaacaaccatgcccaaagactcaggtgcattgctgggtctgaaagttgttggaggaaaaatgactgacttaggacgacttggtgctttcatcaccaaagtaaagaagggtagcctagcagatgtagttggacacctaagagcaggggatgaagttctagaatggaatggtaaacccctgccgggagctacaaatgaagaagtttacaacattattttagaatcaaaatcagaacctcaagttgaaattattgtttcaaggcctattggtgacattccccggattcctgagagctcccaccctccactggagtccagttcaagttcctttgaatctcagaagatggaaaggccttccatttctgttatttctccaacaagtcctggagctctaaaagatgccccacaagtcttaccagggcaactttctgtgaagttgtggtatgataaagtgggacaccagctgattgtaaatgttctgcaagcaacagatctacctgctagagtagatggacgtcctcgaaatccctatgtaaaaatgtattttcttccagatagaagtgataaaagtaaaaggaggaccaaaacagtaaagaaaatactagaaccaaaatggaatcaaacttttgtctattcacatgtacatcgtagagattttagagaacgaatgttagaaataactgtgtgggaccaaccaagagtgcaagaagaagaaagtgaatttcttggagagatcctcatagaattggagacagcgcttttagatgatgaaccgcattggtataaacttcagacacatgatgagtcttcactacctctgcctcagccatcacctttcatgccaaggcgacatattcatggagaaagctctagcaaaaagctacaaagatctcagcgaatcagtgatagtgacatctcagattatgaggttgatgatggtattggcgtagttcctccagtaggctataggtctagtgctagagaaagtaaatctacaacattaactgtgccagaacagcaaagaacaactcatcaccgctcacgttcagtatctcctcatcgcggcaatgatcagggaaagccgcgttcacgtttaccaaatgtgccattacagaggagtttagatgaaattcatccaacaagaaggtcacgttctccaaccagacaccatgatgcctcccgaagtccagttgatcatagaaccagagatgtggatagtcagtatttatcagaacaagacagtgagcttcttatgctgcccagagcaaaacgaggacgaagtgcagaatgcctacatactaccagacatcttgttaggcactataaaacattacctcccaagatgcctttattacagagcagttctcactggaatatttacagtgaactgcagccctttcttgacagggctaggagtgctagtaccaactgcttgagaccagatactagtttgcattcaccagaacgagaaagaatgcaccgacagagaagtccaacacaatctcctccagcagacacatcgttcagcagtcgcaggggaagacagctcccacaagtgccagtgagaagcggcagtatagaacaagcaagcttagtagtggaggagcgaacaagacagatgaaaatgaaagtgcatcgatttaagcagacaacagggtctggttctagtcaagaacttgatcgcgagcaatattccaagtataacatacataaagatcagtacagaagctgtgataacgtctctgccaaatcatcagatagtgatgtcagtgatgtttccgccatttcccgaaccagcagtgcctcacgcctcagcagcacaagctttatgtcagagcaatctgagcgccccaggggtagaatcagttcatttacccccaaaatgcaaggcagacggatggggacttcaggaagatccatcatgaagagcaccagtgtcagtggagagatgtacacactggagcataatgacggcagccagtcagacacagctgtgggtacagttggagcaggtggaaagaaacggagatccagccttagtgccaaagtggttgccatagtgtctcgaaggagtagaagcacatcccagcttagtcaaacagagtcgggccacaaaaagttaaaaagtaccatccagagaagcacagaaacaggcatggcagctgaaatgagaaagatggtaaggcagccgagccgagagtctactgatggcagcatcaacagttacagctctgagggcaatttaatatttcctggagtgcgactgggagctgacagtcaattcagtgattttcttgatggattgggaccagcccagcttgttggccgccaaacccttgccacccctgcaatgggtgatatacaaataggaatggaggacaaaaagggccaattagaagtggaagtcattagagcacgaagcctcacacaaaagcctggttccaaatctacacctgctccatatgtcaaagtatatcttttggaaaatggggcctgtatagccaagaagaagacaagaattgcacgaaaaacccttgatcctttgtatcagcagtctctggtttttgatgaaagtccacagggtaaagttcttcaggtgattgtctggggagactatggcagaatggaccacaaatgctttatgggtgtggctcagatcttgttggaagaactcgacctgtccagcatggtgatcggatggtacaaattgttcccaccgtcctcactggtggatcccacactcactcccctcacccggcgggcttcccagtcatctctggaaagttcaactgggcctccctgtattcgatcatagtgaactcataccagagtcattccaataaaactctacttttcaggataataatctgaaccagatatttcatgatcgaaagcattgttggagacagacaatcaacttgtgttttgcctgtagtagtttttcaataatatgtcccaattgttatttaaaacatggcttcatatgacagaacaaggcaatctatcaaatttacaggaagaatcaacatgctggtgagagtcactgatgcttctaacaaatagaaaaagaggaaactttaaatccacgcatacacgtacacacacacatgcacacacacacacaccaaattgaacaaactggaaactctcactctgtgaaaagttgtattctacacatttctgcacagaccacaagcagtgttatttccctgatgtttgagttgttttgttcttttgtgtgttttgtttatttgtgtgttgtttgttggttttcgtttcttgagtttttgttttgttttcaccacatctgttatttccactagtttttttttggctgtgtcatgacaggcctcatgatgctaacagagattcttcccttcttttttccaaaagcaccaaaaaaaagggctgaagtagtctctgtagcatctccccaaagtgttaaacagctacataaggtgaagccaaggaagggtttcactagctttcattttataattatttaaagtcttatgtgtggatacccaagagacaaaaagttatcttccaaaataaataatcacagaagtacttttttaatgaagagcctatctgtttgcattctagaaaattaatttatggtttccattgttttgcatggaagacttttaaagaagtcaatctgcaactaatgctggggactaaaactaactgcataattgtactttgaaaacactccttgtaatgcctttttcttcctgatattaaaaaaatgctcatgtgtataaaccatactttgacttcccaaaaatggtgactaggaatggatttgagcctaagacactttgagctatgcccaggcttctcagccatacctcagtgtagacacatccatctgccctggaaagagcatggtatgagctgttcaatattccactggaaattccagttgaaatattctgcactaaactattgtttttattgaattttagtttacatttctttgagattgatgcaagcacaaagcttgattttttaatgcaaagtatcttactttttggggggaaaataaacaaaatgaactttcaatttgcattttcatttagtttctcttggccttgaatttcccttgtgacattctgtacatgtgctacaaactgcagtctctgcaggtgcattgatatgttctccctccttttatgagtcactccacttttgtgattacacaaatagagcagcatgacttggaactgttcagagctgcatgcacattttgtaaaaaaaaaaaattttaaaaagaaaagaaacaaaaggttatttaataatgtatgttagttccacataggccagcttgtatgttgcatgtacttgtacagtttgcttgttaattactataccgaaataaccaagaaatctaagccatccacttttgttatagacattttgcaggttttagccagactcagtctctgggtctgtggtgaaatgtctatagatggactttattttttaccctccggaaaacgtgatgtagtacggaccaaattccttctaataaatattttggtgtagattcctactgtggggctgtaacacatgtagacactgtgtacacactaggttttaattcatagacatactgcctgcaccaagtgaattatttattattatttacacatgccagaattatctgcccatcattccacagggcacagattgaccactgctcaccatgctgagtaggaggaactgaagcattggtgcacttctactagattccgttctgtcttagtggccaacaatcaactgattataattgggtagtatctttctattttgaccacttgtcttaacactcccctgtgcttttaaatgaaattccaattcatgtatgtaaacatgtttaataaaatttacttttcatgtcagtcagtagccatatgtgttctatgtcttgccagatttccattgtgggttctatggtgcaaaatgggagccaggccatgggaaggggaggctggggtttgttgtctgctgcgggcatttgacttgacttgtcactgcactatattatgtcttaatcgatggcccaaagggtactttgcatcacatacaagttttcacttcgtcagcctgtctaagtgagcacatgactatacttctgaaaagtggcattattaaaaataataaatctcagtaagaatcaaatggaaggttgttttctgctgctgtttgaatgtgctaataaaagagacaactctattg

SEQ ID NO: 25766 - DNA, 6952 bp, Homo sapiens
  source 1..6952: mol_type = unassigned DNA
caggggcgcagctgctgggcgtgcatccgaaaggtgagagccagagagcgagcagagggggcgggcaggccacgaaaatgtcctcggccgtggggccccgcggtcctcgcccacccacggtgcctccccccatgcaagagctgcccgacctgagccacctgaccgaagaggagaggaacattatcatggcagtgatggaccggcagaaggaagaggaggaaaaagaagaagccatgctcaagtgtgttgtcagggacatggcgaagcctgctgcctgcaaaacaccaagaaatgctgaaaaccagccccaccaaccttcaccgagattgcatcaacagtttgaaagctataaggaacaagtgagaaaaataggggaagaagcgcggcgttaccagggcgagcacaaagacgatgctccgacttgtggaatctgtcataaaacaaagtttgctgatgggtgcggtcatctctgctcctattgtcgcactaagttctgtgcgcgctgcggaggccgcgtgtctctacggtcaaacaacgaaaataaaattgttatgtgggtatgcaatttatgtcgaaagcaacaagaaatcttaaccaaatctggggcatggttctttggaagtggccctcagcagacaagtcaggatggaaccctgagtgatacagctacaggtgctggctctgaggtaccaagagaaaagaaagcacgactccaagagcgatcgcggtctcagacacccctaagcacagcagctgcctcctcccaggatgctgctcctcccagcgcaccaccagacaggagcaaaggggctgagccctcgcagcaagccttggggcctgaacagaagcaggcttcatccaggtctagaagtgaacctcctagagagagaaagaagaccccagggctttccgagcagaatggcaaaggagccctgaagagcgagcggaaacgcgtgccaaagacctcagcgcagcccgtggagggggccgtcgaagaacgggagcgcaaagaaaggcgggaaagccgaaggcttgagaaagggcgatcacaggattacccagacacgccggaaaaacgggatgagggcaaagcggcggatgaggaaaagcaaagaaaagaggaggattatcagaccaggtaccgcagcgacccgaacctagctcggtacccggtgaaaccgccgcctgaggagcagcagatgcgcatgcacgcccgggtgtcccgcgccaggcacgagcggcgccacagcgacgtggcgctcccgcgcaccgaggcgggcgcggcgctgccggagggcaaggccggcaaacgcgcgccggcggcagccagggcctcgccgccggactcgccgcgggcttactcggctgagagaactgcggagaccagggcgccgggcgccaagcagctaacgaaccacagcccgccggcgcccagacatgggccggttcccgcagaagccccggagctcaaagcccaggagcccctcaggaagcagagccgcctggaccccagctcggcggtcctcatgcggaaggccaagcgcgagaaggtggagaccatgctgcggaacgactctttgagctcagaccagtccgagtcggtgcggccgtccccgcccaagccgcaccggtccaagagaggcggcaagaagcggcagatgtcggtgagcagctctgaggaggagggcgtgtcgacgcccgagtacaccagctgcgaggacgtggagctggagagcgagagcgtcagcgagaaaggtgatttggattattactggttggatcctgccacgtggcacagccgggagacatcacctattagttcgcatcctgtaacgtggcaaccatctaaagagggggaccgattaattggacgtgttattcttaacaagagaacaaccatgcccaaagactcaggtgcattgctgggtctgaaagttgttggaggaaaaatgactgacttaggacgacttggtgctttcatcaccaaagtaaagaagggtagcctagcagatgtagttggacacctaagagcaggggatgaagttctagaatggaatggtaaacccctgccgggagctacaaatgaagaagtttacaacattattttagaatcaaaatcagaacctcaagttgaaattattgtttcaaggcctattggtgacattccccggattcctgagagctcccaccctccactggagtccagttcaagttcctttgaatctcagaagatggaaaggccttccatttctgttatttctccaacaagtcctggagctctaaaagatgccccacaagtcttaccagggcaactttctgtgaagttgtggtatgataaagtgggacaccagctgattgtaaatgttctgcaagcaacagatctacctgctagagtagatggacgtcctcgaaatccctatgtaaaaatgtattttcttccagatagaagtgataaaagtaaaaggaggaccaaaacagtaaagaaaatactagaaccaaaatggaatcaaacttttgtctattcacatgtacatcgtagagattttagagaacgaatgttagaaataactgtgtgggaccaaccaagagtgcaagaagaagaaagtgaatttcttggagagatcctcatagaattggagacagcgcttttagatgatgaaccgcattggtataaacttcagacacatgatgagtcttcactacctctgcctcagccatcacctttcatgccaaggcgacatattcatggagaaagctctagcaaaaagctacaaagatctcagcgaatcagtgatagtgacatctcagattatgaggttgatgatggtattggcgtagttcctccagtaggctataggtctagtgctagagaaagtaaatctacaacattaactgtgccagaacagcaaagaacaactcatcaccgctcacgttcagtatctcctcatcgcggcaatgatcagggaaagccgcgttcacgtttaccaaatgtgccattacagaggagtttagatgaaattcatccaacaagaaggtcacgttctccaaccagacaccatgatgcctcccgaagtccagttgatcatagaaccagagatgtggatagtcagtatttatcagaacaagacagtgagcttcttatgctgcccagagcaaaacgaggacgaagtgcagaatgcctacatactaccagtgaactgcagccctttcttgacagggctaggagtgctagtaccaactgcttgagaccagatactagtttgcattcaccagaacgagaaagaatgcaccgacagagaagtccaacacaatctcctccagcagacacatcgttcagcagtcgcaggggaagacagctcccacaagtgccagtgagaagcggcagtatagaacaagcaagcttagtagtggaggagcgaacaagacagatgaaaatgaaagtgcatcgatttaagcagacaacagggtctggttctagtcaagaacttgatcgcgagcaatattccaagtataacatacataaagatcagtacagaagctgtgataacgtctctgccaaatcatcagatagtgatgtcagtgatgtttccgccatttcccgaaccagcagtgcctcacgcctcagcagcacaagctttatgtcagagcaatctgagcgccccaggggtagaatcagttcatttacccccaaaatgcaaggcagacggatggggacttcaggaagatccatcatgaagagcaccagtgtcagtggagagatgtacacactggagcataatgacggcagccagtcagacacagctgtgggtacagttggagcaggtggaaagaaacggagatccagccttagtgccaaagtggttgccatagtgtctcgaaggagtagaagcacatcccagcttagtcaaacagagtcgggccacaaaaagttaaaaagtaccatccagagaagcacagaaacaggcatggcagctgaaatgagaaagatggtaaggcagccgagccgagagtctactgatggcagcatcaacagttacagctctgagggcaatttaatatttcctggagtgcgactgggagctgacagtcaattcagtgattttcttgatggattgggaccagcccagcttgttggccgccaaacccttgccacccctgcaatggctccatatgtcaaagtatatcttttggaaaatggggcctgtatagccaagaagaagacaagaattgcacgaaaaacccttgatcctttgtatcagcagtctctggtttttgatgaaagtccacagggtaaagttcttcaggtgattgtctggggagactatggcagaatggaccacaaatgctttatgggtgtggctcagatcttgttggaagaactcgacctgtccagcatggtgatcggatggtacaaattgttcccaccgtcctcactggtggatcccacactcactcccctcacccggcgggcttcccagtcatctctggaaagttcaactgggcctccctgtattcgatcatagtgaactcataccagagtcattccaataaaactctacttttcaggataataatctgaaccagatatttcatgatcgaaagcattgttggagacagacaatcaacttgtgttttgcctgtagtagtttttcaataatatgtcccaattgttatttaaaacatggcttcatatgacagaacaaggcaatctatcaaatttacaggaagaatcaacatgctggtgagagtcactgatgcttctaacaaatagaaaaagaggaaactttaaatccacgcatacacgtacacacacacatgcacacacacacacaccaaattgaacaaactggaaactctcactctgtgaaaagttgtattctacacatttctgcacagaccacaagcagtgttatttccctgatgtttgagttgttttgttcttttgtgtgttttgtttatttgtgtgttgtttgttggttttcgtttcttgagtttttgttttgttttcaccacatctgttatttccactagtttttttttggctgtgtcatgacaggcctcatgatgctaacagagattcttcccttcttttttccaaaagcaccaaaaaaaagggctgaagtagtctctgtagcatctccccaaagtgttaaacagctacataaggtgaagccaaggaagggtttcactagctttcattttataattatttaaagtcttatgtgtggatacccaagagacaaaaagttatcttccaaaataaataatcacagaagtacttttttaatgaagagcctatctgtttgcattctagaaaattaatttatggtttccattgttttgcatggaagacttttaaagaagtcaatctgcaactaatgctggggactaaaactaactgcataattgtactttgaaaacactccttgtaatgcctttttcttcctgatattaaaaaaatgctcatgtgtataaaccatactttgacttcccaaaaatggtgactaggaatggatttgagcctaagacactttgagctatgcccaggcttctcagccatacctcagtgtagacacatccatctgccctggaaagagcatggtatgagctgttcaatattccactggaaattccagttgaaatattctgcactaaactattgtttttattgaattttagtttacatttctttgagattgatgcaagcacaaagcttgattttttaatgcaaagtatcttactttttggggggaaaataaacaaaatgaactttcaatttgcattttcatttagtttctcttggccttgaatttcccttgtgacattctgtacatgtgctacaaactgcagtctctgcaggtgcattgatatgttctccctccttttatgagtcactccacttttgtgattacacaaatagagcagcatgacttggaactgttcagagctgcatgcacattttgtaaaaaaaaaaaattttaaaaagaaaagaaacaaaaggttatttaataatgtatgttagttccacataggccagcttgtatgttgcatgtacttgtacagtttgcttgttaattactataccgaaataaccaagaaatctaagccatccacttttgttatagacattttgcaggttttagccagactcagtctctgggtctgtggtgaaatgtctatagatggactttattttttaccctccggaaaacgtgatgtagtacggaccaaattccttctaataaatattttggtgtagattcctactgtggggctgtaacacatgtagacactgtgtacacactaggttttaattcatagacatactgcctgcaccaagtgaattatttattattatttacacatgccagaattatctgcccatcattccacagggcacagattgaccactgctcaccatgctgagtaggaggaactgaagcattggtgcacttctactagattccgttctgtcttagtggccaacaatcaactgattataattgggtagtatctttctattttgaccacttgtcttaacactcccctgtgcttttaaatgaaattccaattcatgtatgtaaacatgtttaataaaatttacttttcatgtcagtcagtagccatatgtgttctatgtcttgccagatttccattgtgggttctatggtgcaaaatgggagccaggccatgggaaggggaggctggggtttgttgtctgctgcgggcatttgacttgacttgtcactgcactatattatgtcttaatcgatggcccaaagggtactttgcatcacatacaagttttcacttcgtcagcctgtctaagtgagcacatgactatacttctgaaaagtggcattattaaaaataataaatctcagtaagaatcaaatggaaggttgttttctgctgctgtttgaatgtgctaataaaagagacaactctattg

SEQ ID NO: 25767 - DNA, 5047 bp, Homo sapiens
  source 1..5047: mol_type = unassigned DNA
ctctcccgccgcgcctccgcctgcccgcccccgccggccgaggctgggctgcgggaggcggccgggcggccccgagcttcgctagggcgaccaaaacaaaggcagcatccggggctgggtggatgcaaacaaccatgaaagactgggttctcgctctccccggctctgctgctgctgctgctgccgccgccgccgctgctcctcctcctgccgccgccgctagggctccgctgtgagggggaagcaggggcgcagctgctgggcgtgcatccgaaaggtgagagccagagagcgagcagagggggcgggcaggccacgaaaatgtcctcggccgtggggccccgcggtcctcgcccacccacggtgcctccccccatgcaagagctgcccgacctgagccacctgaccgaagaggagaggaacattatcatggcagtgatggaccggcagaaggaagaggaggaaaaagaagaagccatgctcaagtgtgttgtcagggacatggcgaagcctgctgcctgcaaaacaccaagaaatgctgaaaaccagccccaccaaccttcaccgagattgcatcaacagtttgaaagctataaggaacaagtgagaaaaataggggaagaagcgcggcgttaccagggcgagcacaaagacgatgctccgacttgtggaatctgtcataaaacaaagtttgctgatgggtgcggtcatctctgctcctattgtcgcactaagttctgtgcgcgctgcggaggccgcgtgtctctacggtcaaacaacgaggacaaagtggttatgtgggtatgcaatttatgtcgaaagcaacaagaaatcttaaccaaatctggggcatggttctttggaagtggccctcagcagacaagtcaggatggaaccctgagtgatacagctacaggtgctggctctgaggtaccaagagaaaagaaagcacgactccaagagcgatcgcggtctcagacacccctaagcacagcagctgcctcctcccaggatgctgctcctcccagcgcaccaccagacaggagcaaaggggctgagccctcgcagcaagccttggggcctgaacagaagcaggcttcatccaggtctagaagtgaacctcctagagagagaaagaagaccccagggctttccgagcagaatggcaaaggagccctgaagagcgagcggaaacgcgtgccaaagacctcagcgcagcccgtggagggggccgtcgaagaacgggagcgcaaagaaaggcgggaaagccgaaggcttgagaaagggcgatcacaggattacccagacacgccggaaaaacgggatgagggcaaagcggcggatgaggaaaagcaaagaaaagaggaggattatcagaccaggtaccgcagcgacccgaacctagctcggtacccggtgaaaccgccgcctgaggagcagcagatgcgcatgcacgcccgggtgtcccgcgccaggcacgagcggcgccacagcgacgtggcgctcccgcgcaccgaggcgggcgcggcgctgccggagggcaaggccggcaaacgcgcgccggcggcagccagggcctcgccgccggactcgccgcgggcttactcggctgagagaactgcggagaccagggcgccgggcgccaagcagctaacgaaccacagcccgccggcgcccagacatgggccggttcccgcagaagccccggagctcaaagcccaggagcccctcaggaagcagagccgcctggaccccagctcggcggtcctcatgcggaaggccaagcgcgagaaggtggagaccatgctgcggaacgactctttgagctcagaccagtccgagtcggtgcggccgtccccgcccaagccgcaccggtccaagagaggcggcaagaagcggcagatgtcggtgagcagctctgaggaggagggcgtgtcgacgcccgagtacaccagctgcgaggacgtggagctggagagcgagagcgtcagcgagaaaggtgatttggattattactggttggatcctgccacgtggcacagccgggagacatcacctattagttcgcatcctgtaacgtggcaaccatctaaagagggggaccgattaattggacgtgttattcttaacaagagaacaaccatgcccaaagactcaggtgcattgctgggtctgaaagttgttggaggaaaaatgactgacttaggacgacttggtgctttcatcaccaaagtaaagaagggtagcctagcagatgtagttggacacctaagagcaggggatgaagttctagaatggaatggtaaacccctgccgggagctacaaatgaagaagtttacaacattattttagaatcaaaatcagaacctcaagttgaaattattgtttcaaggcctattggtgacattccccggattcctgagagctcccaccctccactggagtccagttcaagttcctttgaatctcagaagatggaaaggccttccatttctgttatttctccaacaagtcctggagctctaaaagatgccccacaagtcttaccagggcaactttctgtgaagttgtggtatgataaagtgggacaccagctgattgtaaatgttctgcaagcaacagatctacctgctagagtagatggacgtcctcgaaatccctatgtaaaaatgtattttcttccagatagaagtgataaaagtaaaaggaggaccaaaacagtaaagaaaatactagaaccaaaatggaatcaaacttttgtctattcacatgtacatcgtagagattttagagaacgaatgttagaaataactgtgtgggaccaaccaagagtgcaagaagaagaaagtgaatttcttggagagatcctcatagaattggagacagcgcttttagatgatgaaccgcattggtataaacttcagacacatgatgagtcttcactacctctgcctcagccatcacctttcatgccaaggcgacatattcatggagaaagctctagcaaaaagctacaaagatctcagcgaatcagtgatagtgacatctcagattatgaggttgatgatggtattggcgtagttcctccagtaggctataggtctagtgctagagaaagtaaatctacaacattaactgtgccagaacagcaaagaacaactcatcaccgctcacgttcagtatctcctcatcgcggcaatgatcagggaaagccgcgttcacgtttaccaaatgtgccattacagaggagtttagatgaaattcatccaacaagaaggtcacgttctccaaccagacaccatgatgcctcccgaagtccagttgatcatagaaccagagatgtggatagtcagtatttatcagaacaagacagtgagcttcttatgctgcccagagcaaaacgaggacgaagtgcagaatgcctacatactaccagtgaactgcagccctttcttgacagggctaggagtgctagtaccaactgcttgagaccagatactagtttgcattcaccagaacgagaaagaatgcaccgacagagaagtccaacacaatctcctccagcagacacatcgttcagcagtcgcaggggaagacagctcccacaagtgccagtgagaagcggcagtatagaacaagcaagcttagtagtggaggagcgaacaagacagatgaaaatgaaagtgcatcgatttaagcagacaacagggtctggttctagtcaagaacttgatcgcgagcaatattccaagtataacatacataaagatcagtacagaagctgtgataacgtctctgccaaatcatcagatagtgatgtcagtgatgtttccgccatttcccgaaccagcagtgcctcacgcctcagcagcacaagctttatgtcagagcaatctgagcgccccaggggtagaatcagttcatttacccccaaaatgcaaggcagacggatggggacttcaggaagatccatcatgaagagcaccagtgtcagtggagagatgtacacactggagcataatgacggcagccagtcagacacagctgtgggtacagttggagcaggtggaaagaaacggagatccagccttagtgccaaagtggttgccatagtgtctcgaaggagtagaagcacatcccagcttagtcaaacagagtcgggccacaaaaagttaaaaagtaccatccagagaagcacagaaacaggcatggcagctgaaatgagaaagatggtaaggcagccgagccgagagtctactgatggcagcatcaacagttacagctctgagggcaatttaatatttcctggagtgcgactgggagctgacagtcaattcagtgattttcttgatggattgggaccagcccagcttgttggccgccaaacccttgccacccctgcaatggctccatatgtcaaagtatatcttttggaaaatggggcctgtatagccaagaagaagacaagaattgcacgaaaaacccttgatcctttgtatcagcagtctctggtttttgatgaaagtccacagggtaaagttcttcaggtgattgtctggggagactatggcagaatggaccacaaatgctttatgggtgtggctcagatcttgttggaagaactcgacctgtccagcatggtgatcggatggtacaaattgttcccaccgtcctcactggtggatcccacactcactcccctcacccggcgggcttcccagtcatctctggaaagttcaactgggcctccctgtattcgatcatagtgaactcataccagagtcattccaataaaactctacttttcaggataataatctgaaccagatatttcatgatcgaaagcattgttggagacagacaatcaacttgtgttttgcctgtagtagtttttcaataatatgtcccaattgttatttaaaacatggcttcatatgacagaacaaggcaatctatcaaatttacaggaagaatcaacatgctggtgagagtcactgatgcttctaacaaatagaaaaagaggaaactttaaatccacgcatacac

SEQ ID NO: 25768 - DNA, 5079 bp, Homo sapiens
  source 1..5079: mol_type = unassigned DNA
atgtcctcggccgtggggccccgcggtcctcgcccacccacggtgcctccccccatgcaagagctgcccgacctgagccacctgaccgaagaggagaggaacattatcatggcagtgatggaccggcagaaggaagaggaggaaaaagaagaagccatgctcaagtgtgttgtcagggacatggcgaagcctgctgcctgcaaaacaccaagaaatgctgaaaaccagccccaccaaccttcaccgagattgcatcaacagtttgaaagctataaggaacaagtgagaaaaataggggaagaagcgcggcgttaccagggcgagcacaaagacgatgctccgacttgtggaatctgtcataaaacaaagtttgctgatgggtgcggtcatctctgctcctattgtcgcactaagttctgtgcgcgctgcggaggccgcgtgtctctacggtcaaacaacgaggacaaagtggttatgtgggtatgcaatttatgtcgaaagcaacaagaaatcttaaccaaatctggggcatggttctttggaagtggccctcagcagacaagtcaggatggaaccctgagtgatacagctacaggtgctggctctgaggtaccaagagaaaagaaagcacgactccaagagcgatcgcggtctcagacacccctaagcacagcagctgcctcctcccaggatgctgctcctcccagcgcaccaccagacaggagcaaaggggctgagccctcgcagcaagccttggggcctgaacagaagcaggcttcatccaggtctagaagtgaacctcctagagagagaaagaagaccccagggctttccgagcagaatggcaaaggagccctgaagagcgagcggaaacgcgtgccaaagacctcagcgcagcccgtggagggggccgtcgaagaacgggagcgcaaagaaaggcgggaaagccgaaggcttgagaaagggcgatcacaggattacccagacacgccggaaaaacgggatgagggcaaagcggcggatgaggaaaagcaaagaaaagaggaggattatcagaccaggtaccgcagcgacccgaacctagctcggtacccggtgaaaccgccgcctgaggagcagcagatgcgcatgcacgcccgggtgtcccgcgccaggcacgagcggcgccacagcgacgtggcgctcccgcgcaccgaggcgggcgcggcgctgccggagggcaaggccggcaaacgcgcgccggcggcagccagggcctcgccgccggactcgccgcgggcttactcggctgagagaactgcggagaccagggcgccgggcgccaagcagctaacgaaccacagcccgccggcgcccagacatgggccggttcccgcagaagccccggagctcaaagcccaggagcccctcaggaagcagagccgcctggaccccagctcggcggtcctcatgcggaaggccaagcgcgagaaggtggagaccatgctgcggaacgactctttgagctcagaccagtccgagtcggtgcggccgtccccgcccaagccgcaccggtccaagagaggcggcaagaagcggcagatgtcggtgagcagctctgaggaggagggcgtgtcgacgcccgagtacaccagctgcgaggacgtggagctggagagcgagagcgtcagcgagaaaggtgatttggattattactggttggatcctgccacgtggcacagccgggagacatcacctattagttcgcatcctgtaacgtggcaaccatctaaagagggggaccgattaattggacgtgttattcttaacaagagaacaaccatgcccaaagactcaggtgcattgctgggtctgaaagttgttggaggaaaaatgactgacttaggacgacttggtgctttcatcaccaaagtaaagaagggtagcctagcagatgtagttggacacctaagagcaggggatgaagttctagaatggaatggtaaacccctgccgggagctacaaatgaagaagtttacaacattattttagaatcaaaatcagaacctcaagttgaaattattgtttcaaggcctattggtgacattccccggattcctgagagctcccaccctccactggagtccagttcaagttcctttgaatctcagaagatggaaaggccttccatttctgttatttctccaacaagtcctggagctctaaaagatgccccacaagtcttaccagggcaactttctgtgaagttgtggtatgataaagtgggacaccagctgattgtaaatgttctgcaagcaacagatctacctgctagagtagatggacgtcctcgaaatccctatgtaaaaatgtattttcttccagatagaagtgataaaagtaaaaggaggaccaaaacagtaaagaaaatactagaaccaaaatggaatcaaacttttgtctattcacatgtacatcgtagagattttagagaacgaatgttagaaataactgtgtgggaccaaccaagagtgcaagaagaagaaagtgaatttcttggagagatcctcatagaattggagacagcgcttttagatgatgaaccgcattggtataaacttcagacacatgatgagtcttcactacctctgcctcagccatcacctttcatgccaaggcgacatattcatggagaaagctctagcaaaaagctacaaagatctcagcgaatcagtgatagtgacatctcagattatgaggttgatgatggtattggcgtagttcctccagtaggctataggtctagtgctagagaaagtaaatctacaacattaactgtgccagaacagcaaagaacaactcatcaccgctcacgttcagtatctcctcatcgcggcaatgatcagggaaagccgcgttcacgtttaccaaatgtgccattacagaggagtttagatgaaattcatccaacaagaaggtcacgttctccaaccagacaccatgatgcctcccgaagtccagttgatcatagaaccagagatgtggatagtcagtatttatcagaacaagacagtgagcttcttatgctgcccagagcaaaacgaggacgaagtgcagaatgcctacatactaccagacatcttgttaggcactataaaacattacctcccaagatgcctttattacagagcagttctcactggaatatttacagctcaattctgcctgcacatactaagaccaaatcagtgactagacaggacatttcccttcatcatgaatgctttaactcaacagtattgagatttactgatgaaatactggttagtgaactgcagccctttcttgacagggctaggagtgctagtaccaactgcttgagaccagatactagtttgcattcaccagaacgagaaaggggtagatggtccccctccctagataggagacgacctcctagtcccaggattcaaatccagcatgcgtctccggagaatgacaggcactccagaaagtctgaaagatctagcatccaaaaacagactaggaaaggcactgcctctgatgcagaaagggttctcccaacatgtctttctagaaggggacacgcagccccaagagcaactgatcagccagtcattaggggaaaacatcctgctcgctcaaggtcgagtgagcactctagtatcagaacactgtgttctatgcaccaccttgtccctggagggtcggcgccaccttctccgcttctgacaagaatgcaccgacagagaagtccaacacaatctcctccagcagacacatcgttcagcagtcgcaggggaagacagctcccacaagtgccagtgagaagcggcagtatagaacaagcaagcttagtagtggaggagcgaacaagacagatgaaaatgaaagtgcatcgatttaagcagacaacagggtctggttctagtcaagaacttgatcgcgagcaatattccaagtataacatacataaagatcagtacagaagctgtgataacgtctctgccaaatcatcagatagtgatgtcagtgatgtttccgccatttcccgaaccagcagtgcctcacgcctcagcagcacaagctttatgtcagagcaatctgagcgccccaggggtagaatcagttcatttacccccaaaatgcaaggcagacggatggggacttcaggaagatccatcatgaagagcaccagtgtcagtggagagatgtacacactggagcataatgacggcagccagtcagacacagctgtgggtacagttggagcaggtggaaagaaacggagatccagccttagtgccaaagtggttgccatagtgtctcgaaggagtagaagcacatcccagcttagtcaaacagagtcgggccacaaaaagttaaaaagtaccatccagagaagcacagaaacaggcatggcagctgaaatgagaaagatggtaaggcagccgagccgagagtctactgatggcagcatcaacagttacagctctgagggcaatttaatatttcctggagtgcgactgggagctgacagtcaattcagtgattttcttgatggattgggaccagcccagcttgttggccgccaaacccttgccacccctgcaatgggtgatatacaaataggaatggaggacaaaaagggccaattagaagtggaagtcattagagcacgaagcctcacacaaaagcctggttccaaatctacacctgctccatatgtcaaagtatatcttttggaaaatggggcctgtatagccaagaagaagacaagaattgcacgaaaaacccttgatcctttgtatcagcagtctctggtttttgatgaaagtccacagggtaaagttcttcaggtgattgtctggggagactatggcagaatggaccacaaatgctttatgggtgtggctcagatcttgttggaagaactcgacctgtccagcatggtgatcggatggtacaaattgttcccaccgtcctcactggtggatcccacactcactcccctcacccggcgggcttcccagtcatctctggaaagttcaactgggcctccctgtattcgatcatag

SEQ ID NO: 25769 - DNA, 2285 bp, Homo sapiens
  source 1..2285: mol_type = unassigned DNA
cagattatgaggttgatgatggtattggcgtagttcctccagtaggctataggtctagtgctagagaaagtaaatctacaacattaactgtgccagaacagcaaagaacaactcatcaccgctcacgttcagtatctcctcatcgcggcaatgatcagggaaagccgcgttcacgtttaccaaatgtgccattacagaggagtttagatgaaattcatccaacaagaaggtcacgttctccaaccagacaccatgatgcctcccgaagtccagttgatcatagaaccagagatgtggatagtcagtatttatcagaacaagacagtgagcttcttatgctgcccagagcaaaacgaggacgaagtgcagaatgcctacatactaccaggcactccagaaagtctgaaagatctagcatccaaaaacagactaggaaaggcactgcctctgatgcagaaagaatgcaccgacagagaagtccaacacaatctcctccagcagacacatcgttcagcagtcgcaggggaagacagctcccacaagtgccagtgagaagcggcagtatagaacaagaacaagaaaaatataactcttccacaaaagcaagcttagtagtggaggagcgaacaagacagatgaaaatgaaagtgcatcgatttaagcagacaacagggtctggttctagtcaagaacttgatcgcgagcaatattccaagtataacatacataaagatcagtacagaagctgtgataacgtctctgccaaatcatcagatagtgatgtcagtgatgtttccgccatttcccgaaccagcagtgcctcacgcctcagcagcacaagctttatgtcagagcaatctgagcgccccaggggtagaatcagttcatttacccccaaaatgcaaggcagacggatggggacttcaggaagatccatcatgaagagcaccagtgtcagtggagagatgtacacactggagcataatgacggcagccagtcagacacagctgtgggtacagttggagcaggtggaaagaaacggagatccagccttagtgccaaagtggttgccatagtgtctcgaaggagtagaagcacatcccagcttagtcaaacagagtcgggccacaaaaagttaaaaagtaccatccagagaagcacagaaacaggcatggcagctgaaatgagaaagatggtaaggcagccgagccgagagtctactgatggcagcatcaacagttacagctctgagggcaatttaatatttcctggagtgcgactgggagctgacagtcaattcagtgattttcttgatggattgggaccagcccagcttgttggccgccaaacccttgccacccctgcaatgggtgatatacaaataggaatggaggacaaaaagggccaattagaagtggaagtcattagagcacgaagcctcacacaaaagcctggttccaaatctacacctgctccatatgtcaaagtatatcttttggaaaatggggcctgtatagccaagaagaagacaagaattgcacgaaaaacccttgatcctttgtatcagcagtctctggtttttgatgaaagtccacagggtaaagttcttcaggtgattgtctggggagactatggcagaatggaccacaaatgctttatgggtgtggctcagatcttgttggaagaactcgacctgtccagcatggtgatcggatggtacaaattgttcccaccgtcctcactggtggatcccacactcactcccctcacccggcgggcttcccagtcatctctggaaagttcaactgggcctccctgtattcgatcatagtgaactcataccagagtcattccaataaaactctacttttcaggataataatctgaaccagatatttcatgatcgaaagcattgttggagacagacaatcaacttgtgttttgcctgtagtagtttttcaataatatgtcccaattgttatttaaaacatggcttcatatgacagaacaaggcaatctatcaaatttacaggaagaatcaacatgctggtgagagtcactgatgcttctaacaaatagaaaaagaggaaactttaaatccacgcatacacgtacacacacacatgcacacacacacacaccaaattgaacaaactggaaactctcactctgtgaaaagttgtattctacacatttctgcacagaccacaagcagtgttatttccctgatgtttgagttgttttgttcttttgtgtgttttgtttatttgtgtgttgtttgttg

SEQ ID NO: 25770 - DNA, 3542 bp, Homo sapiens
  source 1..3542: mol_type = unassigned DNA
agtaaatgctaccagtccccacaccaccaggcccaccgaagcttgtctacagtattttatccaagcagtcctttgggtaactgcacagtgcctgcagtgacctgagtcagtcatgcaaggagactttcttgttctcacaccaatgttttatttcagtttccattttctgctggtcctgttgttcaatgatataagcagagtgatgaaggaggcgcttcacactcttcttagataagatcttgagcagcagagagtggtttaaacagcaaggcttaaatctctcaagctggatttatttccaagtttgctgtcatgtgtgcacctgggattcatgtctcttcagaagggtgggaagaagtgaggtctgttgattccgaagagggaacaattgaagctcgacgagcagttgctggtgatttggattattactggttggatcctgccacgtggcacagccgggagacatcacctattagttcgcatcctgtaacgtggcaaccatctaaagagggggaccgattaattggacgtgttattcttaacaagagaacaaccatgcccaaagactcaggtgcattgctgggtctgaaagttgttggaggaaaaatgactgacttaggacgacttggtgctttcatcaccaaagtaaagaagggtagcctagcagatgtagttggacacctaagagcaggggatgaagttctagaatggaatggtaaacccctgccgggagctacaaatgaagaagtttacaacattattttagaatcaaaatcagaacctcaagttgaaattattgtttcaaggcctattggtgacattccccggattcctgagagctcccaccctccactggagtccagttcaagttcctttgaatctcagaagatggaaaggccttccatttctgttatttctccaacaagtcctggagctctaaaagatgccccacaagtcttaccagggcaactttctgtgaagttgtggtatgataaagtgggacaccagctgattgtaaatgttctgcaagcaacagatctacctgctagagtagatggacgtcctcgaaatccctatgtaaaaatgtattttcttccagatagaagtgataaaagtaaaaggaggaccaaaacagtaaagaaaatactagaaccaaaatggaatcaaacttttgtctattcacatgtacatcgtagagattttagagaacgaatgttagaaataactgtgtgggaccaaccaagagtgcaagaagaagaaagtgaatttcttggagagatcctcatagaattggagacagcgcttttagatgatgaaccgcattggtataaacttcagacacatgatgagtcttcactacctctgcctcagccatcacctttcatgccaaggcgacatattcatggagaaagctctagcaaaaagctacaaagatctcagcgaatcagtgatagtgacatctcagattatgaggttgatgatggtattggcgtagttcctccaggctataggtctagtgctagagaaagtaaatctacaacattaactgtgccagaacagcaaagaacaactcatcaccgctcacgttcagtatctcctcatcgcggcaatgatcagggaaagccgcgttcacgtttaccaaatgtgccattacagaggagtttagatgaaattcatccaacaagaaggtcacgttctccaaccagacaccatgatgcctcccgaagtccagttgatcatagaaccagagatgtggatagtcagtatttatcagaacaagacagtgagcttcttatgctgcccagagcaaaacgaggacgaagtgcagaatgcctacatactaccagtgaactgcagccctttcttgacagggctaggagtgctagtaccaactgcttgagaccagatactagtttgcattcaccagaacgagaaaggcactccagaaagtctgaaagatctagcatccaaaaacagactaggaaaggcactgcctctgatgcagaaagaatgcaccgacagagaagtccaacacaatctcctccagcagacacatcgttcagcagtcgcaggggaagacagctcccacaagtgccagtgagaagcggcagtatagaacaagcaagcttagtagtggaggagcgaacaagacagatgaaaatgaaagtgcatcgatttaagcagacaacagggtctggttctagtcaagaacttgatcgcgagcaatattccaagtataacatacataaagatcagtacagaagctgtgataacgtctctgccaaatcatcagatagtgatgtcagtgatgtttccgccatttcccgaaccagcagtgcctcacgcctcagcagcacaagctttatgtcagagcaatctgagcgccccaggggtagaatcagttcatttacccccaaaatgcaaggcagacggatggggacttcaggaagatccatcatgaagagcaccagtgtcagtggagagatgtacacactggagcataatgacggcagccagtcagacacagctgtgggtacagttggagcaggtggaaagaaacggagatccagccttagtgccaaagtggttgccatagtgtctcgaaggagtagaagcacatcccagcttagtcaaacagagtcgggccacaaaaagttaaaaagtaccatccagagaagcacagaaacaggcatggcagctgaaatgagaaagatggtaaggcagccgagccgagagtctactgatggcagcatcaacagttacagctctgagggcaatttaatatttcctggagtgcgactgggagctgacagtcaattcagtgattttcttgatggattgggaccagcccagcttgttggccgccaaacccttgccacccctgcaatgggtgatatacaaataggaatggaggacaaaaagggccaattagaagtggaagtcattagagcacgaagcctcacacaaaagcctggttccaaatctacacctgctccatatgtcaaagtatatcttttggaaaatggggcctgtatagccaagaagaagacaagaattgcacgaaaaacccttgatcctttgtatcagcagtctctggtttttgatgaaagtccacagggtaaagttcttcaggtgattgtctggggagactatggcagaatggaccacaaatgctttatgggtgtggctcagatcttgttggaagaactcgacctgtccagcatggtgatcggatggtacaaattgttcccaccgtcctcactggtggatcccacactcactcccctcacccggcgggcttcccagtcatctctggaaagttcaactgggcctccctgtattcgatcatagtgaactcataccagagtcattccaataaaactctacttttcaggataataatctgaaccagatatttcatgatcgaaagcattgttggagacagacaatcaacttgtgttttgcctgtagtagtttttcaataatatgtcccaattgttatttaaaacatggcttcatatgacagaacaaggcaatctatc

SEQ ID NO: 25771 - DNA, 1787 bp, Homo sapiens
  source 1..1787: mol_type = unassigned DNA
agttcacaggcagctcagacagatattccagccagccaccgcacaagttatttaaaccaggtcaaagcttctttggcattcagttttccccagagaacaatttaatgctgatacttaattttttcaagatagacaagagtcgggccacaaaaagttaaaaagtaccatccagagaagcacagaaacaggcatggcagctgaaatgagaaagatggtaaggcagccgagccgagagtctactgatggcagcatcaacagttacagctctgagggcaatttaatatttcctggagtgcgactgggagctgacagtcaattcagtgattttcttgatggattgggaccagcccagcttgttggccgccaaacccttgccacccctgcaatgggtgatatacaaataggaatggaggacaaaaagggccaattagaagtggaagtcattagagcacgaagcctcacacaaaagcctggttccaaatctacacctgctccatatgtcaaagtatatcttttggaaaatggggcctgtatagccaagaagaagacaagaattgcacgaaaaacccttgatcctttgtatcagcagtctctggtttttgatgaaagtccacagggtaaagttcttcaggtgattgtctggggagactatggcagaatggaccacaaatgctttatgggtgtggctcagatcttgttggaagaactcgacctgtccagcatggtgatcggatggtacaaattgttcccaccgtcctcactggtggatcccacactcactcccctcacccggcgggcttcccagtcatctctggaaagttcaactgggcctccctgtattcgatcatagtgaactcataccagagtcattccaataaaactctacttttcaggataataatctgaaccagatatttcatgatcgaaagcattgttggagacagacaatcaacttgtgttttgcctgtagtagtttttcaataatatgtcccaattgttatttaaaacatggcttcatatgacagaacaaggcaatctatcaaatttacaggaagaatcaacatgctggtgagagtcactgatgcttctaacaaatagaaaaagaggaaactttaaatccacgcatacacgtacacacacacatgcacacacacacacaccaaattgaacaaactggaaactctcactctgtgaaaagttgtattctacacatttctgcacagaccacaagcagtgttatttccctgatgtttgagttgttttgttcttttgtgtgttttgtttatttgtgtgttgtttgttggttttcgtttcttgagtttttgttttgttttcaccacatctgttatttccactagtttttttttggctgtgtcatgacaggcctcatgatgctaacagagattcttcccttcttttttccaaaagcaccaaaaaaaagggctgaagtagtctctgtagcatctccccaaagtgttaaacagctacataaggtgaagccaaggaagggtttcactagctttcattttataattatttaaagtcttatgtgtggatacccaagagacaaaaagttatcttccaaaataaataatcacagaagtacttttttaatgaagagcctatctgtttgcattctagaaaattaatttatggtttccattgttttgcatggaagacttttaaagaagtcaatctgcaactaatgctggggactaaaactaactgcataattgtactttgaaaacactccttgtaatgcctttttcttcctgatattaaaaaaa

SEQ ID NO: 25772 - DNA, 2799 bp, Homo sapiens
  source 1..2799: mol_type = unassigned DNA
agaaaagcctgaagaagcacttttgcctgtgttcccaacaatcaattgtgtatactcttggtttatgctttctggtgccagttgtcattgagctgagtaagattcctcagttagggaaactgcagaggaaatgatctgttacacagggcttggcaggaccattgccagtgattgataatgggaccaaatcatttcaggtgatttggattattactggttggatcctgccacgtggcacagccgggagacatcacctattagttcgcatcctgtaacgtggcaaccatctaaagagggggaccgattaattggacgtgttattcttaacaagagaacaaccatgcccaaagactcaggtgcattgctgggtctgaaagttgttggaggaaaaatgactgacttaggacgacttggtgctttcatcaccaaagtaaagaagggtagcctagcagatgtagttggacacctaagagcaggggatgaagttctagaatggaatggtaaacccctgccgggagctacaaatgaagaagtttacaacattattttagaatcaaaatcagaacctcaagttgaaattattgtttcaaggcctattggtgacattccccggattcctgagagctcccaccctccactggagtccagttcaagttcctttgaatctcagaagatggaaaggccttccatttctgttatttctccaacaagtcctggagctctaaaagatgccccacaagtcttaccagggcaactttctgtgaagttgtggtatgataaagtgggacaccagctgattgtaaatgttctgcaagcaacagatctacctgctagagtagatggacgtcctcgaaatccctatgtaaaaatgtattttcttccagatagaagtgataaaagtaaaaggaggaccaaaacagtaaagaaaatactagaaccaaaatggaatcaaacttttgtctattcacatgtacatcgtagagattttagagaacgaatgttagaaataactgtgtgggaccaaccaagagtgcaagaagaagaaagtgaatttcttggagagatcctcatagaattggagacagcgcttttagatgatgaaccgcattggtataaacttcagacacatgatgagtcttcactacctctgcctcagccatcacctttcatgccaaggcgacatattcatggagaaagctctagcaaaaagctacaaagatctcagcgaatcagtgatagtgacatctcagattatgaggttgatgatggtattggcgtagttcctccagtaggctataggtctagtgctagagaaagtaaatctacaacattaactgtgccagaacagcaaagaacaactcatcaccgctcacgttcagtatctcctcatcgcggcaatgatcagggaaagccgcgttcacgtttaccaaatgtgccattacagaggagtttagatgaaattcatccaacaagaaggtcacgttctccaaccagacaccatgatgcctcccgaagtccagttgatcatagaaccagagatgtggatagtcagtatttatcagaacaagacagtgagcttcttatgctgcccagagcaaaacgaggacgaagtgcagaatgcctacatactaccagtgaactgcagccctttcttgacagggctaggagtgctagtaccaactgcttgagaccagatactagtttgcattcaccagaacgagaaaggcactccagaaagtctgaaagatctagcatccaaaaacagactaggaaaggcactgcctctgatgcagaaagaatgcaccgacagagaagtccaacacaatctcctccagcagacacatcgttcagcagtcgcaggggaagacagctcccacaagtgccagtgagaagcggcagtatagaacaagagtcgggccacaaaaagttaaaaagtaccatccagagaagcacagaaacaggcatggcagctgaaatgagaaagatggtaaggcagccgagccgagagtctactgatggcagcatcaacagttacagctctgagggcaatttaatatttcctggagtgcgactgggagctgacagtcaattcagtgattttcttgatggattgggaccagcccagcttgttggccgccaaacccttgccacccctgcaatgggtgatatacaaataggaatggaggacaaaaagggccaattagaagtggaagtcattagagcacgaagcctcacacaaaagcctggttccaaatctacacctgctccatatgtcaaagtatatcttttggaaaatggggcctgtatagccaagaagaagacaagaattgcacgaaaaacccttgatcctttgtatcagcagtctctggtttttgatgaaagtccacagggtaaagttcttcaggtgattgtctggggagactatggcagaatggaccacaaatgctttatgggtgtggctcagatcttgttggaagaactcgacctgtccagcatggtgatcggatggtacaaattgttcccaccgtcctcactggtggatcccacactcactcccctcacccggcgggcttcccagtcatctctggaaagttcaactgggcctccctgtattcgatcatagtgaactcataccagagtcattccaataaaactctacttttcaggataataatctgaaccagatatttcatgatcgaaagcattgttggagacagacaatcaacttgtgttttgcctgtagtagtttttcaataatatgtcccaattgttatttaaaacatggcttcatatgacaga

SEQ ID NO: 25773 - DNA, 3065 bp, Homo sapiens
  source 1..3065: mol_type = unassigned DNA
gtgttagctttaaggaccacaacgtttcatctctctggcttcaggaaggtagcagcttctgtgcattgttttaggaaatggttaattgaggagctaaaagagctttagtgtatgctacactgggagccactttagtacagcacagagcactatagattaatgctgtaatcaatgagaatctgttcactgcagagatctgttttgatgacagcagcacttatggccttgtttagtgtcactgttgtataatgttggacactgcaggcttttttggctttgatttagaatgcaaggaccacagggaattttatttaaaatgttgtattttggtggattttttaattgtgttgtgcatttgctgccattgctagctgaaatttaatgatttgatgccagtggcatttagttaaccactccgatgctgctgttatgtttgctgggtttctgcagtttctactacttcatacattgcactcaggaacaggtgatttggattattactggttggatcctgccacgtggcacagccgggagacatcacctattagttcgcatcctgtaacgtggcaaccatctaaagagggggaccgattaattggacgtgttattcttaacaagagaacaaccatgcccaaagactcaggtgcattgctgggtctgaaagttgttggaggaaaaatgactgacttaggacgacttggtgctttcatcaccaaagtaaagaagggtagcctagcagatgtagttggacacctaagagcaggggatgaagttctagaatggaatggtaaacccctgccgggagctacaaatgaagaagtttacaacattattttagaatcaaaatcagaacctcaagttgaaattattgtttcaaggcctattggtgacattccccggattcctgagagctcccaccctccactggagtccagttcaagttcctttgaatctcagaagatggaaaggccttccatttctgttatttctccaacaagtcctggagctctaaaagatgccccacaagtcttaccagggcaactttctgtgaagttgtggtatgataaagtgggacaccagctgattgtaaatgttctgcaagcaacagatctacctgctagagtagatggacgtcctcgaaatccctatgtaaaaatgtattttcttccagatagaagtgataaaagtaaaaggaggaccaaaacagtaaagaaaatactagaaccaaaatggaatcaaacttttgtctattcacatgtacatcgtagagattttagagaacgaatgttagaaataactgtgtgggaccaaccaagagtgcaagaagaagaaagtgaatttcttggagagatcctcatagaattggagacagcgcttttagatgatgaaccgcattggtataaacttcagacacatgatgagtcttcactacctctgcctcagccatcacctttcatgccaaggcgacatattcatggagaaagctctagcaaaaagctacaaagatctcagcgaatcagtgatagtgacatctcagattatgaggttgatgatggtattggcgtagttcctccagtaggctataggtctagtgctagagaaagtaaatctacaacattaactgtgccagaacagcaaagaacaactcatcaccgctcacgttcagtatctcctcatcgcggcaatgatcagggaaagccgcgttcacgtttaccaaatgtgccattacagaggagtttagatgaaattcatccaacaagaaggtcacgttctccaaccagacaccatgatgcctcccgaagtccagttgatcatagaaccagagatgtggatagtcagtatttatcagaacaagacagtgagcttcttatgctgcccagagcaaaacgaggacgaagtgcagaatgcctacatactaccagtgaactgcagccctttcttgacagggctaggagtgctagtaccaactgcttgagaccagatactagtttgcattcaccagaacgagaaaggcactccagaaagtctgaaagatctagcatccaaaaacagactaggaaaggcactgcctctgatgcagaaagaatgcaccgacagagaagtccaacacaatctcctccagcagacacatcgttcagcagtcgcaggggaagacagctcccacaagtgccagtgagaagcggcagtatagaacaagagtcgggccacaaaaagttaaaaagtaccatccagagaagcacagaaacaggcatggcagctgaaatgagaaagatggtaaggcagccgagccgagagtctactgatggcagcatcaacagttacagctctgagggcaatttaatatttcctggagtgcgactgggagctgacagtcaattcagtgattttcttgatggattgggaccagcccagcttgttggccgccaaacccttgccacccctgcaatgggtgatatacaaataggaatggaggacaaaaagggccaattagaagtggaagtcattagagcacgaagcctcacacaaaagcctggttccaaatctacacctgctccatatgtcaaagtatatcttttggaaaatggggcctgtatagccaagaagaagacaagaattgcacgaaaaacccttgatcctttgtatcagcagtctctggtttttgatgaaagtccacagggtaaagttcttcaggtgattgtctggggagactatggcagaatggaccacaaatgctttatgggtgtggctcagatcttgttggaagaactcgacctgtccagcatggtgatcggatggtacaaattgttcccaccgtcctcactggtggatcccacactcactcccctcacccggcgggcttcccagtcatctctggaaagttcaactgggcctccctgtattcgatcatagtgaactcataccagagtcattccaataaaactctacttttcaggataataatctgaaccagatatttcatgatcgaaagcattgttggagacagacaatcaacttgtgttttgcctgtagtagtttttcaataatatgtcccaattgttatttaa

SEQ ID NO: 25774 - DNA, 3097 bp, Homo sapiens
  source 1..3097: mol_type = unassigned DNA
gcacagtgcctgcagtgacctgagtcagtcatgcaaggagactttcttgttctcacaccaatgttttatttcagtttccattttctgctggtcctgttgttcaatgatataagcagagtgatgaaggaggcgcttcacactcttcttagataagatcttgagcagcagagagtggtttaaacagcaaggcttaaatctctcaagctggatttatttccaagtttgctgtcatgtgtgcacctgggattcatgtctcttcagaagggtgggaagaagtgaggtctgttgattccgaagagggaacaattgaagctcgacgagcagttgctggtgatttggattattactggttggatcctgccacgtggcacagccgggagacatcacctattagttcgcatcctgtaacgtggcaaccatctaaagagggggaccgattaattggacgtgttattcttaacaagagaacaaccatgcccaaagactcaggtgcattgctgggtctgaaagttgttggaggaaaaatgactgacttaggacgacttggtgctttcatcaccaaagtaaagaagggtagcctagcagatgtagttggacacctaagagcaggggatgaagttctagaatggaatggtaaacccctgccgggagctacaaatgaagaagtttacaacattattttagaatcaaaatcagaacctcaagttgaaattattgtttcaaggcctattggtgacattccccggattcctgagagctcccaccctccactggagtccagttcaagttcctttgaatctcagaagatggaaaggccttccatttctgttatttctccaacaagtcctggagctctaaaagatgccccacaagtcttaccagggcaactttctgtgaagttgtggtatgataaagtgggacaccagctgattgtaaatgttctgcaagcaacagatctacctgctagagtagatggacgtcctcgaaatccctatgtaaaaatgtattttcttccagatagaagtgataaaagtaaaaggaggaccaaaacagtaaagaaaatactagaaccaaaatggaatcaaacttttgtctattcacatgtacatcgtagagattttagagaacgaatgttagaaataactgtgtgggaccaaccaagagtgcaagaagaagaaagtgaatttcttggagagatcctcatagaattggagacagcgcttttagatgatgaaccgcattggtataaacttcagacacatgatgagtcttcactacctctgcctcagccatcacctttcatgccaaggcgacatattcatggagaaagctctagcaaaaagctacaaagatctcagcgaatcagtgatagtgacatctcagattatgaggttgatgatggtattggcgtagttcctccagtaggctataggtctagtgctagagaaagtaaatctacaacattaactgtgccagaacagcaaagaacaactcatcaccgctcacgttcagtatctcctcatcgcggcaatgatcagggaaagccgcgttcacgtttaccaaatgtgccattacagaggagtttagatgaaattcatccaacaagaaggtcacgttctccaaccagacaccatgatgcctcccgaagtccagttgatcatagaaccagagatgtggatagtcagtatttatcagaacaagacagtgagcttcttatgctgcccagagcaaaacgaggacgaagtgcagaatgcctacatactaccagtgaactgcagccctttcttgacagggctaggagtgctagtaccaactgcttgagaccagatactagtttgcattcaccagaacgagaaagaatgcaccgacagagaagtccaacacaatctcctccagcagacacatcgttcagcagtcgcaggggaagacagctcccacaagtgccagtgagaagcggcagtatagaacaagagtcgggccacaaaaagttaaaaagtaccatccagagaagcacagaaacaggcatggcagctgaaatgagaaagatggtaaggcagccgagccgagagtctactgatggcagcatcaacagttacagctctgagggcaatttaatatttcctggagtgcgactgggagctgacagtcaattcagtgattttcttgatggattgggaccagcccagcttgttggccgccaaacccttgccacccctgcaatgggtgatatacaaataggaatggaggacaaaaagggccaattagaagtggaagtcattagagcacgaagcctcacacaaaagcctggttccaaatctacacctgctccatatgtcaaagtatatcttttggaaaatggggcctgtatagccaagaagaagacaagaattgcacgaaaaacccttgatcctttgtatcagcagtctctggtttttgatgaaagtccacagggtaaagttcttcaggtgattgtctggggagactatggcagaatggaccacaaatgctttatgggtgtggctcagatcttgttggaagaactcgacctgtccagcatggtgatcggatggtacaaattgttcccaccgtcctcactggtggatcccacactcactcccctcacccggcgggcttcccagtcatctctggaaagttcaactgggcctccctgtattcgatcatagtgaactcataccagagtcattccaataaaactctacttttcaggataataatctgaaccagatatttcatgatcgaaagcattgttggagacagacaatcaacttgtgttttgcctgtagtagtttttcaataatatgtcccaattgttatttaaaacatggcttcatatgacagaacaaggcaatctatcaaatttacaggaagaatcaacatgctggtgagagtcactgatgcttctaacaaatagaaaaagaggaaactttaaatccacgcatacacgtacacacacacatgcacacacacacacaccaaattgaacaaactggaaactctcactctgtgaaaagttgtattctacacatttctgcacagaccacaagcagtgttatttccctgatgtttgagttgtttt

SEQ ID NO: 25775 - DNA, 3854 bp, Homo sapiens
  source 1..3854: mol_type = unassigned DNA
agaattcttgctacagtcaggagaaagccgaaagctgcacgggtactgaatcttctacgactgaattagaagaataatgactgtacaattaactatcaacctctgttcatttaagcacagtttttacagagctcaggagaaatatggaacttgattggcgtgtttttatttgatggtgtcagcaaatagatgattttaaagacaggtggtagggaaaaataagagaaggggaaaaaaaaagaaagaaaatgcaatttgagacattgcgccaggtctgcaattctgttttatctcattttcatggggttttttcatccccaccaaatatcttacaaaatgagctttttggacaaacactgaacaatgcaaggaaaagaagcccatctgtgtccagagatcagaatagaagatacgaccaaagggaagaaagagaggaatattcacagtatgctacttcggataccgcaatgcctagatctccatcagattatgctgataggcgatctcaacatgaacctcagttttatgaagactctgatcatttaagttatagggactccaacaggagaagtcataggcattccaaagaatatattgtagatgatgaggatgtggaaagcagagatgaatacgaaaggcaaaggagagaggaagagtaccagtcacgctaccgaagtgatccgaatttggcccgttatccagtaaagccacaaccctatgaagaacaaatgcggatccatgctgaagtgtcccgagcacggcatgagagaaggcatagtgatgtttctttggcaaatgctgatctggaagattccaggatttctatgctaaggatggatcgaccatcaaggcaaagatctatatcagaacgtagagctgccatggaaaatcagcgatcttattcaatggaaagaactcgagaggctcagggaccaagttcttatgcacaaaggaccacaaaccatagtcctcctacccccaggaggagtccactacccatagatagaccagacttgaggcgtactgactcactacggaaacagcaccacttagatcctagctctgctgtaagaaaaacaaaacgggaaaaaatggaaacaatgttaaggaatgattctctcagttcagaccagtcagagtcagtgagacctccaccaccaaagcctcataaatcaaagaaaggcggtaaaatgcgccagatttcgttgagcagttcagaggaggaattggcttccacgcctgaatatacaagttgtgatgatgttgagattgaaagtgagagtgtaagtgaaaaaggggacagtcaaaagggaaaaagaaaaactagtgagcaggcagttttgtcggactctaacaccaggtctgagagacaaaaggaaatgatgtactttggtggccactctttggaagaggatttggaatggtctgaacctcagattaaggactctggggtagatacgtgtagtagcacaacccttaacgaggagcatagccatagtgataagcaccctgtaacctggcaaccatctaaagatggagatcgtttaattggtcgcattttattaaataagcgtctaaaagatggaagtgtacctcgagattcaggagcaatgcttggcttgaaggttgtaggaggaaagatgactgaatcaggtcggctttgtgcatttattactaaagtaaaaaaaggaagtttagctgatactgtaggacatcttagaccaggtgatgaagtattagaatggaatggaagactactgcaaggagccacatttgaggaagtgtacaacatcattctagaatccaaacctgaaccacaagtagaacttgtagtttcaaggcctattggagatataccgcgaatacctgatagcacacatgcacaactggagtccagttctagctcctttgaatctcaaaaaatggatcgtccttctatttctgttacctctcccatgagtcctggaatgttgagggatgtcccacagttcttatcaggacaactttcaataaaactatggtttgacaaggttggtcaccaattaatagttacaattttgggagcaaaagatctcccttccagggaagatgggaggccaaggaatccttatgttaaaatttactttcttccagacagaagtgataaaaacaagagaagaactaaaacagtaaagaaaacattggaacccaaatggaaccaaacattcatttattctccagtccaccgaagagaatttcgggaacgaatgctagagattaccctttgggatcaagctcgtgttcgagaggaagaaagtgaattcttaggcgagattttaattgaattagaaacagcattattagatgatgagccacattggtacaaacttcagacgcatgatgtctcttcattgccacttccccacccttctccatatatgccacgaagacagctccatggagagagcccaacacggaggttgcaaaggtcaaagagaataagtgatagtgaagtctctgactatgactgtgatgatggaattggtgtagtatcagattatcgacatgatggtcgagatcttcaaagctcaacattatcagtgccagaacaagtaatgtcatcaaaccactgttcaccatcagggtctcctcatcgagtagatgttataggaaggactagatcatggtcacccagtgtccctcctccacaaagtcggaatgtggaacaggggcttcgagggacccgcactatgaccggacattataatacaattagccgaatggacagacatcgtgtcatggatgaccattattctccagatagagacagggattgtgaagcagcagatagacagccatatcacagatccagatcaacagaacaacggcctctccttgagcggaccaccacccgctccagatccactgaacgtcctgatacaaacctcatgaggtcgatgccttcattaatgactggaagatctgcccctccttcacctgccttatcgaggtctcatcctcgtactgggtctgtccagacaagcccatcaagtactccagtcgcaggacgaaggggccgacagcttccacagcttccaccaaagggaacgttggatagaaaagcaggaggtaaaaaactaaggagcactgtccaaagaagtacagaaacaggcctggccgtggaaatgaggaactggatgactcgacaggcaagccgagagtctacagatggtagcatgaacagctacagctcagaaggaaatctgattttccctggtgttcgcttggcctctgatagccagttcagtgatttcctggatggccttggccctgctcagctagtgggacgccagactctggcaacacctgcaatgggtgacattcaggtaggaatgatggacaaaaagggacagctggaggtagaaatcatccgggcccgtggccttgttgtaaaaccaggttccaagacactgccagcaccgtatgtaaaagtgtatctattagataacggagtctgcatagccaaaaagaaaacaaaagtggcaagaaaaacgctggaacccctttaccagcagctattatctttcgaagagagtccacaaggaaaagttttacagatcatcgtctggggagattatggccgcatggatcacaaatcttttatgggagtggcccagatacttttagatgaactagagctatccaatatggtgatcggatggttcaaacttttcccaccttcctccctagtagatccaaccttggcccctctgacaagaagagcttcccaatcatctctggaaagttcaactggaccttcttactctcgttcatagcagctgtaaaaaaattgttgtcacagcaaccagcgttac

SEQ ID NO: 25776 - DNA, 4161 bp, Homo sapiens
  source 1..4161: mol_type = unassigned DNA
atgtcggctcctgtcgggccccggggccgcctggctcccatcccggcggcctctcagccgcctctgcagcccgagatgcctgacctcagccacctcacggaggaggagaggaaaatcatcctggccgtcatggataggcagaagaaagaggtcaaagaagaacacaaaccacaactgacacagtggtttccctttagtggaatcactgaactggtaaataacgttcttcagccccagcaaaaacaacaaaatgaaaaggagccccagacaaaactgcatcagcagtttgaaatgtataaagagcaggtaaagaagatgggagaagaatcacagcaacagcaagaacagaagggtgatgcgccaacctgtggtatctgccacaaaacaaagtttgctgatggatgtggccataactgttcatattgccaaacaaagttctgtgctcgttgtggaggtcgagtgtcattacgctcaaacaaggttatgtgggtatgtaatttgtgccgaaaacaacaagaaatcctcactaaatcaggagcatggttttataatagtggatctaatacaccacagcaacctgatcaaaaggttcttcgagggctaagaaatgaggaggcacctcaggagaagaaaccaaaactacatgagcagacccagttccaaggaccctcaggtgacttatctgtacctgcagtggagaaaagtcgatctcatgggctcacaagacagcattctattaaaaatgggtcaggcgtgaagcatcacattgccagtgacatagcttcagacaggaaaagaagcccatctgtgtccagagatcagaatagaagatacgaccaaagggaagaaagagaggaatattcacagtatgctacttcggataccgcaatgcctagatctccatcagattatgctgataggcgatctcaacatgaacctcagttttatgaagactctgatcatttaagttatagggactccaacaggagaagtcataggcattccaaagaatatattgtagatgatgaggatgtggaaagcagagatgaatacgaaaggcaaaggagagaggaagagtaccagtcacgctaccgaagtgatccgaatttggcccgttatccagtaaagccacaaccctatgaagaacaaatgcggatccatgctgaagtgtcccgagcacggcatgagagaaggcatagtgatgtttctttggcaaatgctgatctggaagattccaggatttctatgctaaggatggatcgaccatcaaggcaaagatctatatcagaacgtagagctgccatggaaaatcagcgatcttattcaatggaaagaactcgagaggctcagggaccaagttcttatgcacaaaggaccacaaaccatagtcctcctacccccaggaggagtccactacccatagatagaccagacttgaggcgtactgactcactacggaaacagcaccacttagatcctagctctgctgtaagaaaaacaaaacgggaaaaaatggaaacaatgttaaggaatgattctctcagttcagaccagtcagagtcagtgagacctccaccaccaaagcctcataaatcaaagaaaggcggtaaaatgcgccagatttcgttgagcagttcagaggaggaattggcttccacgcctgaatatacaagttgtgatgatgttgagattgaaagtgagagtgtaagtgaaaaaggagacatggattacaactggttggatcatacgtcttggcatagcagtgaggcatccccaatgtctttgcaccctgtaacctggcaaccatctaaagatggagatcgtttaattggtcgcattttattaaataagcgtctaaaagatggaagtgtacctcgagattcaggagcaatgcttggcttgaaggttgtaggaggaaagatgactgaatcaggtcggctttgtgcatttattactaaagtaaaaaaaggaagtttagctgatactgtaggacatcttagaccaggtgatgaagtattagaatggaatggaagactactgcaaggagccacatttgaggaagtgtacaacatcattctagaatccaaacctgaaccacaagtagaacttgtagtttcaaggcctattggagatataccgcgaatacctgatagcacacatgcacaactggagtccagttctagctcctttgaatctcaaaaaatggatcgtccttctatttctgttacctctcccatgagtcctggaatgttgagggatgtcccacagttcttatcaggacaactttcaataaaactatggtttgacaaggttggtcaccaattaatagttacaattttgggagcaaaagatctcccttccagggaagatgggaggccaaggaatccttatgttaaaatttactttcttccagacagaagtgataaaaacaagagaagaactaaaacagtaaagaaaacattggaacccaaatggaaccaaacattcatttattctccagtccaccgaagagaatttcgggaacgaatgctagagattaccctttgggatcaagctcgtgttcgagaggaagaaagtgaattcttaggcgagattttaattgaattagaaacagcattattagatgatgagccacattggtacaaacttcagacgcatgatgtctcttcattgccacttccccacccttctccatatatgccacgaagacagctccatggagagagcccaacacggaggttgcaaaggtcaaagagaataagtgatagtgaagtctctgactatgactgtgatgatggaattggtgtagtatcagattatcgacatgatggtcgagatcttcaaagctcaacattatcagtgccagaacaagtaatgtcatcaaaccactgttcaccatcagggtctcctcatcgagtagatgttataggaaggactagatcatggtcacccagtgtccctcctccacaaagtcggaatgtggaacaggggcttcgagggacccgcactatgaccggacattataatacaattagccgaatggacagacatcgtgtcatggatgaccattattctccagatagagacagtcattttcttactctacctcgctccagatacagtcagaccattgaccatcatcacagggatggcagggattgtgaagcagcagatagacagccatatcacagatccagatcaacagaacaacggcctctccttgagcggaccaccacccgctccagatccactgaacgtcctgatacaaacctcatgaggtcgatgccttcattaatgactggaagatctgcccctccttcacctgccttatcgaggtctcatcctcgtactgggtctgtccagacaagcccatcaagtactccagtcgcaggacgaaggggccgacagcttccacagcttccaccaaagggaacgttggatagaaaagcaggaggtaaaaaactaaggagcactgtccaaagaagtacagaaacaggcctggccgtggaaatgaggaactggatgactcgacaggcaagccgagagtctacagatggtagcatgaacagctacagctcagaaggaaatctgattttccctggtgttcgcttggcctctgatagccagttcagtgatttcctggatggccttggccctgctcagctagtgggacgccagactctggcaacacctgcaatgggtgacattcaggtaggaatgatggacaaaaagggacagctggaggtagaaatcatccgggcccgtggccttgttgtaaaaccaggttccaagacactgccagcaccgtatgtaaaagtgtatctattagataacggagtctgcatagccaaaaagaaaacaaaagtggcaagaaaaacgctggaacccctttaccagcagctattatctttcgaagagagtccacaaggaaaagttttacagatcatcgtctggggagattatggccgcatggatcacaaatcttttatgggagtggcccagatacttttagatgaactagagctatccaatatggtgatcggatggttcaaacttttcccaccttcctccctagtagatccaaccttggcccctctgacaagaagagcttcccaatcatctctggaaagttcaactggaccttcttactctcgttcatag

SEQ ID NO: 25777 - DNA, 897 bp, Homo sapiens
  source 1..897: mol_type = unassigned DNA
atgggccggcagggcttggggggtgccagcgctgcggggcgctccatgcagcgctcccagagccggagtagcctgtctgcctccttcgaggcactggccggctactttccctgcatgaactccctggaggaggaagaaggagaagcaggaggtaaaaaactaaggagcactgtccaaagaagtacagaaacaggcctggccgtggaaatgaggaactggatgactcgacaggcaagccgagagtctacagatggtagcatgaacagctacagctcagaaggaaatctgattttccctggtgttcgcttggcctctgatagccagttcagtgatttcctggatggccttggccctgctcagctagtgggacgccagactctggcaacacctgcaatgggtgacattcaggtaggaatgatggacaaaaagggacagctggaggtagaaatcatccgggcccgtggccttgttgtaaaaccaggttccaagacactgccagcaccgtatgtaaaagtgtatctattagataacggagtctgcatagccaaaaagaaaacaaaagtggcaagaaaaacgctggaacccctttaccagcagctattatctttcgaagagagtccacaaggaaaagttttacagatcatcgtctggggagattatggccgcatggatcacaaatcttttatgggagtggcccagatacttttagatgaactagagctatccaatatggtgatcggatggttcaaacttttcccaccttcctccctagtagatccaaccttggcccctctgacaagaagagcttcccaatcatctctggaaagttcaactggaccttcttactctcgttcatagcagctgtaaaaaaattgttgtcacagcaaccagcgttac

SEQ ID NO: 25778 - DNA, 1923 bp, Homo sapiens
  source 1..1923: mol_type = unassigned DNA
acacttcagctgggaatgcccaaaaagcttactgctgtttagaattcttgctacagtcaggagaaagccgaaagctgcacgggtactgaatcttctacgactgaattagaagaataatgactgtacaattaactatcaacctctgttcatttaagcacagtttttacagagctcaggagaaatatggaacttgattggcgtgtttttatttgatggtgtcagcaaatagatgattttaaagacaggtggtagggaaaaataagagaaggggaaaaaaaaagaaagaaaatgcaatttgagacattgcgccaggtctgcaattctgttttatctcattttcatggggttttttcatccccaccaaatatcttacaaaatgagctttttggacaaacactgaacaatgcaaggaaaagaagcccatctgtgtccagagatcagaatagaagatacgaccaaagggaagaaagagaggaatattcacagtatgctacttcggataccgcaatgcctagatctccatcagattatgctgataggcgatctcaacatgaacctcagttttatgaagactctgatcatttaagttatagggactccaacaggagaagtcataggcattccaaagaatatattgtagatgatgaggatgtggaaagcagagatgaatacgaaaggcaaaggagagaggaagagtaccagtcacgctaccgaagtgatccgaatttggcccgttatccagtaaagccacaaccctatgaagaacaaatgcggatccatgctgaagtgtcccgagcacggcatgagagaaggcatagtgatgtttctttggcaaatgctgatctggaagattccaggatttctatgctaaggatggatcgaccatcaaggcaaagatctatatcagaacgtagagctgccatggaaaatcagcgatcttattcaatggaaagaactcgagaggctcagggaccaagttcttatgcacaaaggaccacaaaccatagtcctcctacccccaggaggagtccactacccatagatagaccagacttgaggcgtactgactcactacggaaacagcaccacttagatcctagctctgctgtaagaaaaacaaaacgggaaaaaatggaaacaatgttaaggaatgattctctcagttcagaccagtcagagtcagtgagacctccaccaccaaagcctcataaatcaaagaaaggcggtaaaatgcgccagatttcgttgagcagttcagaggaggaattggcttccacgcctgaatatacaagttgtgatgatgttgagattgaaagtgagagtgtaagtgaaaaaggagacatggattacaactggttggatcatacgtcttggcatagcagtgaggcatccccaatgtctttgcaccctgtaacctggcaaccatctaaagatggagatcgtttaattggtcgcattttattaaataagcgtctaaaagatggaagtgtacctcgagattcaggagcaatgcttggcttgaaggttgtaggaggaaagatgactgaatcaggtcggctttgtgcatttattactaaagtaaaaaaaggaagtttagctgatactgtaggacatcttagaccaggtgatgaagtattagaatggaatggaagactactgcaaggagccacatttgaggaagtgtacaacatcattctagaatccaaacctgaaccacaagtagaacttgtagtttcaaggcctattggagatataccgcgaatacctgatagcacacatgcacaactggagtccagtcttcctggcctagcgtggtggctcacgcgtgtaatcccagcactttgggaggccgaggcgggcggatcacgaggtcaggagatcgagaccatcctggctaacacggtgaaaccccgtctctactaa

SEQ ID NO: 25779 - DNA, 4236 bp, Homo sapiens
  source 1..4236: mol_type = unassigned DNA
atgtcggctcctgtcgggccccggggccgcctggctcccatcccggcggcctctcagccgcctctgcagcccgagatgcctgacctcagccacctcacggaggaggagaggaaaatcatcctggccgtcatggataggcagaagaaagaggtcaaagaagaacacaaaccacaactgacacagtggtttccctttagtggaatcactgaactggtaaataacgttcttcagccccagcaaaaacaacaaaatgaaaaggagccccagacaaaactgcatcagcagtttgaaatgtataaagagcaggtaaagaagatgggagaagaatcacagcaacagcaagaacagaagggtgatgcgccaacctgtggtatctgccacaaaacaaagtttgctgatggatgtggccataactgttcatattgccaaacaaagttctgtgctcgttgtggaggtcgagtgtcattacgctcaaacaaggttatgtgggtatgtaatttgtgccgaaaacaacaagaaatcctcactaaatcaggagcatggttttataatagtggatctaatacaccacagcaacctgatcaaaaggttcttcgagggctaagaaatgaggaggcacctcaggagaagaaaccaaaactacatgagcagacccagttccaaggaccctcaggtgacttatctgtacctgcagtggagaaaagtcgatctcatgggctcacaagacagcattctattaaaaatgggtcaggcgtgaagcatcacattgccagtgacatagcttcagacaggaaaagaagcccatctgtgtccagagatcagaatagaagatacgaccaaagggaagaaagagaggaatattcacagtatgctacttcggataccgcaatgcctagatctccatcagattatgctgataggcgatctcaacatgaacctcagttttatgaagactctgatcatttaagttatagggactccaacaggagaagtcataggcattccaaagaatatattgtagatgatgaggatgtggaaagcagagatgaatacgaaaggcaaaggagagaggaagagtaccagtcacgctaccgaagtgatccgaatttggcccgttatccagtaaagccacaaccctatgaagaacaaatgcggatccatgctgaagtgtcccgagcacggcatgagagaaggcatagtgatgtttctttggcaaatgctgatctggaagattccaggatttctatgctaaggatggatcgaccatcaaggcaaagatctatatcagaacgtagagctgccatggaaaatcagcgatcttattcaatggaaagaactcgagaggctcagggaccaagttcttatgcacaaaggaccacaaaccatagtcctcctacccccaggaggagtccactacccatagatagaccagacttgaggcgtactgactcactacggaaacagcaccacttagatcctagctctgctgtaagaaaaacaaaacgggaaaaaatggaaacaatgttaaggaatgattctctcagttcagaccagtcagagtcagtgagacctccaccaccaaagcctcataaatcaaagaaaggcggtaaaatgcgccagatttcgttgagcagttcagaggaggaattggcttccacgcctgaatatacaagttgtgatgatgttgagattgaaagtgagagtgtaagtgaaaaaggggacagtcaaaagggaaaaagaaaaactagtgagcaggcagttttgtcggactctaacaccaggtctgagagacaaaaggaaatgatgtactttggtggccactctttggaagaggatttggaatggtctgaacctcagattaaggactctggggtagatacgtgtagtagcacaacccttaacgaggagcatagccatagtgataagcaccctgtaacctggcaaccatctaaagatggagatcgtttaattggtcgcattttattaaataagcgtctaaaagatggaagtgtacctcgagattcaggagcaatgcttggcttgaaggttgtaggaggaaagatgactgaatcaggtcggctttgtgcatttattactaaagtaaaaaaaggaagtttagctgatactgtaggacatcttagaccaggtgatgaagtattagaatggaatggaagactactgcaaggagccacatttgaggaagtgtacaacatcattctagaatccaaacctgaaccacaagtagaacttgtagtttcaaggcctattggagatataccgcgaatacctgatagcacacatgcacaactggagtccagttctagctcctttgaatctcaaaaaatggatcgtccttctatttctgttacctctcccatgagtcctggaatgttgagggatgtcccacagttcttatcaggacaactttcaataaaactatggtttgacaaggttggtcaccaattaatagttacaattttgggagcaaaagatctcccttccagggaagatgggaggccaaggaatccttatgttaaaatttactttcttccagacagaagtgataaaaacaagagaagaactaaaacagtaaagaaaacattggaacccaaatggaaccaaacattcatttattctccagtccaccgaagagaatttcgggaacgaatgctagagattaccctttgggatcaagctcgtgttcgagaggaagaaagtgaattcttaggcgagattttaattgaattagaaacagcattattagatgatgagccacattggtacaaacttcagacgcatgatgtctcttcattgccacttccccacccttctccatatatgccacgaagacagctccatggagagagcccaacacggaggttgcaaaggtcaaagagaataagtgatagtgaagtctctgactatgactgtgatgatggaattggtgtagtatcagattatcgacatgatggtcgagatcttcaaagctcaacattatcagtgccagaacaagtaatgtcatcaaaccactgttcaccatcagggtctcctcatcgagtagatgttataggaaggactagatcatggtcacccagtgtccctcctccacaaagtcggaatgtggaacaggggcttcgagggacccgcactatgaccggacattataatacaattagccgaatggacagacatcgtgtcatggatgaccattattctccagatagagacagggattgtgaagcagcagatagacagccatatcacagatccagatcaacagaacaacggcctctccttgagcggaccaccacccgctccagatccactgaacgtcctgatacaaacctcatgaggtcgatgccttcattaatgactggaagatctgcccctccttcacctgccttatcgaggtctcatcctcgtactgggtctgtccagacaagcccatcaagtactccagtcgcaggacgaaggggccgacagcttccacagcttccaccaaagggaacgttggatagaaaagcaggaggtaaaaaactaaggagcactgtccaaagaagtacagaaacaggcctggccgtggaaatgaggaactggatgactcgacaggcaagccgagagtctacagatggtagcatgaacagctacagctcagaaggaaatctgattttccctggtgttcgcttggcctctgatagccagttcagtgatttcctggatggccttggccctgctcagctagtgggacgccagactctggcaacacctgcaatgggtgacattcaggtaggaatgatggacaaaaagggacagctggaggtagaaatcatccgggcccgtggccttgttgtaaaaccaggttccaagacactgccagcaccgtatgtaaaagtgtatctattagataacggagtctgcatagccaaaaagaaaacaaaagtggcaagaaaaacgctggaacccctttaccagcagctattatctttcgaagagagtccacaaggaaaagttttacagatcatcgtctggggagattatggccgcatggatcacaaatcttttatgggagtggcccagatacttttagatgaactagagctatccaatatggtgatcggatggttcaaacttttcccaccttcctccctagtagatccaaccttggcccctctgacaagaagagcttcccaatcatctctggaaagttcaactggaccttcttactctcgttcatag

SEQ ID NO: 25780 - DNA, 4050 bp, Homo sapiens
  source 1..4050: mol_type = unassigned DNA
atgtcggctcctgtcgggccccggggccgcctggctcccatcccggcggcctctcagccgcctctgcagcccgagatgcctgacctcagccacctcacggaggaggagaggaaaatcatcctggccgtcatggataggcagaagaaagaagaggagaaggagcagtccgtgctcaaaaaactgcatcagcagtttgaaatgtataaagagcaggtaaagaagatgggagaagaatcacagcaacagcaagaacagaagggtgatgcgccaacctgtggtatctgccacaaaacaaagtttgctgatggatgtggccataactgttcatattgccaaacaaagttctgtgctcgttgtggaggtcgagtgtcattacgctcaaacaaggttatgtgggtatgtaatttgtgccgaaaacaacaagaaatcctcactaaatcaggagcatggttttataatagtggatctaatacaccacagcaacctgatcaaaaggttcttcgagggctaagaaatgaggaggcacctcaggagaagaaaccaaaactacatgagcagacccagttccaaggaccctcaggtgacttatctgtacctgcagtggagaaaagtcgatctcatgggctcacaagacagcattctattaaaaatgggtcaggcgtgaagcatcacattgccagtgacatagcttcagacaggaaaagaagcccatctgtgtccagagatcagaatagaagatacgaccaaagggaagaaagagaggaatattcacagtatgctacttcggataccgcaatgcctagatctccatcagattatgctgataggcgatctcaacatgaacctcagttttatgaagactctgatcatttaagttatagggactccaacaggagaagtcataggcattccaaagaatatattgtagatgatgaggatgtggaaagcagagatgaatacgaaaggcaaaggagagaggaagagtaccagtcacgctaccgaagtgatccgaatttggcccgttatccagtaaagccacaaccctatgaagaacaaatgcggatccatgctgaagtgtcccgagcacggcatgagagaaggcatagtgatgtttctttggcaaatgctgatctggaagattccaggatttctatgctaaggatggatcgaccatcaaggcaaagatctatatcagaacgtagagctgccatggaaaatcagcgatcttattcaatggaaagaactcgagaggctcagggaccaagttcttatgcacaaaggaccacaaaccatagtcctcctacccccaggaggagtccactacccatagatagaccagacttgaggcgtactgactcactacggaaacagcaccacttagatcctagctctgctgtaagaaaaacaaaacgggaaaaaatggaaacaatgttaaggaatgattctctcagttcagaccagtcagagtcagtgagacctccaccaccaaagcctcataaatcaaagaaaggcggtaaaatgcgccagatttcgttgagcagttcagaggaggaattggcttccacgcctgaatatacaagttgtgatgatgttgagattgaaagtgagagtgtaagtgaaaaaggagacatggattacaactggttggatcatacgtcttggcatagcagtgaggcatccccaatgtctttgcaccctgtaacctggcaaccatctaaagatggagatcgtttaattggtcgcattttattaaataagcgtctaaaagatggaagtgtacctcgagattcaggagcaatgcttggcttgaaggttgtaggaggaaagatgactgaatcaggtcggctttgtgcatttattactaaagtaaaaaaaggaagtttagctgatactgtaggacatcttagaccaggtgatgaagtattagaatggaatggaagactactgcaaggagccacatttgaggaagtgtacaacatcattctagaatccaaacctgaaccacaagtagaacttgtagtttcaaggcctattggagatataccgcgaatacctgatagcacacatgcacaactggagtccagttctagctcctttgaatctcaaaaaatggatcgtccttctatttctgttacctctcccatgagtcctggaatgttgagggatgtcccacagttcttatcaggacaactttcaagccaaagccttagtagaagaacaacgccttttgttcctagggttcagataaaactatggtttgacaaggttggtcaccaattaatagttacaattttgggagcaaaagatctcccttccagggaagatgggaggccaaggaatccttatgttaaaatttactttcttccagacagaagtgataaaaacaagagaagaactaaaacagtaaagaaaacattggaacccaaatggaaccaaacattcatttattctccagtccaccgaagagaatttcgggaacgaatgctagagattaccctttgggatcaagctcgtgttcgagaggaagaaagtgaattcttaggcgagattttaattgaattagaaacagcattattagatgatgagccacattggtacaaacttcagacgcatgatgtctcttcattgccacttccccacccttctccatatatgccacgaagacagctccatggagagagcccaacacggaggttgcaaaggtcaaagagaataagtgatagtgaagtctctgactatgactgtgatgatggaattggtgtagtatcagattatcgacatgatggtcgagatcttcaaagctcaacattatcagtgccagaacaagtaatgtcatcaaaccactgttcaccatcagggtctcctcatcgagtagatgttataggaaggactagatcatggtcacccagtgtccctcctccacaaagtcggaatgtggaacaggggcttcgagggacccgcactatgaccggacattataatacaattagccgaatggacagacatcgtgtcatggatgaccattattctccagatagagacagggattgtgaagcagcagatagacagccatatcacagatccagatcaacagaacaacggcctctccttgagcggaccaccacccgctccagatccactgaacgtcctgatacaaacctcatgaggtcgatgccttcattaatgactggaagatctgcccctccttcacctgccttatcgaggtctcatcctcgtactgggtctgtccagacaagcccatcaagtactccagtcgcaggacgaaggggccgacagcttccacagcttccaccaaagggaacgttggatagaaaagcaggaggtaaaaaactaaggagcactgtccaaagaagtacagaaacaggcctggccgtggaaatgaggaactggatgactcgacaggcaagccgagagtctacagatggtagcatgaacagctacagctcagaaggaaatctgattttccctggtgttcgcttggcctctgatagccagttcagtgatttcctggatggccttggccctgctcagctagtgggacgccagactctggcaacacctgcaatgggtgacattcaggtaggaatgatggacaaaaagggacagctggaggtagaaatcatccgggcccgtggccttgttgtaaaaccaggttccaagacactgccagcaccgtatgtaaaagtgtatctattagataacggagtctgcatagccaaaaagaaaacaaaagtggcaagaaaaacgctggaacccctttaccagcagctattatctttcgaagagagtccacaaggaaaagttttacagatcatcgtctggggagattatggccgcatggatcacaaatcttttatgggagtggcccagatacttttagatgaactagagctatccaatatggtgatcggatggttcaaacttttcccaccttcctccctagtagatccaaccttggcccctctgacaagaagagcttcccaatcatctctggaaagttcaactggaccttcttactctcgttcatag

SEQ ID NO: 25781 - DNA, 8002 bp, Homo sapiens
  source 1..8002: mol_type = unassigned DNA
acagtcaggagaaagccgaaagctgcacgggtactgaatcttctacgactgaattagaagaataatgactgtacaattaactatcaacctctgttcatttaagcacagtttttacagagctcaggagaaatatggaacttgattggcgtgtttttatttgatggtgtcagcaaatagatgattttaaagacaggtggtagggaaaaataagagaaggggaaaaaaaaagaaagaaaatgcaatttgagacattgcgccaggtctgcaattctgttttatctcattttcatggggttttttcatccccaccaaatatcttacaaaatgagctttttggacaaacactgaacaatgcaaggaaaagaagcccatctgtgtccagagatcagaatagaagatacgaccaaagggaagaaagagaggaatattcacagtatgctacttcggataccgcaatgcctagatctccatcagattatgctgataggcgatctcaacatgaacctcagttttatgaagactctgatcatttaagttatagggactccaacaggagaagtcataggcattccaaagaatatattgtagatgatgaggatgtggaaagcagagatgaatacgaaaggcaaaggagagaggaagagtaccagtcacgctaccgaagtgatccgaatttggcccgttatccagtaaagccacaaccctatgaagaacaaatgcggatccatgctgaagtgtcccgagcacggcatgagagaaggcatagtgatgtttctttggcaaatgctgatctggaagattccaggatttctatgctaaggatggatcgaccatcaaggcaaagatctatatcagaacgtagagctgccatggaaaatcagcgatcttattcaatggaaagaactcgagaggctcagggaccaagttcttatgcacaaaggaccacaaaccatagtcctcctacccccaggaggagtccactacccatagatagaccagacttgaggcgtactgactcactacggaaacagcaccacttagatcctagctctgctgtaagaaaaacaaaacgggaaaaaatggaaacaatgttaaggaatgattctctcagttcagaccagtcagagtcagtgagacctccaccaccaaagcctcataaatcaaagaaaggcggtaaaatgcgccagatttcgttgagcagttcagaggaggaattggcttccacgcctgaatatacaagttgtgatgatgttgagattgaaagtgagagtgtaagtgaaaaaggagacatggattacaactggttggatcatacgtcttggcatagcagtgaggcatccccaatgtctttgcaccctgtaacctggcaaccatctaaagatggagatcgtttaattggtcgcattttattaaataagcgtctaaaagatggaagtgtacctcgagattcaggagcaatgcttggcttgaaggttgtaggaggaaagatgactgaatcaggtcggctttgtgcatttattactaaagtaaaaaaaggaagtttagctgatactgtaggacatcttagaccaggtgatgaagtattagaatggaatggaagactactgcaaggagccacatttgaggaagtgtacaacatcattctagaatccaaacctgaaccacaagtagaacttgtagtttcaaggcctattggagatataccgcgaatacctgatagcacacatgcacaactggagtccagttctagctcctttgaatctcaaaaaatggatcgtccttctatttctgttacctctcccatgagtcctggaatgttgagggatgtcccacagttcttatcaggacaactttcaataaaactatggtttgacaaggttggtcaccaattaatagttacaattttgggagcaaaagatctcccttccagggaagatgggaggccaaggaatccttatgttaaaatttactttcttccagacagaagtgataaaaacaagagaagaactaaaacagtaaagaaaacattggaacccaaatggaaccaaacattcatttattctccagtccaccgaagagaatttcgggaacgaatgctagagattaccctttgggatcaagctcgtgttcgagaggaagaaagtgaattcttaggcgagattttaattgaattagaaacagcattattagatgatgagccacattggtacaaacttcagacgcatgatgtctcttcattgccacttccccacccttctccatatatgccacgaagacagctccatggagagagcccaacacggaggttgcaaaggtcaaagagaataagtgatagtgaagtctctgactatgactgtgatgatggaattggtgtagtatcagattatcgacatgatggtcgagatcttcaaagctcaacattatcagtgccagaacaagtaatgtcatcaaaccactgttcaccatcagggtctcctcatcgagtagatgttataggaaggactagatcatggtcacccagtgtccctcctccacaaagtcggaatgtggaacaggggcttcgagggacccgcactatgaccggacattataatacaattagccgaatggacagacatcgtgtcatggatgaccattattctccagatagagacagtcattttcttactctacctcgctccagatacagtcagaccattgaccatcatcacagggatggcagggattgtgaagcagcagatagacagccatatcacagatccagatcaacagaacaacggcctctccttgagcggaccaccacccgctccagatccactgaacgtcctgatacaaacctcatgaggtcgatgccttcattaatgactggaagatctgcccctccttcacctgccttatcgaggtctcatcctcgtactgggtctgtccagacaagcccatcaagtactccagtcgcaggacgaaggggccgacagcttccacagcttccaccaaagggaacgttggatagaaaagcaggaggtaaaaaactaaggagcactgtccaaagaagtacagaaacaggcctggccgtggaaatgaggaactggatgactcgacaggcaagccgagagtctacagatggtagcatgaacagctacagctcagaaggaaatctgattttccctggtgttcgcttggcctctgatagccagttcagtgatttcctggatggccttggccctgctcagctagtgggacgccagactctggcaacacctgcaatgggtgacattcaggtaggaatgatggacaaaaagggacagctggaggtagaaatcatccgggcccgtggccttgttgtaaaaccaggttccaagacactgccagcaccgtatgtaaaagtgtatctattagataacggagtctgcatagccaaaaagaaaacaaaagtggcaagaaaaacgctggaacccctttaccagcagctattatctttcgaagagagtccacaaggaaaagttttacagatcatcgtctggggagattatggccgcatggatcacaaatcttttatgggagtggcccagatacttttagatgaactagagctatccaatatggtgatcggatggttcaaacttttcccaccttcctccctagtagatccaaccttggcccctctgacaagaagagcttcccaatcatctctggaaagttcaactggaccttcttactctcgttcatagcagctgtaaaaaaattgttgtcacagcaaccagcgttacaaaaaaaaaaaaaaaaatcacaggttgcaaaccctggtaacactgcatgcttaatgttgtgtcttctgagcctgtttctagggatacaaagcaatcctgtgttctcagaggaagttgcacacattgtgccctaaagaaggccctcaggtgaaagagcagagctgtgaagaactatcagatttggaattcaatgacactcgagttctggtccaatctgaagccatggattaatctcaaagaatcagtcagtttcatgcaacagaagcccttttcaatggcacctttatatttttatcattcctttttcttcatttatctaaccccaaagccctgatatgccacagaaatggagctatacagccatgaagcggtgttacaggtgaggagtgtaatcctaggaagcatcaggtgaaaagcaggagaccaaagaagtggtcaggaacaatcatcagccctcctctgggcgggaatcagagcagtcagtccagcaggaagagtggcagactttgtagctccatgggcacgtcaattactaatgctaagatgtgttggactctgaaaaacaaaattctgtggctacactgtactgaatgaaattaaagaaactttttttgcatggacacagattagctgaatacttaaattattttcttggggctgcaacttgcaaaaaaaaaaaaaagaataaaaatcagccattttcaacaatttatattatttttaaaaataaatttcactagtgcatggttttaaaaaggagagagaatgcaacagggtgatacaaagatacaccatgtttattctttaatcatagtctgtgttttggcagacattacaaatggaaatactttctagaagatacttaaaattctctttatgtgacaaataagtataatatattcaatttatttccatgttaaatatacaaatcttatgaagttcaatatgtgcaaatttttcacatctttctccttctctcactttacctcttctccctcttttaaacttttctttctccctgccagagtgaaccttatactaaaaaattacaagttttgatctgatcctctctcataccccatgtttgattcagagctgtagatgcctctgaatttgcgaatttctcaagggaaaattaactttaagagctttctttatttcaagcatgttgaaaaggattttgcaacatgacttgggagtacattaaagtaagtcagcatgtatttgacgaagaagatatttgaacttttgcagtttattgtacagtgcatggtaattttttcacctttaaaattcagtttacaggaaaattctaaaatcatgttgccattgtgatgtccaataaatttgtttttagcaccagcattattcatacaggggttaaagtattatttgtagaaggtcttaggttttgtttgttttttaatcatttaaagcaatttctttagccagtttccatttactatgtgaatagaagcactgctaaaaattgggaaccctgaaacacagggctgtttattaattcatttttctgtagtaaaattcaatttttcacaaattatatttctaaagaaatatagtaaacataaatttgcaacaattttaaagctccagtttttaggtgactcaaagaaagtcattatgcctattaatagttatttgatgccatcaccaaaagtctatgtgaaaatctcctaaagtcaaaacccctgcctttggttttacagacggttattaccattgggtggagctgcaaggtcaaatttctcctaagttcccctatttagaggaaaagtcactggttattgtaataaaccacccatggttctttatgtacattttgataacacattattatagcttgattttaattttttgcattaatttttgaaatccacatacatctcatttgtttaaattaaggccatgcacaaatattttttttagttcagtgctgaccattaaaaactatcatgcttgatacggtgcaaaagttaaaatgagtatcactaaaaatgccttctttttatgtggtgcaatatgaaatacaccaagactgtgtcttgacattctgatggacccaggtaaagttgttaaaagaacgaataaaactttattaaaataatttagacacctgtgtaccagcaacaattgatttaatagacctatagtgtctatactatcccttagaataaaggtttatgattttcctgatactaagatgcagtcacataatcttttgtgcatattcctatacaaattatttctaattttaataagaaggacgtgactacggaatatttgtacatacttgtcattatgcagtatttatttaaaagttggtgtttttttttaattttcacatctgcacctcgacttgtggtttagtcatgtaactagcactatgccagtgaccgttgttgccctgtacatagtatgtttgaaaagtaaagggaattccagttgggaaaaaagggcagattagtcctgtaatgaacaccaactaatgtaaatcaaattcattctggtgatggtatttaacactttaaataaaacattttctttacaggcgtctgcagtgctttctctgacttttctccccacacagccctgagcctgctgcagctcattccctgaactcatgtgtcatttaaagaatgaaatcaccgtctcctacttctcgataacataagtggactgctggtcttagcagcggccctcagtagagcatttctttaaaacgccaaaggatttctgctcacactatgaaaaggtgctgttttttaaaaggttgttattttggattgagtttctttctgattaaatgactcagcaactcacagattttttgagtgaaatttttaatttagtcatggccttcactgacagcatagtcacaaatactcaggcacaggctctgctagcccctgggtgaagatggcgaaggcataactggctttatgcagcatatgtgtttctgctaaagtgtcagttttgctttgtggggagtggagggtgtgttttcgggatggggagacgtggtaacctgacatgtaacaacctgtccggagactagcttctacgtgtggatatgaatgggtgagaggatttctccatatccttctggggcgattcctcaactgggagaaggaaaccctgcagagttctcatgggagtctgcttcaggtttgaaatttaagagctagtttggattcatgtttagtaatcgaactgaaatctaagtctagctgtctctctattcttggaaacaaccatttcctccatttccaaagactcaactcgagtccaattccccctatctgtcccatatatttttcctttatcccatatataccccctactctagtgaattgtttctttgttgttcattcctgttctttgttgttcatatacattcctgtatatgaacaacattttcctttatcccatatataccccctactctagtgaattgtttctttgttgttcattcctgtttctttgttgttcatatacattcctgttataaaaattcccttccctttcttatgtgccctctcctgaaaagcccttctacttttctcaataatgatccatgcgagtcccttcttgcaactcccagctcacgaatgagctctttcggcaactcctgactaaaccctaacaacatggctgccattgatgccaacaccttcactttcccagggaccccagatgccaaggctccataggcaacaataaaggatatgatggtcctgtagtgggtatgatagaattaggcaagagatcaccaaagctgtctgcctactactgatgtaaaccttgacattctgtgcacgtaaaaatcatgtgctcaatgtgtttgtctcaactccctcagctcgtgatgccctcagggttctgtgggcatttatgcactgaagaaacaggagttcacacatccacctctggactgtgaaatgtgtattgagaaatactttgcaagagagaatttttttaagtgaacaaacaacaagtctgtgccacacacatcttccatatgccctgactcaggtcacttaatctccaggatttcatttcctcacctggaaaatatggagtttgaggtagattctcatctatcattaaatcaacactttaactaaaacgtaagctccttcagggcagagaccgtatcttcagtatcaaaaacaatgtttgacacatagctgctcaataaacatctgtccaatgaa

SEQ ID NO: 25782 - DNA, 1408 bp, Homo sapiens
  source 1..1408: mol_type = unassigned DNA
gcctcggcctgtggaggccccctccctgtctggaccccggccccacctccggaagtcaattgaagccttgtgcaaatgccctaggggtgtgctgttgggaggcagccccctgtgatgcggaacaccaggctcagattcatcagttcgagctgcctgaggccctgccaccccggggaccatgtttaacggggagccaggtcctgcctcatctggggcctccaggaatgtggtgcggagctccagcattagcggtgaaatctgcggatcccagcaagccgggggcggggctgggaccaccaccgccaagaagcggcggagcagcctgggtgccaagatggtggccatcgtgggcctgactcagtggagcaagagcacactccagcttccgcagcctgaaggggccaccaagaagctgcgcagcaacatccgccggagcacggagacaggcatcgcggtggagatgcggagccgggtcacacgccagggcagccgggagtccaccgatgggagcaccaacagcaacagctccgacggcacgttcatcttccccactacccggctaggggctgaaagccagttcagcgatttcctggatgggctgggaccagctcagattgtggggcgacagacactggcaacaccacccatgggagatgtgcacattgccatcatggaccggagtggccagctggaggtggaagtgattgaagctcggggcctgacccccaaaccaggctccaaatccctcccagccacctatatcaaggtttacctgctggagaatggggcctgcttggccaagaagaagacaaagatgaccaagaagacctgtgatcccctgtaccagcaggctctgctctttgacgagggaccccagggcaaggtgctgcaggtgatcgtctggggagactatggccgcatggaccacaagtgcttcatgggcatggcccagatcatgctggacgagctggacctcagcgccgcggtcaccggctggtacaaactcttccccacctcctcagtggcagactccacactcggatccctcaccaggcgcctgtcccagtcttccctggagagtgccaccagcccctcatgctcttaaggatgtcaggaagaggccaggatggtggtgtggggaggggtgcctgctggccccatgtcctcccctgtacatagtcttcgtgtctttctggaccccttgtcctgctgcatgcctgttggctactgggctcatcccagctggcagtggagactgtagtgtgtgcgtgtgtgcgtgcgtgtgtgtgtgtgtgtacgtgaccacgttctatctgttcatttgtctgggtatagtcactcctggtgatgatatgggctgaaatgtctccacgtctctttgtgtcttgttgaaaagaaacccaaagga

SEQ ID NO: 25783 - DNA, 7235 bp, Homo sapiens
  source 1..7235: mol_type = unassigned DNA
acggtggctgctgcggagccggcagcgcaggcgggcggagcggagctgcccccgtggtggcgggcgatgcccccgtgagcctccctcgccgcccctccccgccccgcgtgcctatccactcggagtccgcgccagcctggggccgggccgcgcctactgccgggttcgcggggcggggtcccggggcagcacctgccccgccttgcggagccgcctcggcctgtggaggccccctccctgtctggaccccggccccacctccggacccttttatcacatcgcctcctctgggagcctgccctgattgccttcacctcatttcttgaaaattggtgttttggcagaagtcaattgaagccttgtgcaaatgccctaggggtgtgctgttgggaggcagccccctgtgatgcggaacaccaggctcagattcatcagttcgagctgcctgaggccctgccaccccggggaccatgtttaacggggagccaggtcctgcctcatctggggcctccaggaatgtggtgcggagctccagcattagcggtgaaatctgcggatcccagcaagccgggggcggggctgggaccaccaccgccaagaagcggcggagcagcctgggtgccaagatggtggccatcgtgggcctgactcagtggagcaagagcacactccagcttccgcagcctgaaggggccaccaagaagctgcgcagcaacatccgccggagcacggagacaggcatcgcggtggagatgcggagccgggtcacacgccagggcagccgggagtccaccgatgggagcaccaacagcaacagctccgacggcacgttcatcttccccactacccggctaggggctgaaagccagttcagcgatttcctggatgggctgggaccagctcagattgtggggcgacagacactggcaacaccacccatgggagatgtgcacattgccatcatggaccggagtggccagctggaggtggaagtgattgaagctcggggcctgacccccaaaccaggctccaaatccctcccagccacctatatcaaggtttacctgctggagaatggggcctgcttggccaagaagaagacaaagatgaccaagaagacctgtgatcccctgtaccagcaggctctgctctttgacgagggaccccagggcaaggtgctgcaggtgatcgtctggggagactatggccgcatggaccacaagtgcttcatgggcatggcccagatcatgctggacgagctggacctcagcgccgcggtcaccggctggtacaaactcttccccacctcctcagtggcagactccacactcggatccctcaccaggcgcctgtcccagtcttccctggagagtgccaccagcccctcatgctcttaaggatgtcaggaagaggccaggatggtggtgtggggaggggtgcctgctggccccatgtcctcccctgtacatagtcttcgtgtctttctggaccccttgtcctgctgcatgcctgttggctactgggctcatcccagctggcagtggagactgtagtgtgtgcgtgtgtgcgtgcgtgtgtgtgtgtgtgtacgtgaccacgttctatctgttcatttgtctgggtatagtcactcctggtgatgatatgggctgaaatgtctccacgtctctttgtgtcttgttgaaaagaaacccaaaggagtgttgtgtggacatgactcaccctgaggagtctccagggatggaggtggggcatgcggccactggtcggtgctgcctggtcctggcctggggcagagcctgtgtgttcttcacctgtgcctgctcctggtggtctctgctttgttttctgtcttgtcttttgttccactcttgactctcccggctctgccactgttttctgagaaatgtagcatccgctgcagctggccacactgagggccctctgggaaccccaccccactggagccgctccggcagctcttcctgccactgaatgcgttctgcagcatgtagcatgcccacctagctccctggccagggccctggggaggcagagggtacccaggggactgagggcttagaaatgactttctctatgaggctggaacctcctccttcttccagtgaagcacgaggtcttggttccagggttcctggccaggtgcccccttagcatttgttcttcatctcctgtctcttcaagcctccccactccaccgtgccgaaggagctctgccagtgggcctgggcaggcagccacagagggcatgttatctgctaaagcaaacagtcctcctgaggccctgagggtggccctgaccccctcagggctcattcctggtgggcatgactcggtaaggaggttctgtgggtagggctgtttgctggaataaggagggctgaggctgagttgttccccgccactgttgaggatcccatctgacatttggggattcactgcatgaagttgttcatttggggctccagtttttgtgcatttccagaccagggtccctgtctgggagctcagacttagctgggctccagcagcctggctccggactctcgtctgccaccatcaccagctctgtctaagcaatacttacccctccgggcttccctgctttcctgtgccccactgctgccctctgcagagccatctgctccaggcacccacctgcctctgcttgctttctcacccatgtctggttggagcttctcacagccactcaaaccctgacttgatttgacaactgggccctgttggtggagaccagtgcctgaactggaccctgtgaaatctgtcccgtgggaatcctgaagtctgactcaggaatgcccagacctgtccctgtccctcctcagctctagggtgaaaggcgagaggttgcacaggacatggacagagcagcccttgggtttgtatctggtaggggagaaagcagcaggacagtggaggtgtgtggaaggcactctttccacctctctccaggcattatccccaggtgctgaaatggctgtggccccagcacctgaggcaggggtacgctacctggggtagcagtagaaaggtcttggggtctgaatgacttggggcctccattcataaccaaagttgtaggggcatggaggcagtggcgccttatggataggtcatctcagcccaaagggcctccttggctggcatggttctgtgttacgttgaagccagagtcttataacacctcccaagaaagataggggaagaagccagaaccccacctggcctgcccacaggacaagaagtgggtaagggcaggaaggaaatgaacggagttagctcccaggctcctatctctgcctgagcctctattcttatattatcagagaaagggaccattgggtgcatagagatggggaggaggccactgggctgaattttctctttaggcggaaatgctctccccaggcccattgcgttcgtcaagttcttggaaatggacaaagggctctgtcctcctcgaccctagtgggggatcaagaaggaaactccgttgcaaaagggtattttaatctcctgtttatgatatattcacctctagagcagtcactgtcagggtgttgcgaaaatactctacacctttgggatgatagggttgttagtgacccacaggacagtatagatgtttgtggatgtagcactgagtggtgatacccagaccagcagtcaccccaggaagtgggggctacccataccctcattcctctggtggggagctgcctgcagagaggcctgccactgggggttccaggccgtggtgacccttgcctctggggaagggttagcacaggggaggttctagctggaggaggggtctgatgtgctggtaacttgggctgacctacctacagtccctggctgccaaaactgctcagcagttgggccactccactattccacctctctaaaagaaggtaatttcctccccaaattgaccttggggaattattcttttaaccctttgcaccaaataagttactcatccccacctggattttaccccatgagggtaaagttgtgtgaggctgacacgtctgtgtgatgcagtgtggctgcacttaagggtctgtttctcagcatcatggatgcaggggcttgtctgaaaagccactctggacctagcctgtcccagaagaggagaatgcacaagtgtaactcctggttgtttgctggggtgggggagcatctgctgtttgaggacggggggtggggaaggaaggaacatgatccctccagaagtctcccaccctggggccaactcactgccatgttcagtgtcccggctccaaatgcccccttgcccagatgaaaccctgcagtggttacaggaatggagctctttgtcattccacctcctctggtcaggcgaggttcactgtgcatatggcagagacaggagtggccctgcagtgatgttgggttgtgggcagggacagtgatggatgactcagagcgtctgtctttgtatttctgctctgttcattctgtcccactttcttcatagactccttttccctgcaatgggtttttggtatgaaaaaggctccagtaaatggagccaagtcttggtttgacaaggggaacttgatccttcagggaagaatcatctccaaaatgactccccatctggtttcttctaccacccaattctactaggaaaggagcacttaggaggctcttgggatgcagcaagtcccaggcaatgccagcatttcatgggggctgaggcagaacccaggagctccaagaaaggccacccatagagctcatcctctgtggaatcactgccggttagaacactgaggtcaagccagtcctcccatggtcatgccacccaccagggaagcatgcctgatctcttctttactgccagccttgaggagagcagaagcctccatttttaaagacaataaagacctccaagggtacttctttggaaatgaaatgtagcacaatcttagcctacgttaccaggagccctgacatgcaaccagggtccctcttccatgccctgctgcccaggagttgctgagctcctcttcccctggggttccagccctcctaatacctcatattccccatcttcctcagcccagaaagcaatggggctttagtgatgctcctcttttgtgtctctctggttgcctctagcactgtgcaaactctgcaagaaattgctgcctttgcttgatgttgtagatgagttgccctccacctggctggagagatggcacatcattcagggccagaaggttgtccagcagtgtttctgcagtggctgcagggagatggaaaagaagagccctgcttccctgcctcctcctacctttctcttccactcctcagagttttcttctccagtatcctgacatgtaaagagattctttaaaatgctgcttcttctactggactgtctttcactgagtagtcagggaggagatgaaaatgtggacacatccccccgccttctccctcaaccttttcactcacgtcagaagaggttggggcaaaacaaaacaagcatgattgaagagcaggggaagcccacacaatcaggtgagccctgatgggggctggactggcctggtctggctgggaaaggattcttttaaaagcgtgcctgagcatctcagagcaatgtcagtgatgccaaagagagcaacttggcctccttgggcaccaactctgatggctgagttgcacaaacgtggctcagatgttggcatgcccgatggtgggaccttgttctctgataaagggcttaatctttccatgtagcaaagcaactttccctccctcccctccccccgaaccctgagcttgggcttgtgtgggcccagcatggctgtgcctgtgagggaagccacatcagtgagagaaagttgcattctctcaggggcctagattggcttggggcaggtgcttgttgaaaagcatgagtgtttctgctttgggaaacccttccagggctctggttggaaacttggccagtaaggacagggccttgggcctcccaaggagttcacaatgatgccaggaagggtccctgagcctgggttccagtcagcttggctaacagaatggggcttgggaattccaggggcaactgagcatccaccccattagccagtgatctggacagggacagctggctacagggaatcaaaggctgttctgtacagttttaccagaaactgtgaccttgggtaaggctcctcacttttctgggcctcaacttcctcatctgcaaaatcagagcattagctgctctccccatgattccctcccagttttaattaaaagtctctgatctggagcacatgagggttgcgagcctggtgcacctggttcctgtctccgtgggctggtttccttcagcccctgatgcccaggctgggtgcaggctctcatctggtccatgcccagatgctgcctcagacaagaactctgggaatcctaacagactctgctttcctctcttcgtggtttgtcctccctcttttattcttgtgtaatgatgagacataattaagggtcatctacaatggacaattttcaaggtgctgatgtgatgtcacaacctccgctacatcctgagtaagtcagtgtccccaacagcagatgaggctgggtctttcctcatttctgcttctgggatgacatcagtgggagagttgaagatctgagaattctaaaggaaatgttctctgatgggaggagagagggaacttatttcccttcaaagtagtttgcttcttaagaccactcctccctccagaatgtctttaaccagacatcatttcagaaggtggggcagctgcttccttaggaagagtgggcctgatagctcaaccaactcctttagcatgtaaactcacagaaggcaagaacccctttttttagactttccaaatgcatcctgcaaagagagagatagctgatagggactgacaagcacactgtttagataagaagcaattagccttttatatctgtgctctatacattttctatgtgcagcatctttcctaacttgttgtggttcccgggtggcaggtgcacagctgggagggactgccggctgtttcgtacaacattcttgccaattcccttgaggagaaaattcttcacatggcttctgcatgtacagtatttgggcagcaaaacatgattaaagtcagtttgaaaatggt

SEQ ID NO: 25784 - DNA, 5203 bp, Homo sapiens
  source 1..5203: mol_type = unassigned DNA
caagctgcccaagccgcccgccgccgccgccgccgccgcggccgaggcgcccggcgccggcgcgggcatggagcgctcgcagagccgcctcagtctgtccgcctccttcgaggcgctcgccatctacttcccgtgcatgaactccttcgacgacgaggacgcaggggacagccggaggctgaagggggccatccagaggagcacggagacgggcctggcagtggagatgcccagccggacactgcgccaggccagccacgagtccattgaggacagcatgaacagctatggctcagagggcaaccttaactatggaggagtttgcctggcgtcggacgcccagttcagtgacttcctgggaagcatggggccggcacagtttgtgggccgccagaccctggccaccacacccatgggggatgtggagatcggtctgcaggagcggaacggtcagttggaggtggacattatccaggctcggggactgacagccaagccaggctccaagacactgccagcggcctacatcaaggcctacctgctagagaatggcatctgcattgccaagaagaagaccaaagtcgctcgcaagtcgctggacccactgtataaccaggtgctgctgtttcctgagagtccccagggcaaagtcctccaggtgatcgtgtgggggaactacgggcggatggagcggaagcagttcatgggtgtggctcgcgtgctgctggaggagctggacttgaccaccctggccgtgggctggtacaagctcttccccacctcctccatggtggacccagccacaggccccctgctccggcaggcatcccagttgtccctcgagagcaccgtggggccctgcggagaacgatcttagtgctggaatggggaggggctccccaagatggcctggagaccacccagccctgacctgggaccccaggcccaggggcacattgaacaggaggacggggctctcccccacagtggggaagcagaacggggagacctgcccccccttgggcccctcctcaccccttctttgcctcctacccccgagacctcccctctcccaacgggattggctacacttttgacttggccggttcttgacctggtggatgtggctgcagtccagagaaaggaaagattgaggtggcagagcagaccactctcccttcccaaactgtccaacttctccccctttttgcctcctcggaagctcgctgcccagagccatgtccagaacccagccggccatctccatggtgccaattaccagcaagtgtctttcctgcggcaccgggttcaggcagctactcctgccccagagatgaaggggcagctttgcaaggatccggagccagctcccaggggcccagagccccccacttgaagaggagcttgagcttccctctgcctgcccgtggaaggagctttgccgcagcctgtccgagtccatccgtccgtcccctcctgcctgcccctcttctggtggctctaggaattggggttcagcagggaccaaaggaaaggaggaggtgccgggggcctggcacagacccctaggtgcctcgctccatgggattgcaacaagctagtttaggaaccgctggcggactagaaagaatgttgtcgtctgtgttccggtggaggagctgtggaacctgagtttccagaaccccaaccctagagagcatttgggggtgctgtattggagggggaggctaaggaaagttgggattgggactggtggtgccaagataagggtttctcaaattggagaacccctccttgttgcatgaggtcaatggtcatcctgtctacccaccctgcctccaggccagggggctggggaggcaaatagagcccccctattttagtctttttaaaaaaaacatcctatactaagggcagaacccactgccccggcctcaattaccttggctgaaggaaagatggcggtaggagagaaaagtgaagaggcgtgagtgtaagaactgggagattccttttccagcaggcctgggtagctgccttcccagcccagccctccctggggcctgcgggagcccttttgcatgcaagggaggatggaggctggcccctctttatagaagcacatttctgccacctcccctgggaggcacccagaagcctgccactctttacctagtccctgctgtgtagggcgtagtccaggttagctaggtagagttagtgctccaagccctggggcctgttcttagctcatgcatagtccttacagagtcccaggaccgggggtggagaggagcctcaagtacattccaggagaccactgtctcctcgctggcctgggcctagatggggcagcctggctcacaggaggccagcccctcctcctccgcccccttccttcccttgtccccgtagggttatagctggagctgcctgttatactcggctgttctgatttattattcttggtactgactttctttatgagggactcctaagggttgtaggaccttggcagagggggcctggtctccattagagggtgttgttttctcctgaggacacccaggctgcctttggtcccaccctgttcctggtcccggtcccggtcccagtcccaccaggcaactccttccacccggaaattcttcccttcccttagcctgtggaaaccctgggtattctttaaagttctggtcaatgtatatcacctccacagagctgcttaccctgcactgggaaggggagatggagacgccccctttacccaggaggtcttcagagtttcctgggaccgcggtgggtggaatcccaaggctgggggtggaaggagcagggctctggagggattcgcattcaaggcacagaattggccccttgcctgtttgtttttctaaccagtgtgatttctctgctgttcgtttattacttaccattggaatattttgagccaggagagcgccttctctctccagccatcaccgctgtggttgttcaggggtagcttttcaaaaacagggcagagcctggctgtcccaaccagggggagcaggggcttggccctgacagcctgagcccttcccctggtgtctgcacagcctttataaagagagagagagctccgaagcaataacaacacctgggggtggtcagtgagggccccctcaatgattttcttgtttgttctgtgaaatcccgctcacctcctggaggggtggagcagctgggggctggagccctgtttctttgtgtcatcgtgagcatgtgccccttcccaggggctgtgaccattgggtgtgggaactacggtctgtcctcaccaagggatgggggtttggggaggagagtgacattttcatcattagcttcggagaagcttcaagcccatcctgtccccgctactgcctggccccttgctgactcaggctgcactgtttgaagaggagcagagaggctggcactaggggccactggggggctggggtctccaggggatgactgttttcaatctctgggccaagatcacatgcaggataccatgggaaggagccatctccactctccttctccagaacccccttgaagggcctttgggaccattagtccatttccattttacagacaaggaaatcaagacccagcttgggggaaaagccacccctggagtcacctgtgtgttcagtggcacccccagcctgggtcccctcctcccaatagaggctgagccggagccagggcagtatgaggtggggctgccactgcccatacctcctcctcccttctttctttgaagcctaatggccccccaaaagatgggcaggacaagctgtagcccatctgagaggttgggaaactgaggcccagaaacaggaagtgactcacacaagacccctcagcaagggtgcaaagggggaagaactaggggctccattgttcttcaggcgacaggagaccgttgctccagtgcatgtctgctgggacaaggattcctggcctcgaagccctgggctgcacagccctactgggctccacctctataaaccagtgacttctctgggcctgggtctgggggagagggttgccagggagactcagctctccttgggggctggcccagctgactgagggtacacaggattgggtctagaccttgatgcctgggtggagggcccttgtaaggggccatagcctcttcaggaccaactggagggagagttaggaaacaccagctcctgcctggggcagtgagggaatgggagcagctgtgggcgcctcatttcaggcaagtcctccccaaaccttcagatgcagtgagacctggccttcctgttgtgcttttcagactttgttttcagaatgcttttatctcgagtgtgcccttcggccctcacaagagcccctggggagtaggtggtggcctgtgccgtcatccccatttcaaagcagggagctgaggtcctgggaggggaaagtgcttgcctgaggtcccactgtgttagtgggtgggcaggactggaactcggttctccaacagcccagagctcactcttttacacccagaggtggagcaggtggcttagggggtggttatgtacttcacaagccaattcccttcagccaggagctcctgggtgcatttccgtgtcagaaacagtaccgagtcccaccccctctggaggcacagctgttgcgtcaggcaaggtcacctgcatttatttattgagcagcagtgctgtgtcaggcccagggaccgagcccctctccctgttcccctatggtgtctccgaggccctctgggagggccccacatctggagcagcacctcagagtggacagaaagcattagcgtccacgagctcacccgacgccgagcctgtgaggtgggctgatggtgcccgtctaacccagcgcttcagggaggtcagaatggagccgaacccagggctgtgagcatcacctctggagccctttcactttatgactgcttcctggacgggtggtgggaaggcaggagcctgggtccttaggctgggggcctctctccatccacccacctttccctcattccctctcttggagcagcagccgcccaggcctttagggagggagggtttctggggcccttgggttggagtggggtcgcgttgcattgtgttcatgaccatgtagctcatgttgaaattaaagtttttggcttttctaa

SEQ ID NO: 25785 - DNA, 5137 bp, Homo sapiens
  source 1..5137: mol_type = unassigned DNA
atggagcgctcgcagagccgcctcagtctgtccgcctccttcgaggcgctcgccatctacttcccgtgcatgaactccttcgacgacgaggacgcagaaggggacagccggaggctgaagggggccatccagaggagcacggagacgggcctggcagtggagatgcccagccggacactgcgccaggccagccacgagtccattgaggacagcatgaacagctatggctcagagggcaaccttaactatggaggagtttgcctggcgtcggacgcccagttcagtgacttcctgggaagcatggggccggcacagtttgtgggccgccagaccctggccaccacacccatgggggatgtggagatcggtctgcaggagcggaacggtcagttggaggtggacattatccaggctcggggactgacagccaagccaggctccaagacactgccagcggcctacatcaaggcctacctgctagagaatggcatctgcattgccaagaagaagaccaaagtcgctcgcaagtcgctggacccactgtataaccaggtgctgctgtttcctgagagtccccagggcaaagtcctccaggtgatcgtgtgggggaactacgggcggatggagcggaagcagttcatgggtgtggctcgcgtgctgctggaggagctggacttgaccaccctggccgtgggctggtacaagctcttccccacctcctccatggtggacccagccacaggccccctgctccggcaggcatcccagttgtccctcgagagcaccgtggggccctgcggagaacgatcttagtgctggaatggggaggggctccccaagatggcctggagaccacccagccctgacctgggaccccaggcccaggggcacattgaacaggaggacggggctctcccccacagtggggaagcagaacggggagacctgcccccccttgggcccctcctcaccccttctttgcctcctacccccgagacctcccctctcccaacgggattggctacacttttgacttggccggttcttgacctggtggatgtggctgcagtccagagaaaggaaagattgaggtggcagagcagaccactctcccttcccaaactgtccaacttctccccctttttgcctcctcggaagctcgctgcccagagccatgtccagaacccagccggccatctccatggtgccaattaccagcaagtgtctttcctgcggcaccgggttcaggcagctactcctgccccagagatgaaggggcagctttgcaaggatccggagccagctcccaggggcccagagccccccacttgaagaggagcttgagcttccctctgcctgcccgtggaaggagctttgccgcagcctgtccgagtccatccgtccgtcccctcctgcctgcccctcttctggtggctctaggaattggggttcagcagggaccaaaggaaaggaggaggtgccgggggcctggcacagacccctaggtgcctcgctccatgggattgcaacaagctagtttaggaaccgctggcggactagaaagaatgttgtcgtctgtgttccggtggaggagctgtggaacctgagtttccagaaccccaaccctagagagcatttgggggtgctgtattggagggggaggctaaggaaagttgggattgggactggtggtgccaagataagggtttctcaaattggagaacccctccttgttgcatgaggtcaatggtcatcctgtctacccaccctgcctccaggccagggggctggggaggcaaatagagcccccctattttagtctttttaaaaaaaacatcctatactaagggcagaacccactgccccggcctcaattaccttggctgaaggaaagatggcggtaggagagaaaagtgaagaggcgtgagtgtaagaactgggagattccttttccagcaggcctgggtagctgccttcccagcccagccctccctggggcctgcgggagcccttttgcatgcaagggaggatggaggctggcccctctttatagaagcacatttctgccacctcccctgggaggcacccagaagcctgccactctttacctagtccctgctgtgtagggcgtagtccaggttagctaggtagagttagtgctccaagccctggggcctgttcttagctcatgcatagtccttacagagtcccaggaccgggggtggagaggagcctcaagtacattccaggagaccactgtctcctcgctggcctgggcctagatggggcagcctggctcacaggaggccagcccctcctcctccgcccccttccttcccttgtccccgtagggttatagctggagctgcctgttatactcggctgttctgatttattattcttggtactgactttctttatgagggactcctaagggttgtaggaccttggcagagggggcctggtctccattagagggtgttgttttctcctgaggacacccaggctgcctttggtcccaccctgttcctggtcccggtcccggtcccagtcccaccaggcaactccttccacccggaaattcttcccttcccttagcctgtggaaaccctgggtattctttaaagttctggtcaatgtatatcacctccacagagctgcttaccctgcactgggaaggggagatggagacgccccctttacccaggaggtcttcagagtttcctgggaccgcggtgggtggaatcccaaggctgggggtggaaggagcagggctctggagggattcgcattcaaggcacagaattggccccttgcctgtttgtttttctaaccagtgtgatttctctgctgttcgtttattacttaccattggaatattttgagccaggagagcgccttctctctccagccatcaccgctgtggttgttcaggggtagcttttcaaaaacagggcagagcctggctgtcccaaccagggggagcaggggcttggccctgacagcctgagcccttcccctggtgtctgcacagcctttataaagagagagagagctccgaagcaataacaacacctgggggtggtcagtgagggccccctcaatgattttcttgtttgttctgtgaaatcccgctcacctcctggaggggtggagcagctgggggctggagccctgtttctttgtgtcatcgtgagcatgtgccccttcccaggggctgtgaccattgggtgtgggaactacggtctgtcctcaccaagggatgggggtttggggaggagagtgacattttcatcattagcttcggagaagcttcaagcccatcctgtccccgctactgcctggccccttgctgactcaggctgcactgtttgaagaggagcagagaggctggcactaggggccactggggggctggggtctccaggggatgactgttttcaatctctgggccaagatcacatgcaggataccatgggaaggagccatctccactctccttctccagaacccccttgaagggcctttgggaccattagtccatttccattttacagacaaggaaatcaagacccagcttgggggaaaagccacccctggagtcacctgtgtgttcagtggcacccccagcctgggtcccctcctcccaatagaggctgagccggagccagggcagtatgaggtggggctgccactgcccatacctcctcctcccttctttctttgaagcctaatggccccccaaaagatgggcaggacaagctgtagcccatctgagaggttgggaaactgaggcccagaaacaggaagtgactcacacaagacccctcagcaagggtgcaaagggggaagaactaggggctccattgttcttcaggcgacaggagaccgttgctccagtgcatgtctgctgggacaaggattcctggcctcgaagccctgggctgcacagccctactgggctccacctctataaaccagtgacttctctgggcctgggtctgggggagagggttgccagggagactcagctctccttgggggctggcccagctgactgagggtacacaggattgggtctagaccttgatgcctgggtggagggcccttgtaaggggccatagcctcttcaggaccaactggagggagagttaggaaacaccagctcctgcctggggcagtgagggaatgggagcagctgtgggcgcctcatttcaggcaagtcctccccaaaccttcagatgcagtgagacctggccttcctgttgtgcttttcagactttgttttcagaatgcttttatctcgagtgtgcccttcggccctcacaagagcccctggggagtaggtggtggcctgtgccgtcatccccatttcaaagcagggagctgaggtcctgggaggggaaagtgcttgcctgaggtcccactgtgttagtgggtgggcaggactggaactcggttctccaacagcccagagctcactcttttacacccagaggtggagcaggtggcttagggggtggttatgtacttcacaagccaattcccttcagccaggagctcctgggtgcatttccgtgtcagaaacagtaccgagtcccaccccctctggaggcacagctgttgcgtcaggcaaggtcacctgcatttatttattgagcagcagtgctgtgtcaggcccagggaccgagcccctctccctgttcccctatggtgtctccgaggccctctgggagggccccacatctggagcagcacctcagagtggacagaaagcattagcgtccacgagctcacccgacgccgagcctgtgaggtgggctgatggtgcccgtctaacccagcgcttcagggaggtcagaatggagccgaacccagggctgtgagcatcacctctggagccctttcactttatgactgcttcctggacgggtggtgggaaggcaggagcctgggtccttaggctgggggcctctctccatccacccacctttccctcattccctctcttggagcagcagccgcccaggcctttagggagggagggtttctggggcccttgggttggagtggggtcgcgttgcattgtgttcatgaccatgtagctcatgttgaaattaaagtttttggcttttct

SEQ ID NO: 25786 - DNA, 2490 bp, Homo sapiens
  source 1..2490: mol_type = unassigned DNA
gcctgccgccgcgcgattccgagggggttaacggcggagccgccggccgggcgcggaccggagcgcgtgaggctccggcgcgcaagcccggagcagcccgctggggcgcacagggtcgcgcgggcgcggggatggaggacggcgtggccggtccccagctcggggccgcggcggaggcggcggaggcggccgaggcgcgagcgcggcccggggtgacgctgcggcccttcgcgcccctctcgggggcggccgaggcggacgagggcggcggcgactggagcttcattgactgcgagatggaggaggtggacctgcaggacctgcccagcgccaccatcgcctgtcacctggacccgcgcgtgttcgtggacggcctgtgccgggccaaatttgagtccctctttaggacgtatgacaaggacatcacctttcagtattttaagagcttcaaacgagtcagaataaacttcagcaaccccttctccgcagcagatgccaggctccagctgcataagactgagtttctgggaaaggaaatgaagttatattttgctcagaccttacacataggaagctcacacctggctccgccaaatccagacaagcagtttctgatctcccctcccgcctctccgccagtgggatggaaacaagtggaagatgcgaccccagtcataaactatgatctcttatatgccatctccaagctggggccaggggaaaagtatgaattgcacgcagcgactgacaccactcccagcgtggtggtccatgtatgtgagagtgatcaagagaaggaggaagaagaggaaatggaaagaatgaggagacctaagccaaaaattatccagaccaggaggccggagtacacgccgatccacctcagctgaactggcacgcgacgaggacgcattccaaatcatactcacgggaggaatcttttactgtggaggtggctggtcacgacttcttcggaggtggcagccgagatcggggtggcagaaatcccagttcatgttgctcagaagagaatcaaggccgtgtccccttgttctaatgctgcacaccagttactgttcatggcacccgggaatgacttgggccaatcactgagtttgtggtgatcgcacaaggacatttgggactgtcttgagaaaacagataatgatagtgttttgtacttgttcttttctggtaggttctgtctgtgccaagggcaggttgatcagtgagctcaggagagagcttcctgtttctaagtggcctgcaggggccactctctactggtaggaagaggtaccacaggaagccgcctagtgcagagaggttgtgaaaacagcagcaatgcaatgtggaaattgtagcgtttcctttcttccctcatgttctcatgtttgtgcatgtatattactgatttacaagactaacctttgttcgtatataaagttacaccgttgttgttttacatcttttgggaagccaggaaagcgtttggaaaacgtatcacctttcccagattctcggattctcgactctttgcaacagcacttgcttgcggaactcttcctggaatgcattcactcagcatccccaaccgtgcaacgtgtaacttgtgcttttgcaaaagaagttgatctgaaattcctctgtagaatttagcttatacaattcagagaatagcagtttcactgccaacttttagtgggtgagaaattttagtttaggtgtttgggatcggacctcagtttctgttgtttcttttatgtggtggtttctatacatgaatcatagccaaaaacttttttggaaactgttggttgagatagttggttcttttaccccacgaagacatcaagatacacttgtaaataaagctgatagcatatattcatacctgttgtacacttgggtgaaaagtatggcagtgggagactaagatgtattaacctacctgtgaatcatatgttgtaggaaaagctgttcccatgtctaacaggacttgaattcaaagcatgtcaagtggatagtagatctgtggcgatatgagagggatgcagtgcctttccccattcattcctgatggaattgttatactaggttaacatttgtaatttttttctagttgtaatgtgtatgtctggtaaataggtattatattttggccttacaataccgtaacaatgtttgtcattttgaaatacttaatgccaagtaacaatgcatgctttggaaatttggaagatggttttattctttgagaagcaaatatgtttgcattaaatgctttgattgttcatatcaagaaattgattgaacgttctcaaaccctgtttacggtacttggtaagagggagccggtttgggagagaccattgcatcgctgtccaagtgtttcttgttaagtgcttttaaactggagaggctaacctcaaaatattttttttaactgcattctataataaatgggcacagtatgctccttacagaaaa

SEQ ID NO: 25787 - DNA, 2408 bp, Homo sapiens
  source 1..2408: mol_type = unassigned DNA
tgtctgcctgcaagcatgcaggacttgactcaggaatttgctgtccaaacaggatgctgtggaagctgcactttttttttccccagggagtgggggctggcccttactgctttataagcaccagctcaagaaggaacctacagcctcttggaaaggaatctcactaggggcttgactgcgtgggtctgtagcgctttcactgtaagaaagcaagatgcattttagaaactttaactacagttttagctccctgattgcctgtgtggcaaacagtgatatcttcagcgaaagtgaaaccagggccaaatttgagtccctctttaggacgtatgacaaggacatcacctttcagtattttaagagcttcaaacgagtcagaataaacttcagcaaccccttctccgcagcagatgccaggctccagctgcataagactgagtttctgggaaaggaaatgaagttatattttgctcagaccttacacataggaagctcacacctggctccgccaaatccagacaagcagtttctgatctcccctcccgcctctccgccagtgggatggaaacaagtggaagatgcgaccccagtcataaactatgatctcttatatgccatctccaagctggggccaggggaaaagtatgaattgcacgcagcgactgacaccactcccagcgtggtggtccatgtatgtgagagtgatcaagagaaggaggaagaagaggaaatggaaagaatgaggagacctaagccaaaaattatccagaccaggaggccggagtacacgccgatccacctcagctgaactggcacgcgacgaggacgcattccaaatcatactcacgggaggaatcttttactgtggaggtggctggtcacgacttcttcggaggtggcagccgagatcggggtggcagaaatcccagttcatgttgctcagaagagaatcaaggccgtgtccccttgttctaatgctgcacaccagttactgttcatggcacccgggaatgacttgggccaatcactgagtttgtggtgatcgcacaaggacatttgggactgtcttgagaaaacagataatgatagtgttttgtacttgttcttttctggtaggttctgtctgtgccaagggcaggttgatcagtgagctcaggagagagcttcctgtttctaagtggcctgcaggggccactctctactggtaggaagaggtaccacaggaagccgcctagtgcagagaggttgtgaaaacagcagcaatgcaatgtggaaattgtagcgtttcctttcttccctcatgttctcatgtttgtgcatgtatattactgatttacaagactaacctttgttcgtatataaagttacaccgttgttgttttacatcttttgggaagccaggaaagcgtttggaaaacgtatcacctttcccagattctcggattctcgactctttgcaacagcacttgcttgcggaactcttcctggaatgcattcactcagcatccccaaccgtgcaacgtgtaacttgtgcttttgcaaaagaagttgatctgaaattcctctgtagaatttagcttatacaattcagagaatagcagtttcactgccaacttttagtgggtgagaaattttagtttaggtgtttgggatcggacctcagtttctgttgtttcttttatgtggtggtttctatacatgaatcatagccaaaaacttttttggaaactgttggttgagatagttggttcttttaccccacgaagacatcaagatacacttgtaaataaagctgatagcatatattcatacctgttgtacacttgggtgaaaagtatggcagtgggagactaagatgtattaacctacctgtgaatcatatgttgtaggaaaagctgttcccatgtctaacaggacttgaattcaaagcatgtcaagtggatagtagatctgtggcgatatgagagggatgcagtgcctttccccattcattcctgatggaattgttatactaggttaacatttgtaatttttttctagttgtaatgtgtatgtctggtaaataggtattatattttggccttacaataccgtaacaatgtttgtcattttgaaatacttaatgccaagtaacaatgcatgctttggaaatttggaagatggttttattctttgagaagcaaatatgtttgcattaaatgctttgattgttcatatcaagaaattgattgaacgttctcaaaccctgtttacggtacttggtaagagggagccggtttgggagagaccattgcatcgctgtccaagtgtttcttgttaagtgcttttaaactggagaggctaacctcaaaatattttttttaactgcattctataataaatgggcacagtatgctccttacagaaaa

SEQ ID NO: 25788 - DNA, 2404 bp, Homo sapiens
  source 1..2404: mol_type = unassigned DNA
cgttccttcgcacgtgcctctgcgggatccctcgtgggaaagtctcagaaatgtccctaaactgaagaaaagccggggaatgcaaggagagcaaggtcgtaggttgttccgactgctccttaacgacctgcctggcagggaccgactaccctgctcctacccgcagccccatgtggagcaggcatccaccagtgcctccccgcgcttgctagcagtgaacattcctgaagacactctcctctcttatcctgaatcctcgctcccactgcagagacactgcgccttccataggttctccaaggccaaatttgagtccctctttaggacgtatgacaaggacatcacctttcagtattttaagagcttcaaacgagtcagaataaacttcagcaaccccttctccgcagcagatgccaggctccagctgcataagactgagtttctgggaaaggaaatgaagttatattttgctcagaccttacacataggaagctcacacctggctccgccaaatccagacaagcagtttctgatctcccctcccgcctctccgccagtgggatggaaacaagtggaagatgcgaccccagtcataaactatgatctcttatatgccatctccaagctggggccaggggaaaagtatgaattgcacgcagcgactgacaccactcccagcgtggtggtccatgtatgtgagagtgatcaagagaaggaggaagaagaggaaatggaaagaatgaggagacctaagccaaaaattatccagaccaggaggccggagtacacgccgatccacctcagctgaactggcacgcgacgaggacgcattccaaatcatactcacgggaggaatcttttactgtggaggtggctggtcacgacttcttcggaggtggcagccgagatcggggtggcagaaatcccagttcatgttgctcagaagagaatcaaggccgtgtccccttgttctaatgctgcacaccagttactgttcatggcacccgggaatgacttgggccaatcactgagtttgtggtgatcgcacaaggacatttgggactgtcttgagaaaacagataatgatagtgttttgtacttgttcttttctggtaggttctgtctgtgccaagggcaggttgatcagtgagctcaggagagagcttcctgtttctaagtggcctgcaggggccactctctactggtaggaagaggtaccacaggaagccgcctagtgcagagaggttgtgaaaacagcagcaatgcaatgtggaaattgtagcgtttcctttcttccctcatgttctcatgtttgtgcatgtatattactgatttacaagactaacctttgttcgtatataaagttacaccgttgttgttttacatcttttgggaagccaggaaagcgtttggaaaacgtatcacctttcccagattctcggattctcgactctttgcaacagcacttgcttgcggaactcttcctggaatgcattcactcagcatccccaaccgtgcaacgtgtaacttgtgcttttgcaaaagaagttgatctgaaattcctctgtagaatttagcttatacaattcagagaatagcagtttcactgccaacttttagtgggtgagaaattttagtttaggtgtttgggatcggacctcagtttctgttgtttcttttatgtggtggtttctatacatgaatcatagccaaaaacttttttggaaactgttggttgagatagttggttcttttaccccacgaagacatcaagatacacttgtaaataaagctgatagcatatattcatacctgttgtacacttgggtgaaaagtatggcagtgggagactaagatgtattaacctacctgtgaatcatatgttgtaggaaaagctgttcccatgtctaacaggacttgaattcaaagcatgtcaagtggatagtagatctgtggcgatatgagagggatgcagtgcctttccccattcattcctgatggaattgttatactaggttaacatttgtaatttttttctagttgtaatgtgtatgtctggtaaataggtattatattttggccttacaataccgtaacaatgtttgtcattttgaaatacttaatgccaagtaacaatgcatgctttggaaatttggaagatggttttattctttgagaagcaaatatgtttgcattaaatgctttgattgttcatatcaagaaattgattgaacgttctcaaaccctgtttacggtacttggtaagagggagccggtttgggagagaccattgcatcgctgtccaagtgtttcttgttaagtgcttttaaactggagaggctaacctcaaaatattttttttaactgcattctataataaatgggcacagtatgctccttacag

SEQ ID NO: 25789 - DNA, 2270 bp, Homo sapiens
  source 1..2270: mol_type = unassigned DNA
ccccctgcgctctcgccatcgccccgcatttactcgctggaggagggggtcacctcattcctagggaggaggaaacagacattgagcggcgacgtgactcagtgttcataaataggacgacgtccctgcattcccaatctgcactattggaagaaaagccaatgtttgggccaaatttgagtccctctttaggacgtatgacaaggacatcacctttcagtattttaagagcttcaaacgagtcagaataaacttcagcaaccccttctccgcagcagatgccaggctccagctgcataagactgagtttctgggaaaggaaatgaagttatattttgctcagaccttacacataggaagctcacacctggctccgccaaatccagacaagcagtttctgatctcccctcccgcctctccgccagtgggatggaaacaagtggaagatgcgaccccagtcataaactatgatctcttatatgccatctccaagctggggccaggggaaaagtatgaattgcacgcagcgactgacaccactcccagcgtggtggtccatgtatgtgagagtgatcaagagaaggaggaagaagaggaaatggaaagaatgaggagacctaagccaaaaattatccagaccaggaggccggagtacacgccgatccacctcagctgaactggcacgcgacgaggacgcattccaaatcatactcacgggaggaatcttttactgtggaggtggctggtcacgacttcttcggaggtggcagccgagatcggggtggcagaaatcccagttcatgttgctcagaagagaatcaaggccgtgtccccttgttctaatgctgcacaccagttactgttcatggcacccgggaatgacttgggccaatcactgagtttgtggtgatcgcacaaggacatttgggactgtcttgagaaaacagataatgatagtgttttgtacttgttcttttctggtaggttctgtctgtgccaagggcaggttgatcagtgagctcaggagagagcttcctgtttctaagtggcctgcaggggccactctctactggtaggaagaggtaccacaggaagccgcctagtgcagagaggttgtgaaaacagcagcaatgcaatgtggaaattgtagcgtttcctttcttccctcatgttctcatgtttgtgcatgtatattactgatttacaagactaacctttgttcgtatataaagttacaccgttgttgttttacatcttttgggaagccaggaaagcgtttggaaaacgtatcacctttcccagattctcggattctcgactctttgcaacagcacttgcttgcggaactcttcctggaatgcattcactcagcatccccaaccgtgcaacgtgtaacttgtgcttttgcaaaagaagttgatctgaaattcctctgtagaatttagcttatacaattcagagaatagcagtttcactgccaacttttagtgggtgagaaattttagtttaggtgtttgggatcggacctcagtttctgttgtttcttttatgtggtggtttctatacatgaatcatagccaaaaacttttttggaaactgttggttgagatagttggttcttttaccccacgaagacatcaagatacacttgtaaataaagctgatagcatatattcatacctgttgtacacttgggtgaaaagtatggcagtgggagactaagatgtattaacctacctgtgaatcatatgttgtaggaaaagctgttcccatgtctaacaggacttgaattcaaagcatgtcaagtggatagtagatctgtggcgatatgagagggatgcagtgcctttccccattcattcctgatggaattgttatactaggttaacatttgtaatttttttctagttgtaatgtgtatgtctggtaaataggtattatattttggccttacaataccgtaacaatgtttgtcattttgaaatacttaatgccaagtaacaatgcatgctttggaaatttggaagatggttttattctttgagaagcaaatatgtttgcattaaatgctttgattgttcatatcaagaaattgattgaacgttctcaaaccctgtttacggtacttggtaagagggagccggtttgggagagaccattgcatcgctgtccaagtgtttcttgttaagtgcttttaaactggagaggctaacctcaaaatattttttttaactgcattctataataaatgggcacagtatgctccttac

SEQ ID NO: 25790 - DNA, 2686 bp, Homo sapiens
  source 1..2686: mol_type = unassigned DNA
tttgttaccgtaagtagtgtctatgtattggcaactgttctgctgattcgatgaatgtaataaatcataccttcttaccttcttgtaaaatcacctgcattgggactaaaggccatagtcccctaagaggggaaaggcttttctctaagaaagaagttaggagttcttgaaaggattgatgatccacttcctcagtaaaaaatgtattgaggaggccaggcacggtggctcatgcctgtaatcccagcactttgggaggccgagggatcacctgaggacaggagcttgagaccagccttgccaacatggcaaagccccgtctctactaaaaatacaaaaattagccaggtgtgctggcaggcacctgtaaccccagctactcgggaggctgaggcaggagaatcacttgaacctgggaggtggaggttgcagtgagccaaaactgcaccactgcactccagcctgggtgacagagcaagactctgtctcgaagaaaaaaaaaaaagtaatgacatcatctagtcaagggtcatatgcaggtaaatttcaactccttttatttttattgttatttttcaggccaaatttgagtccctctttaggacgtatgacaaggacatcacctttcagtattttaagagcttcaaacgagtcagaataaacttcagcaaccccttctccgcagcagatgccaggctccagctgcataagactgagtttctgggaaaggaaatgaagttatattttgctcagaccttacacataggaagctcacacctggctccgccaaatccagacaagcagtttctgatctcccctcccgcctctccgccagtgggatggaaacaagtggaagatgcgaccccagtcataaactatgatctcttatatgccatctccaagctggggccaggggaaaagtatgaattgcacgcagcgactgacaccactcccagcgtggtggtccatgtatgtgagagtgatcaagagaaggaggaagaagaggaaatggaaagaatgaggagacctaagccaaaaattatccagaccaggaggccggagtacacgccgatccacctcagctgaactggcacgcgacgaggacgcattccaaatcatactcacgggaggaatcttttactgtggaggtggctggtcacgacttcttcggaggtggcagccgagatcggggtggcagaaatcccagttcatgttgctcagaagagaatcaaggccgtgtccccttgttctaatgctgcacaccagttactgttcatggcacccgggaatgacttgggccaatcactgagtttgtggtgatcgcacaaggacatttgggactgtcttgagaaaacagataatgatagtgttttgtacttgttcttttctggtaggttctgtctgtgccaagggcaggttgatcagtgagctcaggagagagcttcctgtttctaagtggcctgcaggggccactctctactggtaggaagaggtaccacaggaagccgcctagtgcagagaggttgtgaaaacagcagcaatgcaatgtggaaattgtagcgtttcctttcttccctcatgttctcatgtttgtgcatgtatattactgatttacaagactaacctttgttcgtatataaagttacaccgttgttgttttacatcttttgggaagccaggaaagcgtttggaaaacgtatcacctttcccagattctcggattctcgactctttgcaacagcacttgcttgcggaactcttcctggaatgcattcactcagcatccccaaccgtgcaacgtgtaacttgtgcttttgcaaaagaagttgatctgaaattcctctgtagaatttagcttatacaattcagagaatagcagtttcactgccaacttttagtgggtgagaaattttagtttaggtgtttgggatcggacctcagtttctgttgtttcttttatgtggtggtttctatacatgaatcatagccaaaaacttttttggaaactgttggttgagatagttggttcttttaccccacgaagacatcaagatacacttgtaaataaagctgatagcatatattcatacctgttgtacacttgggtgaaaagtatggcagtgggagactaagatgtattaacctacctgtgaatcatatgttgtaggaaaagctgttcccatgtctaacaggacttgaattcaaagcatgtcaagtggatagtagatctgtggcgatatgagagggatgcagtgcctttccccattcattcctgatggaattgttatactaggttaacatttgtaatttttttctagttgtaatgtgtatgtctggtaaataggtattatattttggccttacaataccgtaacaatgtttgtcattttgaaatacttaatgccaagtaacaatgcatgctttggaaatttggaagatggttttattctttgagaagcaaatatgtttgcattaaatgctttgattgttcatatcaagaaattgattgaacgttctcaaaccctgtttacggtacttggtaagagggagccggtttgggagagaccattgcatcgctgtccaagtgtttcttgttaagtgcttttaaactggagaggctaacctcaaaatattttttttaactgcattctataataaatgggcacagtatgctccttacagaaaa

SEQ ID NO: 25791 - DNA, 2520 bp, Homo sapiens
  source 1..2520: mol_type = unassigned DNA
atgatttgtgcatcctcttttgctcgcttaggcaaattctggatttgtgttagagtggtcagaaatgccaagaacctgacttcttagattaaaagacaaaattgttggggggagaaaggttttttaatggtctgaacattttctcagttcagagcctgagatctgcatgagctcaccattgctctcgttaagtaatgttcactggctcaccgtggaaacttgaaggcatgtcagtgtacctgaaccgtgcctttttcaggactaactcaaagaccttcaggaagaaatatttgggtacagccatccgggaccacagaatcacagggcaggaatgtgaatgttgatgctggcgattgtgagctgcctgaccttaggcaagtagtctcaattcaccaagcctcctttcttcaaaggccaaatttgagtccctctttaggacgtatgacaaggacatcacctttcagtattttaagagcttcaaacgagtcagaataaacttcagcaaccccttctccgcagcagatgccaggctccagctgcataagactgagtttctgggaaaggaaatgaagttatattttgctcagaccttacacataggaagctcacacctggctccgccaaatccagacaagcagtttctgatctcccctcccgcctctccgccagtgggatggaaacaagtggaagatgcgaccccagtcataaactatgatctcttatatgccatctccaagctggggccaggggaaaagtatgaattgcacgcagcgactgacaccactcccagcgtggtggtccatgtatgtgagagtgatcaagagaaggaggaagaagaggaaatggaaagaatgaggagacctaagccaaaaattatccagaccaggaggccggagtacacgccgatccacctcagctgaactggcacgcgacgaggacgcattccaaatcatactcacgggaggaatcttttactgtggaggtggctggtcacgacttcttcggaggtggcagccgagatcggggtggcagaaatcccagttcatgttgctcagaagagaatcaaggccgtgtccccttgttctaatgctgcacaccagttactgttcatggcacccgggaatgacttgggccaatcactgagtttgtggtgatcgcacaaggacatttgggactgtcttgagaaaacagataatgatagtgttttgtacttgttcttttctggtaggttctgtctgtgccaagggcaggttgatcagtgagctcaggagagagcttcctgtttctaagtggcctgcaggggccactctctactggtaggaagaggtaccacaggaagccgcctagtgcagagaggttgtgaaaacagcagcaatgcaatgtggaaattgtagcgtttcctttcttccctcatgttctcatgtttgtgcatgtatattactgatttacaagactaacctttgttcgtatataaagttacaccgttgttgttttacatcttttgggaagccaggaaagcgtttggaaaacgtatcacctttcccagattctcggattctcgactctttgcaacagcacttgcttgcggaactcttcctggaatgcattcactcagcatccccaaccgtgcaacgtgtaacttgtgcttttgcaaaagaagttgatctgaaattcctctgtagaatttagcttatacaattcagagaatagcagtttcactgccaacttttagtgggtgagaaattttagtttaggtgtttgggatcggacctcagtttctgttgtttcttttatgtggtggtttctatacatgaatcatagccaaaaacttttttggaaactgttggttgagatagttggttcttttaccccacgaagacatcaagatacacttgtaaataaagctgatagcatatattcatacctgttgtacacttgggtgaaaagtatggcagtgggagactaagatgtattaacctacctgtgaatcatatgttgtaggaaaagctgttcccatgtctaacaggacttgaattcaaagcatgtcaagtggatagtagatctgtggcgatatgagagggatgcagtgcctttccccattcattcctgatggaattgttatactaggttaacatttgtaatttttttctagttgtaatgtgtatgtctggtaaataggtattatattttggccttacaataccgtaacaatgtttgtcattttgaaatacttaatgccaagtaacaatgcatgctttggaaatttggaagatggttttattctttgagaagcaaatatgtttgcattaaatgctttgattgttcatatcaagaaattgattgaacgttctcaaaccctgtttacggtacttggtaagagggagccggtttgggagagaccattgcatcgctgtccaagtgtttcttgttaagtgcttttaaactggagaggctaacctcaaaatattttttttaactgcattctataataaatgggcacagtatgctccttacagaaaa

SEQ ID NO: 25792 - DNA, 3240 bp, Homo sapiens
  source 1..3240: mol_type = unassigned DNA
ccagagggcgccagcgcccaccaagcgcagaagcccgggaggaccatccaggggctccccgacatttcctcagttagccagagtcggggggctcagacatctggaatgaggggagaatcatacttcatcggaatgaggagcccagggcagcagggacacgtccctgaagatggaggacttttcttactgtgctgcatagacagggactgggctgtcactcgttgttttgcagaagaagcctttcaagcaatcactgacttcaatgacctccccaactcgttgtttgcgtgcaatgttcaccagtcagtgtttgaaggagaagagagcaaggaaaaatttgagggactgtttcggacttatgatgactgtgtgacgttccagctatttaagagtttcagacgtgtccgtataaacttcagcaatcctaaatctgcagcccgagctaggatagagcttcatgaaacccaattcagagggaaaaaattaaagctctactttgcacaggttcagactccagagacagatggagacaaactgcacttggctccaccccagcctgccaaacagtttctcatctcgcccccttcctccccacctgttggctggcagcccatcaacgatgccacgccagtcctcaactatgacctcctctatgctgtggccaaactaggaccaggagagaagtatgagctccatgcagggactgagtccaccccaagtgtcgtcgtgcacgtgtgcgacagtgacatagaggaagaagaggacccaaagacttccccaaagccaaaaatcatccaaactcggcgtcctggcctgccaccctccgtgtccaactgagctgcctgctccttctcgataatagccgtctcctctttatcatgctttttccccctgttgtttgtcaaaaaaaattgcctttaaattcctgggtgtttggttgtttgagattccttccttgttatcaagcctctcggacaaaagggctaggaaaaggtgatatgtctcctgatcatatcatacccattaagtataacccattatttagaaggttctagggaaaaaagtagtattttcttattaaacaatcagcacagcctatatctttgttctctcatgttgatccaagccagagacatcagtaacaaatagcacctgtgttgtttgtgagctgtttcagtcccagtcctgatgtgtgtgcgttgttctctcctggccacttaaataggaccatatgtaaacttgactttgactgcatgagatatccctatctggtctcactcagtcctctgcatcccaacattcccaggacatgcatgatcaccagcatttattttcattatttgaggatatcttataactcacagattgtcagcatccagccatgtcctatctagattaggaaaatgatcagaatattccagctcaacaagtctgggtatattcactattgtgagtcaatacaccatagctctgttgaaattcctggaggcaaaattgaccttggccccaaagatattcctcaatagatttcaaacaccactcccctgtagaactctcccagcctcgttggggaggcttgtccagggtgatagagactgatttcagacaaacctatttattacaaaagtttcatggtgtctgaatgattgttttctctctttgtatatttgtacaaatgtttcagctgtgcttttaaaaaatctggatgttttttatttagtgattgttcgacaattagctgcttcaaaacataatgtgcattgcttatgaatgccttcatatactaatacagatactctgataatattacactctaataaggataatgctgaattttgaaaggacacaaaacatctaatgccaatatatacatgattagccaacatctttgctatcaagaccacttgtttttaaataaagatgcaagtgtcagttgtagattattgggatgaagctaaatccccagaatgcagcagcagctgagcatgttaaaatggggaaggatgatagctacatgtatgccggtcctactcacgcgacacccgtgtgctcaaaaaagttatttgtttttgttacgtgtgatttttctatttctctagcccaaagtgcattacagaagatacacctatagaaccattaccttctgctatgtgtgccaggcctcatctactcctgtacattaatgaattactttagatgcaaacgcagattacaatggagtggggaagtactttcattacccaagcctcagaaaaacacacaagaacaataacacagcaaacagattgagggattgttgtggtttttgactaaggtgtatgttagtttcatcagaaacttaaaacatagactgatcactcagaaattaaagtccgttttactgtgaatatagcaatatagtactggacacagtactggtgaaactgaggagagcattgcttgtaaaatcctgagtttccataaggaaaatgaaaactccttttaaaaataaaatctgaggagtgtacaataagcatatgctttgactttcctttgctgtggaggtttttggtttttcattgatgataaacgactacagacttagtagtggagaaatggtgtcctctagtggaagaaatagtaggctccgctattcagatgcagagcactgcagcatccagcctttcaaagctgactcttctcaatcatctgtgggtcatttgacttgattttttaagctaccctgaatttccagaatgcaggttctaaagaaatctagatgagagaaagtatttgaaaatgatttttaaatgttttttaaaagacacatctgacatttttaacaacttagtaaaagttgaaatgaccattctgtgtagtcataaaagaaacacaatgaagtgtatggcctctggagttagtcttagtaaaacttattgctctgtgtcaatgttaacctgtctcagatcaagtaattctttcactaggttgggtttggggaggggggaaaagaggggcttttcctaggagaacgataagaaatggaaagactccttgaagtgttgcaagggaacctcctagcactgtgaaagtcagaatcgcctcagcatttccatgacgcacattatgcaaatctctttagcactattttaagtttgaaaactttaacaatgaaggggaaggggaagatttccaccaactgaatcatttgtgcacgtgtatagctcaaagagcttagacttcaaatatatctggtgaatg

SEQ ID NO: 25793 - DNA, 3186 bp, Homo sapiens
  source 1..3186: mol_type = unassigned DNA
ctctgctgtgctgcctcagacgcggagggctgcgtgcagtgggagcgggctccaggagcccgagcctccagccgtccccagagcaaggcagcaccgaggcctggccacagcaatatccatctggaagctcttcccttcactcccaactctgaggttgcctaactctttattaaaaattcagaagggggaatgccagcccctagcatggactgtgatgtttccactctggttgcctgtgtggtggatgtcgaggtctttaccaatcaggaggttaaggaaaaatttgagggactgtttcggacttatgatgactgtgtgacgttccagctatttaagagtttcagacgtgtccgtataaacttcagcaatcctaaatctgcagcccgagctaggatagagcttcatgaaacccaattcagagggaaaaaattaaagctctactttgcacaggttcagactccagagacagatggagacaaactgcacttggctccaccccagcctgccaaacagtttctcatctcgcccccttcctccccacctgttggctggcagcccatcaacgatgccacgccagtcctcaactatgacctcctctatgctgtggccaaactaggaccaggagagaagtatgagctccatgcagggactgagtccaccccaagtgtcgtcgtgcacgtgtgcgacagtgacatagaggaagaagaggacccaaagacttccccaaagccaaaaatcatccaaactcggcgtcctggcctgccaccctccgtgtccaactgagctgcctgctccttctcgataatagccgtctcctctttatcatgctttttccccctgttgtttgtcaaaaaaaattgcctttaaattcctgggtgtttggttgtttgagattccttccttgttatcaagcctctcggacaaaagggctaggaaaaggtgatatgtctcctgatcatatcatacccattaagtataacccattatttagaaggttctagggaaaaaagtagtattttcttattaaacaatcagcacagcctatatctttgttctctcatgttgatccaagccagagacatcagtaacaaatagcacctgtgttgtttgtgagctgtttcagtcccagtcctgatgtgtgtgcgttgttctctcctggccacttaaataggaccatatgtaaacttgactttgactgcatgagatatccctatctggtctcactcagtcctctgcatcccaacattcccaggacatgcatgatcaccagcatttattttcattatttgaggatatcttataactcacagattgtcagcatccagccatgtcctatctagattaggaaaatgatcagaatattccagctcaacaagtctgggtatattcactattgtgagtcaatacaccatagctctgttgaaattcctggaggcaaaattgaccttggccccaaagatattcctcaatagatttcaaacaccactcccctgtagaactctcccagcctcgttggggaggcttgtccagggtgatagagactgatttcagacaaacctatttattacaaaagtttcatggtgtctgaatgattgttttctctctttgtatatttgtacaaatgtttcagctgtgcttttaaaaaatctggatgttttttatttagtgattgttcgacaattagctgcttcaaaacataatgtgcattgcttatgaatgccttcatatactaatacagatactctgataatattacactctaataaggataatgctgaattttgaaaggacacaaaacatctaatgccaatatatacatgattagccaacatctttgctatcaagaccacttgtttttaaataaagatgcaagtgtcagttgtagattattgggatgaagctaaatccccagaatgcagcagcagctgagcatgttaaaatggggaaggatgatagctacatgtatgccggtcctactcacgcgacacccgtgtgctcaaaaaagttatttgtttttgttacgtgtgatttttctatttctctagcccaaagtgcattacagaagatacacctatagaaccattaccttctgctatgtgtgccaggcctcatctactcctgtacattaatgaattactttagatgcaaacgcagattacaatggagtggggaagtactttcattacccaagcctcagaaaaacacacaagaacaataacacagcaaacagattgagggattgttgtggtttttgactaaggtgtatgttagtttcatcagaaacttaaaacatagactgatcactcagaaattaaagtccgttttactgtgaatatagcaatatagtactggacacagtactggtgaaactgaggagagcattgcttgtaaaatcctgagtttccataaggaaaatgaaaactccttttaaaaataaaatctgaggagtgtacaataagcatatgctttgactttcctttgctgtggaggtttttggtttttcattgatgataaacgactacagacttagtagtggagaaatggtgtcctctagtggaagaaatagtaggctccgctattcagatgcagagcactgcagcatccagcctttcaaagctgactcttctcaatcatctgtgggtcatttgacttgattttttaagctaccctgaatttccagaatgcaggttctaaagaaatctagatgagagaaagtatttgaaaatgatttttaaatgttttttaaaagacacatctgacatttttaacaacttagtaaaagttgaaatgaccattctgtgtagtcataaaagaaacacaatgaagtgtatggcctctggagttagtcttagtaaaacttattgctctgtgtcaatgttaacctgtctcagatcaagtaattctttcactaggttgggtttggggaggggggaaaagaggggcttttcctaggagaacgataagaaatggaaagactccttgaagtgttgcaagggaacctcctagcactgtgaaagtcagaatcgcctcagcatttccatgacgcacattatgcaaatctctttagcactattttaagtttgaaaactttaacaatgaaggggaaggggaagatttccaccaactgaatcatttgtgcacgtgtatagctcaaagagcttagacttcaaatatatctggtgaatg

SEQ ID NO: 25794 - DNA, 3327 bp, Homo sapiens
  source 1..3327: mol_type = unassigned DNA
agagggaggcggggcgcgccgcgccgcgtacggccccacgcaaaggcccgcgggcaccgcgccgcccccacgcgctcgcaccggcgggcaggtgagcaggcagcgccgcgcgctagcagctggcccccgtagacgccccagccgccgcctccgcctccgcctccgccggcgcatcgcggacgcccagcaggaatgaggggagaatcatacttcatcggaatgaggagcccagggcagcagggacacgtccctgaagatggaggacttttcttactgtgctgcatagacagggactgggctgtcactcgttgttttgcagaagaagcctttcaagcaatcactgacttcaatgacctccccaactcgttgtttgcgtgcaatgttcaccagtcagtgtttgaaggagaagagagcaaggaaaaatttgagggactgtttcggacttatgatgactgtgtgacgttccagctatttaagagtttcagacgtgtccgtataaacttcagcaatcctaaatctgcagcccgagctaggatagagcttcatgaaacccaattcagagggaaaaaattaaagctctactttgcacaggttcagactccagagacagatggagacaaactgcacttggctccaccccagcctgccaaacagtttctcatctcgcccccttcctccccacctgttggctggcagcccatcaacgatgccacgccagtcctcaactatgacctcctctatgctgtggccaaactaggaccaggagagaagtatgagctccatgcagggactgagtccaccccaagtgtcgtcgtgcacgtgtgcgacagtgacatagaggaagaagaggacccaaagacttccccaaagccaaaaatcatccaaactcggcgtcctggcctgccaccctccgtgtccaactgagctgcctgctccttctcgataatagccgtctcctctttatcatgctttttccccctgttgtttgtcaaaaaaaattgcctttaaattcctgggtgtttggttgtttgagattccttccttgttatcaagcctctcggacaaaagggctaggaaaaggtgatatgtctcctgatcatatcatacccattaagtataacccattatttagaaggttctagggaaaaaagtagtattttcttattaaacaatcagcacagcctatatctttgttctctcatgttgatccaagccagagacatcagtaacaaatagcacctgtgttgtttgtgagctgtttcagtcccagtcctgatgtgtgtgcgttgttctctcctggccacttaaataggaccatatgtaaacttgactttgactgcatgagatatccctatctggtctcactcagtcctctgcatcccaacattcccaggacatgcatgatcaccagcatttattttcattatttgaggatatcttataactcacagattgtcagcatccagccatgtcctatctagattaggaaaatgatcagaatattccagctcaacaagtctgggtatattcactattgtgagtcaatacaccatagctctgttgaaattcctggaggcaaaattgaccttggccccaaagatattcctcaatagatttcaaacaccactcccctgtagaactctcccagcctcgttggggaggcttgtccagggtgatagagactgatttcagacaaacctatttattacaaaagtttcatggtgtctgaatgattgttttctctctttgtatatttgtacaaatgtttcagctgtgcttttaaaaaatctggatgttttttatttagtgattgttcgacaattagctgcttcaaaacataatgtgcattgcttatgaatgccttcatatactaatacagatactctgataatattacactctaataaggataatgctgaattttgaaaggacacaaaacatctaatgccaatatatacatgattagccaacatctttgctatcaagaccacttgtttttaaataaagatgcaagtgtcagttgtagattattgggatgaagctaaatccccagaatgcagcagcagctgagcatgttaaaatggggaaggatgatagctacatgtatgccggtcctactcacgcgacacccgtgtgctcaaaaaagttatttgtttttgttacgtgtgatttttctatttctctagcccaaagtgcattacagaagatacacctatagaaccattaccttctgctatgtgtgccaggcctcatctactcctgtacattaatgaattactttagatgcaaacgcagattacaatggagtggggaagtactttcattacccaagcctcagaaaaacacacaagaacaataacacagcaaacagattgagggattgttgtggtttttgactaaggtgtatgttagtttcatcagaaacttaaaacatagactgatcactcagaaattaaagtccgttttactgtgaatatagcaatatagtactggacacagtactggtgaaactgaggagagcattgcttgtaaaatcctgagtttccataaggaaaatgaaaactccttttaaaaataaaatctgaggagtgtacaataagcatatgctttgactttcctttgctgtggaggtttttggtttttcattgatgataaacgactacagacttagtagtggagaaatggtgtcctctagtggaagaaatagtaggctccgctattcagatgcagagcactgcagcatccagcctttcaaagctgactcttctcaatcatctgtgggtcatttgacttgattttttaagctaccctgaatttccagaatgcaggttctaaagaaatctagatgagagaaagtatttgaaaatgatttttaaatgttttttaaaagacacatctgacatttttaacaacttagtaaaagttgaaatgaccattctgtgtagtcataaaagaaacacaatgaagtgtatggcctctggagttagtcttagtaaaacttattgctctgtgtcaatgttaacctgtctcagatcaagtaattctttcactaggttgggtttggggaggggggaaaagaggggcttttcctaggagaacgataagaaatggaaagactccttgaagtgttgcaagggaacctcctagcactgtgaaagtcagaatcgcctcagcatttccatgacgcacattatgcaaatctctttagcactattttaagtttgaaaactttaacaatgaaggggaaggggaagatttccaccaactgaatcatttgtgcacgtgtatagctcaaagagcttagacttcaaatatatctggtgaatg

SEQ ID NO: 25795 - DNA, 732 bp, Homo sapiens
  source 1..732: mol_type = unassigned DNA
atgaggggagaatcatacttcatcggaatgaggagcccagggcagcagggacacgtccctgaagatggaggacttttcttactgtgctgcatagacagggactgggctgtcactcgttgttttgcagaagaagcctttcaagcaatcactgacttcaatgacctccccaactcgttgtttgcgtgcaatgttcaccagtcagtgtttgaaggagaagagagcaaggaaaaatttgagggactgtttcggacttatgatgactgtgtgacgttccagctatttaagagtttcagacgtgtccgtataaacttcagcaatcctaaatctgcagcccgagctaggatagagcttcatgaaacccaattcagagggaaaaaattaaagctctactttgcacaggttcagactccagagacagatggagacaaactgcacttggctccaccccagcctgccaaacagtttctcatctcgcccccttcctccccacctgttggctggcagcccatcaacgatgccacgccagtcctcaactatgacctcctctatgctgtggccaaactaggaccaggagagaagtatgagctccatgcagggactgagtccaccccaagtgtcgtcgtgcacgtgtgcgacagtgacatagaggaagaagaggacccaaagacttccccaaagccaaaaatcatccaaactcggcgtcctggcctgccaccctccgtgtccaactga

SEQ ID NO: 25796 - DNA, 3816 bp, Homo sapiens
  source 1..3816: mol_type = unassigned DNA
cagagatgtcggcttatttataggaattgcttgaagccagagtcatggtggatgtcggaaagtggcccatcttcactctactctcccctcaagagatcgcgtctattcggaaggcgtgtgtcttcggcacctcagccagtgaagcactgtacgttactgacaatgatgaggtctttgtatttggactgaactatagtaactgtctaggaactggagataaccagagtacacttgtacccaaaaagctagaaggcttatgtggaaagaagattaaaagcctcagttacgggagtggaccacatgttcttctcagcaccgaagatggagtggtttatgcctggggccacaatggatatagccagcttgggaatgggacgaccaaccaaggcattgctcccgtccaggtctgtaccaatctcttgatcaagcaagtggtggaagtagcttgtggctcacatcattcaatggctctggcagctgatggagaggtgtttgcttggggttataacaactgtggccaagtgggatcaggttctacagcaaatcaaccaactcctcgaaaagttacaaactgtttacatattaagagggtagttggcattgcctgtggtcagacttcatccatggctgttctggacaatggcgaggtatatggctggggttacaatggcaacggtcagctgggcctgggaaacaatggcaaccagctgacccctgtgagagtggcagctttgcacagcgtgtgtgtgaaccagattgtctgcggttacgcacatactctagcactaacagatgagggcttgctgtatgcctggggagctaacacatatgggcagctgggaactggcaataaaaataacctgctaagcccagcacacatcatggtggagaaagaaagggtggtagagattgcagcctgtcactctgcccacacgtctgcagccaagacgcagggtgggcacgtgtacatgtggggccagtgccggggtcagtccgtgatcctcccgcacctcacccacttctcctgcaccgacgacgtgtttgcctgctttgccactcccgccgtctcgtggcgcctcctgtctgtggagcatgaagactttttaacagttgcagagtcactgaagaaagaatttgatagtccagaaactgctgatctgaagtttcgaattgatggaaaatatattcatgtccataaagctgttttgaaaatcaggtgtgagcattttcgatccatgttccagtcgtattggaatgaagacatgaaggaagtgatagaaatcgatcagttttcttacccagtgtatcgtgcctttctccagtacctctacacagacacagtcgacctgccgccagaagatgctataggtcttctggatttggcgacatcttactgtgaaaacagactgaaaaaactttgtcagcacattatcaagagaggaattactgtggagaatgccttttcgctattctctgctgcagtcagatatgatgcagaggatttagaagaattctgctttaagttttgcatcaatcatttgacagaagttacacagactgcagcattttggcaaatggatggccctctgctaaaggaattcattgctaaagccagtaaatgtggagcctttaagaactgaagcgcaaggctgctgggttctgtgtgagtgctctggggcactgttgaggatgtgtccagtttgtgctctacgggtgatgtgattctgcaggtaaaagaccatcaggttgtttttttccacatctgggacacagttgtttgtgtaggaacataacaagggtgtacggcttttcttgagcccattttaaacaacccttgtttccagataagtgtattttaaatgtgacctttcgtaaatttgggctggaacatgtaaaagggtgaaagttagtcgtttttggtcttcttttcatttttgattagaggaacttctgaacttggaaaggggaagttggcagcaactctcctgggccacgtatcaacaatcttctgacagcaggagcagtgatagttggggaattgtgagatgaatggagaggccccatcgtgaattaaagatgctgacctggggattgttaagtgctgccttagttgctagtttagtagccttactgtgaaggaataattaagattgtttcagacttttgtttgtgtgcttgcgttgatgacttttttaacttcaagataaatcaaagtaataagtttaacgtatattaaacctgttgaaatgataattatgtaaagataaatattctaggttagtcaagatttctcttaagatttaagtgcataaagaatagtaatttagaagtatccgtgaaaagttgataatgaaagaaatttgatgaaggtgaatattttataaattagaatctccactacttatccaatggtgttttatttcattaaggtagaacttgagaactcaagtttaaattgtcccccaccaccttcttctataaatgcaaacttaagaggaaaataatgacatgtatagtatactcttgccttcctaaattatgactgctgaatcatcatatctactatatatgactggaagaagtggttcttcaagtcaaccctcttacaagacttagtggaatttgctttatctactttaggccaaatccatcacacattggcttatgtgaaactttatcatctttcacttttggttttcctctgtttttaaacatcttaggtataacagcacaatttcaccttgaaaaagcaccaaaattatggtgttcctgaaaagatcctattaaaagacagtagtttatttgaactggttatggaaggtgactttgggatgtaagagtgttcaactgtgagtttcatcatgtgtgtccgttgagcttgcttttaagagcaatgttttgctttgctctctggtccatgaactcatttccatttgagtgagttcccttagtgaattttgtctcctgcttggaaagtctctcttctgaacctggagcctgaatacattttcagagccaaattacaagtgggtgaagacatgctacaactactatttttagcaatgtttttaaatttgtgtctattggggtgggaaggggagtgaggccctaaagataggaattcactgatagctgaaatagatacaagcctaggagccccagcccccttttcttgaccatatcacaagtgattgaagcccagtgaattagtcggttagaattcgttctacaacatgatagaacttttcttactagcttcagaaatgcacattgatttgtgctatgatgggtggtgtttgtaacaatcactgttctataggcttatgatctgagcaaaatgtgaacttcagtatgtttactattgctcttacttgaaaactttttttcaaaaaaagcacaaattaaagtagtaaattcatatccatagatagttcattcattcaacaaatatttaccaagttcctaatataagtgaaggaccacttctcatattagattactaagtcatttgtatgaatatgtgtggcagtgaagagaacaggtctttcaaaaagcatttgattattttttttaaatacactctcttatttttctacttgtttttttgttaatcatagcaggatatgacaactcttatttgaattgattttttcatctaatgtaataatggaagccaaagtattcatatttcttaagatagccctaaatgtactcttgaacttcttactggaacaatgtttgatactctagtatgtaagctgtatttatgtaatatttagaacgacatgttaataaacaaagtaacattaaaacagg

SEQ ID NO: 25797 - DNA, 4025 bp, Homo sapiens
  source 1..4025: mol_type = unassigned DNA
gacccggcgggcccggcgccctggcgctcctcctcttcgctgccggtgggcaccgccgctcgctcgcacttctgcgcccattggagcttcggagatccctgcggtcccgcgggacggcgcggcagcagctgacctcgcagacaggatcttgctctcttgcccagactggaatacagtggtgtgaacacggctcactgcagcctcaacctcctggactcagagatgtcggcttatttataggaattgcttgaagccagagtcatggtggatgtcggaaagtggcccatcttcactctactctcccctcaagagatcgcgtctattcggaaggcgtgtgtcttcggcacctcagccagtgaagcactgtacgttactgacaatgatgaggtctttgtatttggactgaactatagtaactgtctaggaactggagataaccagagtacacttgtacccaaaaagctagaaggcttatgtggaaagaagattaaaagcctcagttacgggagtggaccacatgttcttctcagcaccgaagatggagtggtttatgcctggggccacaatggatatagccagcttgggaatgggacgaccaaccaaggcattgctcccgtccaggtctgtaccaatctcttgatcaagcaagtggtggaagtagcttgtggctcacatcattcaatggctctggcagctgatggagaggtgtttgcttggggttataacaactgtggccaagtgggatcaggttctacagcaaatcaaccaactcctcgaaaagttacaaactgtttacatattaagagggtagttggcattgcctgtggtcagacttcatccatggctgttctggacaatggcgaggtatatggctggggttacaatggcaacggtcagctgggcctgggaaacaatggcaaccagctgacccctgtgagagtggcagctttgcacagcgtgtgtgtgaaccagattgtctgcggttacgcacatactctagcactaacagatgagggcttgctgtatgcctggggagctaacacatatgggcagctgggaactggcaataaaaataacctgctaagcccagcacacatcatggtggagaaagaaagggtggtagagattgcagcctgtcactctgcccacacgtctgcagccaagacgcagggtgggcacgtgtacatgtggggccagtgccggggtcagtccgtgatcctcccgcacctcacccacttctcctgcaccgacgacgtgtttgcctgctttgccactcccgccgtctcgtggcgcctcctgtctgtggagcatgaagactttttaacagttgcagagtcactgaagaaagaatttgatagtccagaaactgctgatctgaagtttcgaattgatggaaaatatattcatgtccataaagctgttttgaaaatcaggtgtgagcattttcgatccatgttccagtcgtattggaatgaagacatgaaggaagtgatagaaatcgatcagttttcttacccagtgtatcgtgcctttctccagtacctctacacagacacagtcgacctgccgccagaagatgctataggtcttctggatttggcgacatcttactgtgaaaacagactgaaaaaactttgtcagcacattatcaagagaggaattactgtggagaatgccttttcgctattctctgctgcagtcagatatgatgcagaggatttagaagaattctgctttaagttttgcatcaatcatttgacagaagttacacagactgcagcattttggcaaatggatggccctctgctaaaggaattcattgctaaagccagtaaatgtggagcctttaagaactgaagcgcaaggctgctgggttctgtgtgagtgctctggggcactgttgaggatgtgtccagtttgtgctctacgggtgatgtgattctgcaggtaaaagaccatcaggttgtttttttccacatctgggacacagttgtttgtgtaggaacataacaagggtgtacggcttttcttgagcccattttaaacaacccttgtttccagataagtgtattttaaatgtgacctttcgtaaatttgggctggaacatgtaaaagggtgaaagttagtcgtttttggtcttcttttcatttttgattagaggaacttctgaacttggaaaggggaagttggcagcaactctcctgggccacgtatcaacaatcttctgacagcaggagcagtgatagttggggaattgtgagatgaatggagaggccccatcgtgaattaaagatgctgacctggggattgttaagtgctgccttagttgctagtttagtagccttactgtgaaggaataattaagattgtttcagacttttgtttgtgtgcttgcgttgatgacttttttaacttcaagataaatcaaagtaataagtttaacgtatattaaacctgttgaaatgataattatgtaaagataaatattctaggttagtcaagatttctcttaagatttaagtgcataaagaatagtaatttagaagtatccgtgaaaagttgataatgaaagaaatttgatgaaggtgaatattttataaattagaatctccactacttatccaatggtgttttatttcattaaggtagaacttgagaactcaagtttaaattgtcccccaccaccttcttctataaatgcaaacttaagaggaaaataatgacatgtatagtatactcttgccttcctaaattatgactgctgaatcatcatatctactatatatgactggaagaagtggttcttcaagtcaaccctcttacaagacttagtggaatttgctttatctactttaggccaaatccatcacacattggcttatgtgaaactttatcatctttcacttttggttttcctctgtttttaaacatcttaggtataacagcacaatttcaccttgaaaaagcaccaaaattatggtgttcctgaaaagatcctattaaaagacagtagtttatttgaactggttatggaaggtgactttgggatgtaagagtgttcaactgtgagtttcatcatgtgtgtccgttgagcttgcttttaagagcaatgttttgctttgctctctggtccatgaactcatttccatttgagtgagttcccttagtgaattttgtctcctgcttggaaagtctctcttctgaacctggagcctgaatacattttcagagccaaattacaagtgggtgaagacatgctacaactactatttttagcaatgtttttaaatttgtgtctattggggtgggaaggggagtgaggccctaaagataggaattcactgatagctgaaatagatacaagcctaggagccccagcccccttttcttgaccatatcacaagtgattgaagcccagtgaattagtcggttagaattcgttctacaacatgatagaacttttcttactagcttcagaaatgcacattgatttgtgctatgatgggtggtgtttgtaacaatcactgttctataggcttatgatctgagcaaaatgtgaacttcagtatgtttactattgctcttacttgaaaactttttttcaaaaaaagcacaaattaaagtagtaaattcatatccatagatagttcattcattcaacaaatatttaccaagttcctaatataagtgaaggaccacttctcatattagattactaagtcatttgtatgaatatgtgtggcagtgaagagaacaggtctttcaaaaagcatttgattattttttttaaatacactctcttatttttctacttgtttttttgttaatcatagcaggatatgacaactcttatttgaattgattttttcatctaatgtaataatggaagccaaagtattcatatttcttaagatagccctaaatgtactcttgaacttcttactggaacaatgtttgatactctagtatgtaagctgtatttatgtaatatttagaacgacatgttaataaacaaagtaacatt

SEQ ID NO: 25798 - DNA, 1971 bp, Homo sapiens
  source 1..1971: mol_type = unassigned DNA
ggcgggcccggcgccctggcgctcctcctcttcgctgccggtgggcaccgccgctcgctcgcacttctgcgcccattggagcttcggagatccctgcggtcccgcgggacggcgcggcagcagctgacctcgcagacaggatcttgctctcttgcccagactggaatacagtggtgtgaacacggctcactgcagcctcaacctcctggactcagagatgtcggcttatttataggaattgcttgaagccagagtcatggtggatgtcggaaagtggcccatcttcactctactctcccctcaagagatcgcgtctattcggaaggcgtgtgtcttcggcacctcagccagtgaagcactgtacgttactgacaatgatgaggtctttgtatttggactgaactatagtaactgtctaggaactggagataaccagagtacacttgtacccaaaaagctagaaggcttatgtggaaagaagattaaaagcctcagttacgggagtggaccacatgttcttctcagcaccgaagatggagtggtttatgcctggggccacaatggatatagccagcttgggaatgggacgaccaaccaaggcattgctcccgtccaggtctgtaccaatctcttgatcaagcaagtggtggaagtagcttgtggctcacatcattcaatggctctggcagctgatggagaggtgtttgcttggggttataacaactgtggccaagtgggatcaggttctacagcaaatcaaccaactcctcgaaaagttacaaactgtttacatattaagagggtagttggcattgcctgtggtcagacttcatccatggctgttctggacaatggcgaggtatatggctggggttacaatggcaacggtcagctgggcctgggaaacaatggcaaccagctgacccctgtgagagtggcagctttgcacagcgtgtgtgtgaaccagattgtctgcggttacgcacatactctagcactaacagatgagggcttgctgtatgcctggggagctaacacatatgggcagctgggaactggcaataaaaataacctgctaagcccagcacacatcatggtggagaaagaaagggtggtagagattgcagcctgtcactctgcccacacgtctgcagccaagacgcagggtgggcacgtgtacatgtggggccagtgccggggtcagtccgtgatcctcccgcacctcacccacttctcctgcaccgacgacgtgtttgcctgctttgccactcccgccgtctcgtggcgcctcctgtctgtggtgagtattgtgattggaaaataattggttcactgaatgggactatttggccagaattgcacatgtatggcatacccagctgaagcacttctgtacacatcttcagatttgtatatactacttaacctggacttgttataaaaggcttcccccagttcttatatcttaaaatggcacaggcattcttttcagaacaaatgtcctaacaatttaaatgttaagtttggaaaaaatatggtcattgactatatcctcctagatcaggggtccccacaccccaggccatatgcctgtactggtccgtggcctgttattaactgggttgcacggcaggaggtgagtggcagtgagcgaagcttcatctgtatttacagctgctccccatcactcacattaccgcctgagctccacctcccatcagatcagcagcggtattagattctcaaagaagcgtaagccctattgtgaactgcacatgcgagggatacaggttgcgagctccttatgagaatctaatgcctagatgatctgtcactgtctcccatcacccccagatggggccgtccagttgtaggaaaacaagctcaggactcccactgattctacattatggtgagttgtgtaattatttcattacatattacagtgtaacaataataaaaattaagtgc

SEQ ID NO: 25799 - DNA, 3232 bp, Homo sapiens
  source 1..3232: mol_type = unassigned DNA
aggagaggaggggcgagacgccgtcgccagccccctcctcttgtctgcgctcccttcgtttccgtctcggccgggcacccgagcgcatcccgccgaggccgggccgtttcagggggaggcgccaactcatcgcggcgccgggcccctgaccgtgcagtaaccgctacccaggaggcggagcggacaaggctccggcctgcgaggagtcacattaactttgctctagaagacaactttacaaggatctaaaaggaacaggattaaagatgactgaatactgggttccagaaatttaaaacaatcagcttagcaaatcatatattcttctgtggagctgagaattgatgtccgctcttccccgtgatttggaactttccaatcccagagaaaagttgacaaagggactgcccaggactgagtccatatggaagaagaacttcctcttttctctggagacagtggcaagccagtacaggctactctgtcatctttgaagatgttagatgtgggaaagtggccaattttttccctttgttctgaagaagaactacagttaattcgtcaggcttgtgtctttggcagtgctggcaatgaagttttatacactacagtaaatgatgagatttttgtgcttggcacaaactgctgtggctgtttggggttaggtgacgtccagagcaccattgaacctcggagactggattctttaaatggcaaaaaaatagcctgcctcagctatgggagtggtccacatattgtccttgcaacaacagaaggagaagtctttacctggggtcataatgcttatagccagctgggcaatgggacaactaatcatggtttagtgccctgtcatatctctactaatctgtcaaacaaacaagtcattgaagttgcctgtgggtcttaccattctttggtgctaacatctgatggagaggtatttgcctggggttataataactctgggcaggtaggatctggatcaacagttaatcagccaatccctcgaagagtcactggctgcctacaaaataaagtagttgtgaccatagcatgtgggcagatgtgctgcatggcagtagtagacacgggggaggtctatgtctggggttacaacggaaacgggcagcttggactcggcaacagtggcaaccagccaaccccttgcagagtggcagctttgcaaggcatccgtgtccagagggtcgcctgtggctacgcacacacattagtattaacagatgaaggccaagtgtatgcttggggcgccaattcttatgggcagttgggcactggcaataaaagcaaccagtcctatcctactcctgtcactgtggaaaaggacaggattatcgagattgcagcctgtcactccacacacacgtctgcggccaagacgcagggtgggcacgtgtacatgtggggccagtgccggggtcagtccgtgatcctcccgcacctcacccacttctcctgcactgacgacgtgtttgcctgctttgccacgcccgccgtcacgtggcgcctcctctccgtggaacctgatgaccacctcacagtggctgagtcactgaagagggaatttgacaacccggacactgcagacctgaagtttctagttgatggaaagtacatttatgcacataaagtccttctcaagattcgatgtgagcattttcgttcgtcattggaagataacgaggatgatattgtagaaatgagtgaattttcatatcctgtttaccgggccttcctggaatacctatacacagacagcatcagcctttctcctgaggaggcagtaggactgctagacttggctacattttatagagaaaatcgtttgaaaaagctctgccaacaaactatcaagcaaggcatctgcgaggagaatgccatcgctctgctctcggctgcggtgaagtatgatgcacaggatttagaagaattctgcttcaggttttgcataaaccatctgactgtagtaacacaaacatcaggttttgcagaaatggaccatgatctcctgaagaactttatcagcaaagcaagcagagttggagcctttaaaaattgatcccatctgcaggaaagtttttgagcctttccatttcccctgcaaaagccagagatgaatcacttctctttaattaatagtatgtatgatgagctatgtttggctgagtacttgtaactgtcagaagaaggatggtggtgagtggtctttgtctgcctaaacccagagtttatgtagaaagcattgaatgttctgatcagatgtgactaaggtcaaggaaaaaaaattgaaatatcttatttaccatttcctctttttgagtcacttaaattggacacctttggtaccctggtctcagtatatgctattctggcccaaatgttccattattcagctggctgataccacatagatagcttgacaaggagtgctgtctgtccttaccacattttcagcactcagcacagtgccttgtgtataataggcactcaatttattataaatcttcagtatgtcctgagaacagctttagtcatggaatactgggagaaggaataactttcacaaaataaacttaaaacagcctgtaattattgaggttcatattcttctggtatatcattctgagaaattgtggctaatttagaacattgtttagaattgacaaaaggccctggcaattaaattgtcaaggcccaagggctaattttaattttctttttacttggagtcattcattaatttctcacatgggattatggagtatgaagtattatctttgaatgaaattcctgggctgatctgccttacataatcacataaggtcctttgcttttctttgtgttaagagggacttgcctctgtaaatgaaaatgacaatgtgcttttcttgtagttgactttcatgtcactcactataaaataggtctcttaacctggcaccagtataactataaagcactagctgagaaggaactgatacttacatttcatggacagcattaacaagaatgagataaatttgtactttttagatcaaaacaaattacctaattgcaaaagagaaactgaaatggaacatagtctcagattcttctaatgtgtatctcacaatgtcatgtaatgtaaaggaaacccttttggaattagaattcttgttctgatgctgaactatttggtaataaagtgcttatttgcagataacagaacaaa

SEQ ID NO: 25800 - DNA, 2400 bp, Homo sapiens
  source 1..2400: mol_type = unassigned DNA
gcagtaaccgctacccaggaggcggagcggacaaggctccggcctgcgaggagtcacattaactttgctctagaagacaactttacaaggatctaaaaggaacaggattaaagatgactgaatactgggttccagaaatttaaaacaatcagcttagcaaatcatatattcttctgtggagctgagaattgatgtccgctcttccccgtgatttggaactttccaatcccagagaaaagttgacaaagccagtacaggctactctgtcatctttgaagatgttagatgtgggaaagtggccaattttttccctttgttctgaagaagaactacagttaattcgtcaggcttgtgtctttggcagtgctggcaatgaagttttatacactacagtaaatgatgagatttttgtgcttggcacaaactgctgtggctgtttggggttaggtgacgtccagagcaccattgaacctcggagactggattctttaaatggcaaaaaaatagcctgcctcagctatgggagtggtccacatattgtccttgcaacaacagaaggagaagtctttacctggggtcataatgcttatagccagctgggcaatgggacaactaatcatggtttagtgccctgtcatatctctactaatctgtcaaacaaacaagtcattgaagttgcctgtgggtcttaccattctttggtgctaacatctgatggagaggtatttgcctggggttataataactctgggcaggtaggatctggatcaacagttaatcagccaatccctcgaagagtcactggctgcctacaaaataaagtagttgtgaccatagcatgtgggcagatgtgctgcatggcagtagtagacacgggggaggtctatgtctggggttacaacggaaacgggcagcttggactcggcaacagtggcaaccagccaaccccttgcagagtggcagctttgcaaggcatccgtgtccagagggtcgcctgtggctacgcacacacattagtattaacagatgaaggccaagtgtatgcttggggcgccaattcttatgggcagttgggcactggcaataaaagcaaccagtcctatcctactcctgtcactgtggaaaaggacaggattatcgagattgcagcctgtcactccacacacacgtctgcggccaagacgcagggtgggcacgtgtacatgtggggccagtgccggggtcagtccgtgatcctcccgcacctcacccacttctcctgcactgacgacgtgtttgcctgctttgccacgcccgccgtcacgtggcgcctcctctccgtggaacctgatgaccacctcacagtggctgagtcactgaagagggaatttgacaacccggacactgcagacctgaagtttctagttgatggaaagtacatttatgcacataaagtccttctcaagattcgatgtgagcattttcgttcgtcattggaagataacgaggatgatattgtagaaatgagtgaattttcatatcctgtttaccgggccttcctggaatacctatacacagacagcatcagcctttctcctgaggaggcagtaggactgctagacttggctacattttatagagaaaatcgtttgaaaaagctctgccaacaaactatcaagcaaggcatctgcgaggagaatgccatcgctctgctctcggctgcggtgaagtatgatgcacaggatttagaagaattctgcttcaggttttgcataaaccatctgactgtagtaacacaaacatcaggttttgcagaaatggaccatgatctcctgaagaactttatcagcaaagcaagcagagttggagcctttaaaaattgatcccatctgcaggaaagtttttgagcctttccatttcccctgcaaaagccagagatgaatcacttctctttaattaatagtatgtatgatgagctatgtttggctgagtacttgtaactgtcagaagaaggatggtggtgagtggtctttgtctgcctaaacccagagtttatgtagaaagcattgaatgttctgatcagatgtgactaaggtcaaggaaaaaaaattgaaatatcttatttaccatttcctctttttgagtcacttaaattggacacctttggtaccctggtctcagtatatgctattctggcccaaatgttccattattcagctggctgataccacatagatagcttgacaaggagtgctgtctgtccttaccacattttcagcactcagcacagtgccttgtgtataataggcactcaatttattataaatcttcagtatgtcctgagaacagctttagtcatggaatactgggagaaggaataactttcacaaaataaacttaaaacagcctgtaattattgag

SEQ ID NO: 25801 - DNA, 2656 bp, Homo sapiens
  source 1..2656: mol_type = unassigned DNA
atgcttcaagatggcagctgtaagcaaatgcttctaatgctgctgatagttcagccagtacaggctactctgtcatctttgaagatgttagatgtgggaaagtggccaattttttccctttgttctgaagaagaactacagttaattcgtcaggcttgtgtctttggcagtgctggcaatgaagttttatacactacagtaaatgatgagatttttgtgcttggcacaaactgctgtggctgtttggggttaggtgacgtccagagcaccattgaacctcggagactggattctttaaatggcaaaaaaatagcctgcctcagctatgggagtggtccacatattgtccttgcaacaacagaaggagaagtctttacctggggtcataatgcttatagccagctgggcaatgggacaactaatcatggtttagtgccctgtcatatctctactaatctgtcaaacaaacaagtcattgaagttgcctgtgggtcttaccattctttggtgctaacatctgatggagaggtatttgcctggggttataataactctgggcaggtaggatctggatcaacagttaatcagccaatccctcgaagagtcactggctgcctacaaaataaagtagttgtgaccatagcatgtgggcagatgtgctgcatggcagtagtagacacgggggaggtctatgtctggggttacaacggaaacgggcagcttggactcggcaacagtggcaaccagccaaccccttgcagagtggcagctttgcaaggcatccgtgtccagagggtcgcctgtggctacacacacacgtctgcggccaagacgcagggtgggcacgtgtacatgtggggccagtgccggggtcagtccgtgatcctcccgcacctcacccacttctcctgcactgacgacgtgtttgcctgctttgccacgcccgccgtcacgtggcgcctcctctccgtggaacctgatgaccacctcacagtggctgagtcactgaagagggaatttgacaacccggacactgcagacctgaagtttctagttgatggaaagtacatttatgcacataaagtccttctcaagattcgatgtgagcattttcgttcgtcattggaagataacgaggatgatattgtagaaatgagtgaattttcatatcctgtttaccgggccttcctggaatacctatacacagacagcatcagcctttctcctgaggaggcagtaggactgctagacttggctacattttatagagaaaatcgtttgaaaaagctctgccaacaaactatcaagcaaggcatctgcgaggagaatgccatcgctctgctctcggctgcggtgaagtatgatgcacaggatttagaagaattctgcttcaggttttgcataaaccatctgactgtagtaacacaaacatcaggttttgcagaaatggaccatgatctcctgaagaactttatcagcaaagcaagcagagttggagcctttaaaaattgatcccatctgcaggaaagtttttgagcctttccatttcccctgcaaaagccagagatgaatcacttctctttaattaatagtatgtatgatgagctatgtttggctgagtacttgtaactgtcagaagaaggatggtggtgagtggtctttgtctgcctaaacccagagtttatgtagaaagcattgaatgttctgatcagatgtgactaaggtcaaggaaaaaaaattgaaatatcttatttaccatttcctctttttgagtcacttaaattggacacctttggtaccctggtctcagtatatgctattctggcccaaatgttccattattcagctggctgataccacatagatagcttgacaaggagtgctgtctgtccttaccacattttcagcactcagcacagtgccttgtgtataataggcactcaatttattataaatcttcagtatgtcctgagaacagctttagtcatggaatactgggagaaggaataactttcacaaaataaacttaaaacagcctgtaattattgaggttcatattcttctggtatatcattctgagaaattgtggctaatttagaacattgtttagaattgacaaaaggccctggcaattaaattgtcaaggcccaagggctaattttaattttctttttacttggagtcattcattaatttctcacatgggattatggagtatgaagtattatctttgaatgaaattcctgggctgatctgccttacataatcacataaggtcctttgcttttctttgtgttaagagggacttgcctctgtaaatgaaaatgacaatgtgcttttcttgtagttgactttcatgtcactcactataaaataggtctcttaacctggcaccagtataactataaagcactagctgagaaggaactgatacttacatttcatggacagcattaacaagaatgagataaatttgtactttttagatcaaaacaaattacctaattgcaaaagagaaactgaaatggaacatagtctcagattcttctaatgtgtatctcacaatgtcatgtaatgtaaaggaaacccttttggaattagaattcttgttctgatgctgaactatttggtaataaagtgcttatttgcagataac

SEQ ID NO: 25802 - DNA, 2815 bp, Homo sapiens
  source 1..2815: mol_type = unassigned DNA
ccgtgcagtaaccgctacccaggaggcggagcggacaaggctccggcctgcgaggagccagtacaggctactctgtcatctttgaagatgttagatgtgggaaagtggccaattttttccctttgttctgaagaagaactacagttaattcgtcaggcttgtgtctttggcagtgctggcaatgaagttttatacactacagtaaatgatgagatttttgtgcttggcacaaactgctgtggctgtttggggttaggtgacgtccagagcaccattgaacctcggagactggattctttaaatggcaaaaaaatagcctgcctcagctatgggagtggtccacatattgtccttgcaacaacagaaggagaagtctttacctggggtcataatgcttatagccagctgggcaatgggacaactaatcatggtttagtgccctgtcatatctctactaatctgtcaaacaaacaagtcattgaagttgcctgtgggtcttaccattctttggtgctaacatctgatggagaggtatttgcctggggttataataactctgggcaggtaggatctggatcaacagttaatcagccaatccctcgaagagtcactggctgcctacaaaataaagtagttgtgaccatagcatgtgggcagatgtgctgcatggcagtagtagacacgggggaggtctatgtctggggttacaacggaaacgggcagcttggactcggcaacagtggcaaccagccaaccccttgcagagtggcagctttgcaaggcatccgtgtccagagggtcgcctgtggctacgcacacacattagtattaacagatgaaggccaagtgtatgcttggggcgccaattcttatgggcagttgggcactggcaataaaagcaaccagtcctatcctactcctgtcactgtggaaaaggacaggattatcgagattgcagcctgtcactccacacacacgtctgcggccaagacgcagggtgggcacgtgtacatgtggggccagtgccggggtcagtccgtgatcctcccgcacctcacccacttctcctgcactgacgacgtgtttgcctgctttgccacgcccgccgtcacgtggcgcctcctctccgtggaacctgatgaccacctcacagtggctgagtcactgaagagggaatttgacaacccggacactgcagacctgaagtttctagttgatggaaagtacatttatgcacataaagtccttctcaagattcgatgtgagcattttcgttcgtcattggaagataacgaggatgatattgtagaaatgagtgaattttcatatcctgtttaccgggccttcctggaatacctatacacagacagcatcagcctttctcctgaggaggcagtaggactgctagacttggctacattttatagagaaaatcgtttgaaaaagctctgccaacaaactatcaagcaaggcatctgcgaggagaatgccatcgctctgctctcggctgcggtgaagtatgatgcacaggatttagaagaattctgcttcaggttttgcataaaccatctgactgtagtaacacaaacatcaggttttgcagaaatggaccatgatctcctgaagaactttatcagcaaagcaagcagagttggagcctttaaaaattgatcccatctgcaggaaagtttttgagcctttccatttcccctgcaaaagccagagatgaatcacttctctttaattaatagtatgtatgatgagctatgtttggctgagtacttgtaactgtcagaagaaggatggtggtgagtggtctttgtctgcctaaacccagagtttatgtagaaagcattgaatgttctgatcagatgtgactaaggtcaaggaaaaaaaattgaaatatcttatttaccatttcctctttttgagtcacttaaattggacacctttggtaccctggtctcagtatatgctattctggcccaaatgttccattattcagctggctgataccacatagatagcttgacaaggagtgctgtctgtccttaccacattttcagcactcagcacagtgccttgtgtataataggcactcaatttattataaatcttcagtatgtcctgagaacagctttagtcatggaatactgggagaaggaataactttcacaaaataaacttaaaacagcctgtaattattgaggttcatattcttctggtatatcattctgagaaattgtggctaatttagaacattgtttagaattgacaaaaggccctggcaattaaattgtcaaggcccaagggctaattttaattttctttttacttggagtcattcattaatttctcacatgggattatggagtatgaagtattatctttgaatgaaattcctgggctgatctgccttacataatcacataaggtcctttgcttttctttgtgttaagagggacttgcctctgtaaatgaaaatgacaatgtgcttttcttgtagttgactttcatgtcactcactataaaataggtctcttaacctggcaccagtataactataaagcactagctgagaaggaactgatacttacatttcatggacagcattaacaagaatgagataaatttgtactttttagatcaaaacaaattacctaattgcaaaagagaaactgaaatggaacatagtctcagattcttctaatgtgtatctcacaatgtcatgtaatgtaaaggaaacccttttggaattagaattcttgttctgatgctgaactatttggtaataaagtgcttatttgcagataac

SEQ ID NO: 25803 - DNA, 1316 bp, Homo sapiens
  source 1..1316: mol_type = unassigned DNA
gcagtaaccgctacccaggaggcggagcggacaaggctccggcctgcgaggagccagtacaggctactctgtcatctttgaagatgttagatgtgggaaagtggccaattttttccctttgttctgaagaagaactacagttaattcgtcaggcttgtgtctttggcagtgctggcaatgaagttttatacactacagtaaatgatgagatttttgtgcttggcacaaactgctgtggctgtttggggttaggtgacgtccagagcaccattgaacctcggagactggattctttaaatggcaaaaaaatagcctgcctcagctatgggagtggtccacatattgtccttgcaacaacagttaatcagccaatccctcgaagagtcactggctgcctacaaaataaagtagttgtgaccatagcatgtgggcagatgtgctgcatggcagtagtagacacgggggaggtctatgtctggggttacaacggaaacgggcagcttggactcggcaacagtggcaaccagccaaccccttgcagagtggcagctttgcaaggcatccgtgtccagagggattatcgagattgcagcctgtcactccacacacacgtctgcggccaagacgcagggtgggcacgtgtacatgtggggccagtgccggggtcagtccgtgatcctcccgcacctcacccacttctcctgcactgacgacgtgtttgcctgctttgccacgcccgccgtcacgtggcgcctcctctccgtggaacctgatgaccacctcacagtggctgagtcactgaagagggaatttgacaacccggacactgcagacctgaagtttctagttgatggaaagtacatttatgcacataaagtccttctcaagattcgatgtgagcattttcgttcgtcattggaagataacgaggatgatattgtagaaatgagtgaattttcatatcctgtttaccgggccttcctggaatacctatacacagacagcatcagcctttctcctgaggaggcagtaggactgctagacttggctacattttatagagaaaatcgtttgaaaaagctctgccaacaaactatcaagcaaggcatctgcgaggagaatgccatcgctctgctctcggctgcggtgaagtatgatgcacaggatttagaagaattctgcttcaggttttgcataaaccatctgactgtagtaacacaaacatcaggttttgcagaaatggaccatgatctcctgaagaactttatcagcaaagcaagcagagttggagcctttaaaaattgatcccatctgca

SEQ ID NO: 25804 - DNA, 1062 bp, Homo sapiens
  source 1..1062: mol_type = unassigned DNA
gtaaccgctacccaggaggcggagcggacaaggctccggcctgcgaggagtcacattaactttgctctagaagacaactttacaaggatctaaaaggaacaggattaaagatgactgaatactgggttccagaaatttaaaacaatcagccagtacaggctactctgtcatctttgaagatgttagatgtgggaaagtggccaattttttccctttgttctgaagaagaactacagttaattcgtcaggcttgtgtctttggcagtgctggcaatgaagttttatacactacagtaaatgatgagatttttgtgcttggcacaaactgctgtggctgtttggggttaggtgacgtccagagcaccattgaacctcggagactggattctttaaatggcaaaaaaatagcctgcctcagctatgggagtggtccacatattgtccttgcaacaacagaaggagaagtctttacctggggtcataatgcttatagccagctgggcaatgggacaactaatcatggtttagtgccctgtcatatctctactaatctgtcaaacaaacaagtcattgaagttgcctgtgggtcttaccattctttggtgctaacatctgatggagaggtatttgcctggggttataataactctgggcaggtaggatctggatcaacagttaatcagccaatccctcgaagagtcactggctgcctacaaaataaagtagttgtgaccatagcatgtgggcagatgtgctgcatggcagtagtagacacgggggaggtctatgtctggggttacaacggaaacgggcagcttggactcggcaacagtggcaaccagccaaccccttgcagagtggcagctttgcaaggcatccgtgtccagagggattatcgagattgcagcctgtcactccacacacacgtctgcggccaagacgcagggtgggcacgtgtacatgtggggccagtgccggggtcagtccgtgatcctcccgcacctcacccacttctcctgcactgacgacgtgtttgcctgctttgccacgcccgccgtcacg

SEQ ID NO: 25805 - DNA, 1577 bp, Homo sapiens
  source 1..1577: mol_type = unassigned DNA
ttcgcggcccggcggggagcgccggagttccttgtggccgacgtgcaccaaggacaggaagatgtcacccaagcgcatagctaaaagaaggtcccccccagcagatgccatccccaaaagcaagaaggtgaaggacacgagggccgctgcctcccgccgcgttcctggcgcccgctcctgccaaggtgcctgcgggccgagccctcctgaccagaaaacccgaccagtctcacacaggtcccacagcacagaacccggcttggtgctgacactaggccagggcgacgtgggccagctggggctgggtgagaatgtgatggagaggaagaagccggccctggtatccattccggaggatgttgtgcaggctgaggctgggggcatgcacaccgtgtgtctaagcaaaagtggccaggtctattccttcggctgcaatgatgagggtgccctgggaagggacacatcagtggagggctcggagatggtccctgggaaagtggagctgcaagagaaggtggtacaggtgtcagcaggagacagtcacacagcagccctcaccgatgatggccgtgtcttcctctggggctccttccgggacaataacggtgtgattggactgttggagcccatgaagaagagcatggtgcctgtgcaggtgcagctggatgtgcctgtggtaaaggtggcctcaggaaacgaccacttggtgatgctgacagctgatggtgacctctacaccttgggctgcggggaacagggccagctaggccgtgtgcctgagttatttgccaaccgtggtggccggcaaggcctcgaacgactcctggtccccaagtgtgtgatgctgaaatccaggggaagccggggccacgtgagattccaggatgccttttgtggtgcctatttcacctttgccatctcccatgagggccacgtgtacggcttcggcctctccaactaccatcagcttggaactccgggcacagaatcttgcttcataccccagaacctaacatccttcaagaattccaccaagtcctgggtgggcttctctggtggccagcaccatacagtctgcatggattcggaaggaaaagcatacagcctgggccgggctgagtatgggcggctgggccttggagagggtgctgaggagaagagcatacccaccctcatctccaggctgcctgctgtctcctcggtggcttgtggggcctctgtggggtatgctgtgaccaaggatggtcgtgttttcgcctggggcatgggcaccaactaccagctgggcacagggcaggatgaggacgcctggagccctgtggagatgatgggcaaacagctggagaaccgtgtggtcttatctgtgtccagcgggggccagcatacagtcttattagtcaaggacaaagaacagagctgatgaagcctctgagggcctggcttctgtcctgcacaacctccctcacagaacagggaagcagtgacagctgcagatggcagcgggcctctccccagccctgagcactgtgtcagttcctgccttttctcatcagcagaacagaatccttttcctcttt

SEQ ID NO: 25806 - DNA, 2424 bp, Homo sapiens
  source 1..2424: mol_type = unassigned DNA
ccagcccgggagcgcgccacatgcagatcctgggatggccgccaggggccgccgggctctttgttttcctttctcacccgggtcggggccagaggcctgcagagcgcatgctctggggcagttcgcggcccggcggggagcgccggagttccttgtggccgacgtgcaccaaggacaggaagatgtcacccaagcgcatagctaaaagaaggtcccccccagcagatgccatccccaaaagcaagaaggtgaaggtctcacacaggtcccacagcacagaacccggcttggtgctgacactaggccagggcgacgtgggccagctggggctgggtgagaatgtgatggagaggaagaagccggccctggtatccattccggaggatgttgtgcaggctgaggctgggggcatgcacaccgtgtgtctaagcaaaagtggccaggtctattccttcggctgcaatgatgagggtgccctgggaagggacacatcagtggagggctcggagatggtccctgggaaagtggagctgcaagagaaggtggtacaggtgtcagcaggagacagtcacacagcagccctcaccgatgatggccgtgtcttcctctggggctccttccgggacaataacggtgtgattggactgttggagcccatgaagaagagcatggtgcctgtgcaggtgcagctggatgtgcctgtggtaaaggtggcctcaggaaacgaccacttggtgatgctgacagctgatggtgacctctacaccttgggctgcggggaacagggccagctaggccgtgtgcctgagttatttgccaaccgtggtggccggcaaggcctcgaacgactcctggtccccaagtgtgtgatgctgaaatccaggggaagccggggccacgtgagattccaggatgccttttgtggtgcctatttcacctttgccatctcccatgagggccacgtgtacggcttcggcctctccaactaccatcagcttggaactccgggcacagaatcttgcttcataccccagaacctaacatccttcaagaattccaccaagtcctgggtgggcttctctggtggccagcaccatacagtctgcatggattcggaaggaaaagcatacagcctgggccgggctgagtatgggcggctgggccttggagagggtgctgaggagaagagcatacccaccctcatctccaggctgcctgctgtctcctcggtggcttgtggggcctctgtggggtatgctgtgaccaaggatggtcgtgttttcgcctggggcatgggcaccaactaccagctgggcacagggcaggatgaggacgcctggagccctgtggagatgatgggcaaacagctggagaaccgtgtggtcttatctgtgtccagcgggggccagcatacagtcttattagtcaaggacaaagaacagagctgatgaagcctctgagggcctggcttctgtcctgcacaacctccctcacagaacagggaagcagtgacagctgcagatggcagcgggcctctccccagccctgagcactgtgtcagttcctgccttttctcatcagcagaacagaatccttttcctcttttccttcctcctctttggaattttcctgggacctacagaataaagggggggatggacagggggttttcaaaaggaacatggctcactcagagctatatggttagacgtttctccccttttccctaccttccatggtcctggttggccctggctttgcctactagaaaaccaaaacttcccccctggggttttgtgcccactctctgagaagttggggctccatcaagccccattctagtcatgtgcccctttcctgtccctaacagtccacaggcaaacaaatggtacagtcataagagccatctgtcacggacccacgcccagaggaacgtgcagaaaaaagcagagctacatggctgtgggcaactataagccaaatatttggctcagaacaggtgtccatgggacaaaaaagaacgatcctccacttgaccaagaaaaaagtgattctcccagaagcacaaagcatactcttgcccctcaggtgttgcttgtgtacatcgtacccatccattcggcttcacctgcagccaacggcctggaatcgcaaagagacaccactctgggcagagcagagcagggtatggggtggggagagagggtggagggttttataaacaaacttaacagcaatattgaaaggaggtgggggattgagggagggacagagtgttggagggccagagactagtcctgagatggaaacagcaacttgtacagtggctgagaaaataggatatagttttgatttttttaattgtaaaatattttggagggagaacaaaatcttttaacattttgaataaatttagagttttat

SEQ ID NO: 25807 - DNA, 2534 bp, Homo sapiens
  source 1..2534: mol_type = unassigned DNA
gattcgcagtggtcgcttcttctccttggatttgttaaggattccaagtaactcttatttggagagaagacgatctgcacttcgcattttggcattgacatttaattttagggtcctttatatagaagggagactacatgaatgtgtaagatcttggaggaagacagcagagagagagagagagatcagagatcccagggttaaaagttggagaaatttcacagtacatcatccaaaagaggagtccatgatggaggcagaggtaaacttggagaggacaggaagatgtcacccaagcgcatagctaaaagaaggtcccccccagcagatgccatccccaaaagcaagaaggtgaaggtctcacacaggtcccacagcacagaacccggcttggtgctgacactaggccagggcgacgtgggccagctggggctgggtgagaatgtgatggagaggaagaagccggccctggtatccattccggaggatgttgtgcaggctgaggctgggggcatgcacaccgtgtgtctaagcaaaagtggccaggtctattccttcggctgcaatgatgagggtgccctgggaagggacacatcagtggagggctcggagatggtccctgggaaagtggagctgcaagagaaggtggtacaggtgtcagcaggagacagtcacacagcagccctcaccgatgatggccgtgtcttcctctggggctccttccgggacaataacggtgtgattggactgttggagcccatgaagaagagcatggtgcctgtgcaggtgcagctggatgtgcctgtggtaaaggtggcctcaggaaacgaccacttggtgatgctgacagctgatggtgacctctacaccttgggctgcggggaacagggccagctaggccgtgtgcctgagttatttgccaaccgtggtggccggcaaggcctcgaacgactcctggtccccaagtgtgtgatgctgaaatccaggggaagccggggccacgtgagattccaggatgccttttgtggtgcctatttcacctttgccatctcccatgagggccacgtgtacggcttcggcctctccaactaccatcagcttggaactccgggcacagaatcttgcttcataccccagaacctaacatccttcaagaattccaccaagtcctgggtgggcttctctggtggccagcaccatacagtctgcatggattcggaaggaaaagcatacagcctgggccgggctgagtatgggcggctgggccttggagagggtgctgaggagaagagcatacccaccctcatctccaggctgcctgctgtctcctcggtggcttgtggggcctctgtggggtatgctgtgaccaaggatggtcgtgttttcgcctggggcatgggcaccaactaccagctgggcacagggcaggatgaggacgcctggagccctgtggagatgatgggcaaacagctggagaaccgtgtggtcttatctgtgtccagcgggggccagcatacagtcttattagtcaaggacaaagaacagagctgatgaagcctctgagggcctggcttctgtcctgcacaacctccctcacagaacagggaagcagtgacagctgcagatggcagcgggcctctccccagccctgagcactgtgtcagttcctgccttttctcatcagcagaacagaatccttttcctcttttccttcctcctctttggaattttcctgggacctacagaataaagggggggatggacagggggttttcaaaaggaacatggctcactcagagctatatggttagacgtttctccccttttccctaccttccatggtcctggttggccctggctttgcctactagaaaaccaaaacttcccccctggggttttgtgcccactctctgagaagttggggctccatcaagccccattctagtcatgtgcccctttcctgtccctaacagtccacaggcaaacaaatggtacagtcataagagccatctgtcacggacccacgcccagaggaacgtgcagaaaaaagcagagctacatggctgtgggcaactataagccaaatatttggctcagaacaggtgtccatgggacaaaaaagaacgatcctccacttgaccaagaaaaaagtgattctcccagaagcacaaagcatactcttgcccctcaggtgttgcttgtgtacatcgtacccatccattcggcttcacctgcagccaacggcctggaatcgcaaagagacaccactctgggcagagcagagcagggtatggggtggggagagagggtggagggttttataaacaaacttaacagcaatattgaaaggaggtgggggattgagggagggacagagtgttggagggccagagactagtcctgagatggaaacagcaacttgtacagtggctgagaaaataggatatagttttgatttttttaattgtaaaatattttggagggagaacaaaatcttttaacattttgaataaatttagagttttataaaatag

SEQ ID NO: 25808 - DNA, 2715 bp, Homo sapiens
  source 1..2715: mol_type = unassigned DNA
gattctctaactgcgcatgcttctgcgcacgcgcaatagacattccaggacttccgggcacttcgtaaggtttaaaaaggatgcttcgcgttttctctctcctttttggagacagattcgcagtggtcgcttcttctccttggatttgttaaggattccaagtaactcttatttggagagaagacgatctgcacttcgcattttggcattgacatttaattttagggtcctttatatagaagggagagtaggacaggaagatgtcacccaagcgcatagctaaaagaaggtcccccccagcagatgccatccccaaaagcaagaaggtgaaggtctcacacaggtcccacagcacagaacccggcttggtgctgacactaggccagggcgacgtgggccagctggggctgggtgagaatgtgatggagaggaagaagccggccctggtatccattccggaggatgttgtgcaggctgaggctgggggcatgcacaccgtgtgtctaagcaaaagtggccaggtctattccttcggctgcaatgatgagggtgccctgggaagggacacatcagtggagggctcggagatggtccctgggaaagtggagctgcaagagaaggtggtacaggtgtcagcaggagacagtcacacagcagccctcaccgatgatggccgtgtcttcctctggggctccttccgggacaataacggtgtgattggactgttggagcccatgaagaagagcatggtgcctgtgcaggtgcagctggatgtgcctgtggtaaaggtggcctcaggaaacgaccacttggtgatgctgacagctgatggtgacctctacaccttgggctgcggggaacagggccagctaggccgtgtgcctgagttatttgccaaccgtggtggccggcaaggcctcgaacgactcctggtccccaagtgtgtgatgctgaaatccaggggaagccggggccacgtgagattccaggatgccttttgtggtgcctatttcacctttgccatctcccatgagggccacgtgtacggcttcggcctctccaactaccatcagcttggaactccgggcacagaatcttgcttcataccccagaacctaacatccttcaagaattccaccaagtcctgggtgggcttctctggtggccagcaccatacagtctgcatggattcggaaggaaaagcatacagcctgggccgggctgagtatgggcggctgggccttggagagggtgctgaggagaagagcatacccaccctcatctccaggctgcctgctgtctcctcggtggcttgtggggcctctgtggggtatgctgtgaccaaggatggtcgtgttttcgcctggggcatgggcaccaactaccagctgggcacagggcaggatgaggacgcctggagccctgtggagatgatgggcaaacagctggagaaccgtgtggtcttatctgtgtccagcgggggccagcatacagtcttattagtcaaggacaaagaacagagctgatgaagcctctgagggcctggcttctgtcctgcacaacctccctcacagaacagggaagcagtgacagctgcagatggcagcgggcctctccccagccctgagcactgtgtcagttcctgccttttctcatcagcagaacagaatccttttcctcttttccttcctcctctttggaattttcctgggacctacagaataaagggggggatggacagggggttttcaaaaggaacatggctcactcagagctatatggttagacgtttctccccttttccctaccttccatggtcctggttggccctggctttgcctactagaaaaccaaaacttcccccctggggttttgtgcccactctctgagaagttggggctccatcaagccccattctagtcatgtgcccctttcctgtccctaacagtccacaggcaaacaaatggtacagtcataagagccatctgtcacggacccacgcccagaggaacgtgcagaaaaaagcagagctacatggctgtgggcaactataagccaaatatttggctcagaacaggtgtccatgggacaaaaaagaacgatcctccacttgaccaagaaaaaagtgattctcccagaagcacaaagcatactcttgcccctcaggtgttgcttgtgtacatcgtacccatccattcggcttcacctgcagccaacggcctggaatcgcaaagagacaccactctgggcagagcagagcagggtatggggtggggagagagggtggagggttttataaacaaacttaacagcaatattgaaaggaggtgggggattgagggagggacagagtgttggagggccagagactagtcctgagatggaaacagcaacttgtacagtggctgagaaaataggatatagttttgatttttttaattgtaaaatattttggagggagaacaaaatcttttaacattttgaataaatttagagttttataaaataggccacttgttttctacacattccctgctttttaagggagcacatattatgtgccaggcactgctgggaaagacagaataaactataaacctggtgttgaggctacaacttaagtgatgtcaagatgtcctgaggtgccaaccagctgtcagtgtgactgtaacaaaggcttcaaatctgtcaagaagtaaggaaaagttttgtttg

SEQ ID NO: 25809 - DNA, 903 bp, Homo sapiens
  source 1..903: mol_type = unassigned DNA
ggacttccgggcacttcgtaaggtttaaaaaggatgcttcgcgttttctctctcctttttggagacagattcgcagtggtcgcttcttctccttggatttgttaaggattccaagtaactcttatttggagagaagacgatctgcacttcgcattttggcattgacatttaattttagggtcctttatatagaagggagagtaggacaggaagatgtcacccaagcgcatagctaaaagaaggtcccccccagcagatgccatccccaaaagcaagaaggtgaaggtctcacacaggtcccacagcacagaacccggcttggtgctgacactaggccagggcgacgtgggccagctggggctgggtgagaatgtgatggagaggaagaagccggccctggtatccattccggaggatgttgtgcaggctgaggctgggggcatgcacaccgtgtgtctaagcaaaagtggccaggtctattccttcggctgcaatgatgagggtgccctgggaagggacacatcagtggagggctcggagatggtccctgggaaagtggagctgcaagagaaggtggtacaggtgtcagcaggagacagtcacacagcagccctcaccgatgatggccgtgtcttcctctggggctccttccgggacaataacggtgtgattggactgttggagcccatgaagaagagcatggtgcctgtgcaggtgcagctggatgtgcctgtggtaaaggtggcctcaggaaacgaccacttggtgatgctgacagctgatggtgacctctacaccttgggctgcggggaacagggccagctaggccgtgtgcctgagttatttgccaaccgtggtggccggcaaggcctcgaacgactcctggtccccaagtgtgtgatg

SEQ ID NO: 25810 - DNA, 1121 bp, Homo sapiens
  source 1..1121: mol_type = unassigned DNA
ggcatgcgcttggagaaggcggtttgcagatcggggagggagccctgcccgggagagggtgggtcgtaggagctcgagggtctcccgctgtggacctttgggagccgtgtgtcttgaactccgcagcagctcagtctgtcagcagattatttgctggccatttattgcgtccctctcttgcggggctgggggacagtagtgagaagagcaggcccgtgtcattagcgaactatgcccttgaacccaggcgacggacgctactggacaggaagatgtcacccaagcgcatagctaaaagaaggtcccccccagcagatgccatccccaaaagcaagaaggtgaaggtctcacacaggtcccacagcacagaacccggcttggtgctgacactaggccagggcgacgtgggccagctggggctgggtgagaatgtgatggagaggaagaagccggccctggtatccattccggaggatgttgtgcaggctgaggctgggggcatgcacaccgtgtgtctaagcaaaagtggccaggtctattccttcggctgcaatgatgagggtgccctgggaagggacacatcagtggagggctcggagatggtccctgggaaagtggagctgcaagagaaggtggtacaggtgtcagcaggagacagtcacacagcagccctcaccgatgatggccgtgtcttcctctggggctccttccgggacaataacggtgtgattggactgttggagcccatgaagaagagcatggtgcctgtgcaggtgcagctggatgtgcctgtggtaaaggtggcctcaggaaacgaccacttggtgatgctgacagctgatggtgacctctacaccttgggctgcggggaacagggccagctaggccgtgtgcctgagttatttgccaaccgtggtggccggcaaggcctcgaacgactcctggtccccaagtgtgtgatgctgaaatccaggggaagccggggccacgtgagattccaggatgccttttgtggtgcctatttcacctttgccatctcccatgagggccacgtgtacggcttcggcctctccaactaccatcagcttggaactccgggcacagaatcttgcttcataccc

SEQ ID NO: 25811 - DNA, 2894 bp, Homo sapiens
  source 1..2894: mol_type = unassigned DNA
actagaggtggggttagcgcttggaagcaccgaccaacgtgagcgcaacgcggcagggacacctgaccccggcggcgcccagcccctcggattgccagtcactgctcgctttggggcacggaggtgcccagtcctgcggggcacccgacgtcctgtcgccgacagggtccgggagtcagtatagctgggttctagtcccatcacaggcaaaaactccgcgggagcctggcccgctttttacctgggcctcagtttccccatccgtaaaatagaacgggttggatctcccgagcgctaacattccagaactcggatggggcgaaggggagggagggatgggccacccacacgtgacctccccgcgtggagccccgcctaccactgatccagggggtggcagctccggccgggacgagcggggtgggcgggtcctaggaaaccctacccggccgcccttggcagcgcctaaggcggagcgcgcggctctgcagcctgcttgccccggagttggcacccacggaggatggggaccgcaccctcagcttcgcagggagccaccgtggaggccagggcggtgcagagacacgacgtgtgactcggagtgcgcctggggaggatggacgagggagcgggggaccgctaacggggctccctctgcgcgccccgtccgcagaggcgcacgtcgagggtcccgggcgggctccgtggacgttggcggtagcgccgagcgagtcacggaccatgaagagcgttcgtgccgcgcggcccaaggccgggatgggggttagccacatcctgccgcgctgagggggaggctaacgggcgcgggcggccgggcccagccggagcccaccgcgatggcgagggaggagtgcaaggcgctgctggacgggctcaacaagacgactgcgtgctaccaccacctggtgctgaccgtcggtggctcggcggactcgcagaacctgcggcaggagctgcaaaagacgcgccagaaggcgcaggagctggcggtgtccacctgcgcccggctgactgctgtgctgcgcgaccggggcctggccgccgacgagcgcgccgagttcgagcggctctgggtggccttctcgggctgcctggacctgctggaagcggacatgcgacgcgcgctggagctgggcgccgcgttcccgctgcacgcgccgcggcggccgctggtgcgcacaggtgtggctggcgcctcctccggcgtggcggcgcgcgcgctgagcacccgcagcctgcggctcgaggcggagggcgacttcgacgtcgcggacctgcgggagctggagcgcgaggtccttcaggtgggcgagatgatcgacaacatggagatgaaggtcaacgtgccccgctggaccgtgcaagcccggcaggcggcgggcgccgagctcctgtccacggtcagcgccggcccctcctcggtcgtgtccttgcaggagcgcggggggggttgcgaccccaggaaggccctggccgccatccttttcggcgccgtgctgctggcggctgtggccctagccgtgtgcgtggcgaagctgagctgacggacacccgacggccgcctgctgctgccgctccctcccctgagaaaagactcgggatgggtgtggggtctggcctgtgcaaggggagtggtcctaaaaccccgtgtgtgcatgggtacacgcgcgtttccagtgcacatctgcctgggcaggacacggtttcctcttgctggcccgggaggagttaactttgcgccggccgtcagggcattaccgctaacgtctgcaggagctttattccctattaatagaaaaccgtcacagtgaccctagatccctccgagttaatgagttaacacatgtgctgttggggcgtctttacagggagtccgagttcggtgcccacccctgccagcgtcgccccctttctgcgtgggacagtttgaaaaggtgggtggggtggagtgaagtttggagagggacgctgtttggttctatgtggttggtctgtttcccggacaagaaaaattgcaatcaaatgtcagcagcttttattaccttaatctttcagggcctaaatttaggagagtgtcccgagagcagttcatacaaagggctttctctaagacgcgctacagcccttcctagcagagtttatccattcgtccccaagagcagctagaagagatttgaggtcatgacctcccactgccgctcaggggctgaccctatttaggaaaccaaagagggtgggttgaacctactctcacggacttggatccagtgcgcacacttgcctgcggaaaagggctctccccagccacccggagatgggggtaagaggaagagcagaggcttggggtagggccacctggtgtttaaacaggcactttctccttctctggggcttatttttgttcagaactagaccagagtgtttgaacctcctttgcaggagggctgggaatcctctttagagcacttaatcctatttatcccctggaatgtgcgtgctggccagtaggagggctggctttggcagctccctgacccccgcgctgcccgcccctccggggtaatgtggcattactggcccacagaggttttgagccaatcagctctgagactgggttagaatgtaacagctttaacttgggatttaagaagcttttaaaaggtaataatactctgaaagaaaaatgacgtaaccacagcgtgtactatgaaagctgttattttaataaagaacgctgggccatgaactcatacctgccaatgagtcaaacatagtatctttatgtagatacttagattactaaatatatatttcatctacttctgaagttgatagtcttcccccccccccacttttttcttttttgagacagg

SEQ ID NO: 25812 - DNA, 1405 bp, Homo sapiens
  source 1..1405: mol_type = unassigned DNA
gcctgtctgcattctactatataaagcagcagagacgttgactagcgcatatttgctaagagcaccatgcgcgcagcagccatctccactccaaagttagacaaaatgccaggaatgttcttctctgctaacccaaaggaattgaaaggaaccactcattcacttctagacgacaaaatgcaaaaaaggaggccaaagacttttggaatggatatgaaagcatacctgagatctatgatcccacatctggaatctggaatgaaatcttccaagtccaaggatgtactttctgctgctgaagtaatgcaatggtctcaatctctggaaaaacttcttgccaaccaaactggtcaaaatgtctttggaagtttcctaaagtctgaattcagtgaggagaatattgagttctggctggcttgtgaagactataagaaaacagagtctgatcttttgccctgtaaagcagaagagatatataaagcatttgtgcattcagatgctgctaaacaaatcaatattgacttccgcactcgagaatctacagccaagaagattaaagcaccaacccccacgtgttttgatgaagcacaaaaagtcatatatactcttatggaaaaggactcttatcccaggttcctcaaatcagatatttacttaaatcttctaaatgacctgcaggctaatagcctaaagtgactggtccctggctgaagggaattaacagatagtatcaagcgcagaaggaatgtgccagtatggctccctgggtgaacagcttggccttttttgggtgtcttgacaggccaagaagaacaaatgactcagaatggattaacatgaaagttatccaggcgcagagttgaagaagcataagcaagacaaaaacagagagaccgcagaaggaggaagatactgtggtactgtcataaaaaacagtggagctctgtattagaaagcccctcagaactgggaaggccaggtaactctagttacacagaaactgtgactaaagtctatgaaactgattacaacagactgtaagaatcaaagtcaactgacatctatgctacatattattatatagtttgtactgagctattgaagtcccattaacttaaagtatatgttttcaaattgccattgctactattgcttgtcggtgttattttattttattgtttttgactttggaagagatgaactgtgtatttaacttaagctattgctcttaaaaccagggagtcagaatatatttgtaagttaaatcattggtgctaataataaatgtggattttgtattaaaatatatagaagcaatttctgtttacatgtccttgctacttttaaaaacttgcatttattcctcagattttaaaaataaataaataattcatttaagattctt

SEQ ID NO: 25813 - DNA, 1748 bp, Homo sapiens
  source 1..1748: mol_type = unassigned DNA
tagagacacttcctgtggcagagaaaagaggtagtgagcggtgtttcaggatgtgagggcccgcaggagccgagtcaggctctctccactgcctgcccgccaccgtgcaagctctggccggcgctgcccacagtccccatggtgggcagcccccgcggcggggacccctgatcggcagcggcatgccagggaagcccaagcacctgggcgtccccaacgggcgcatggttctggctgtgtcagatggagagctgagcagcacgacggggccccagggccagggcgagggccgcggcagctctctcagcatccacagcctccccagtggtcccagcagccccttcccaaccttcgtcagcagcaaatctgagagccaccggaagagccttgggagcacggagggtgaaagtgaaagccggccagggaagtactgctgtgtgtacctgcccgatggcacagcctccttggccctggccagacctggcctcaccatccgagacatgctggcagggatctgtgagaaacgaggcctctctctacctgacatcaaggtctacctggtgggcaatgaacagaaggccctggtcctggatcaggactgcaccgtgctggcggatcaggaagtgcggctggaaaacaggatcaccttcgagctggagctgacggcgctggagcgcgtggtacgaatctcagccaagcccaccaagcggctgcaggaggcgctgcagcccattctggagaagcacggcttgagcccgctagaggtggtgctgcaccggccaggcgagaaacagcctctggatctggggaagctagtgagctcggtggcggcccagagactggttttggacactcttccaggtgtgaagatctccaaagcccgtgacaaatctccctgccgcagccagggctgcccacctagaactcaggataaggccacccatccccctccagcgtcccccagttctctggtgaaggtgcccagtagtgccactggaaagcggcagacctgtgacatcgaaggcctggtggagctgctgaaccgggtgcagagcagcggggcccacgaccagaggggccttctgaggaaagaggacctggtacttccagaatttctgcagctgcccgcccaagggcccagctccgaggagaccccaccacagaccaaatcagcagcccagcccatcgggggatccttgaactccaccaccgactcagccctctgacagctacccaacagtccaggacagctgcatggcacccggcgggccgagcatgccatgggtccgctctgcatgccctgtctgtgccatgagtgtccctggccccttcctgccatgggcaggcccgcaggaagagccggtaggggtggaaaggggactcagatgagacacaccccacagctgccaccgccttgtccctcaacaagctcacccccaatcccttgcagccaggccacaatgggggaggtgagtccagccccttggaacaggcttgcccaacatggagggatggcgttggcagtgccagcctccccagcctgtgccaagcttcaacaggggcaagaggaggggccggcccctcctcaggaagctggtatgagtaaggccttgagggtgcaggcaggcagccctgtaccccacccacatagactatactgtacatacagattttgcagtaggcttggggcagctgggtttgtccttgatgtatgatactgttattataataattattattattctgcc

SEQ ID NO: 25814 - DNA, 2415 bp, Homo sapiens
  source 1..2415: mol_type = unassigned DNA
tttctatagagacacttcctgtggcagagaaaagaggtagtgagcggtgtttcaggatgtgagggcccgcaggagccgagtcaggctctctccactgcctgcccgccaccgtgcaagctctggccggcgctgcccacagtccccatggtgggcagcccccgcggcggggacccctgatcggcagcggcatgccagggaagcccaagcacctgggcgtccccaacgggcgcatggttctggctgtgtcagatggagagctgagcagcacgacggggccccagggccagggcgagggccgcggcagctctctcagcatccacagcctccccagtggtcccagcagccccttcccaaccgaggagcagcctgtggccagctgggccctgtccttcgagcggctgttgcaggacccgctgggcctggcttacttcactgagttcctgaagaaggagttcagcgcggaaaacgtgactttctggaaggcctgcgagcgcttccagcagatcccggccagcgatacccagcagctagctcaggaggcccgcaacatctaccaggagttcctgtccagccaggcgctgagcccagtgaacatcgaccgtcaggcctggcttggcgaggaggtgctggccgagccccggccggacatgtttcgggcacagcagcttcagatcttcaacttgatgaagttcgacagctatgcgcgcttcgtcaagtccccgctgtaccgcgagtgcctgctagccgaagccgagggacgccctctgcgggaacctggctcctcgcgcctcggcagccctgacgccacgaggaagaagccgaagctgaagcccgggaagtcgctgccgctgggtgtggaggagttggggcagctgccacccgttgagggtcctgggggccgccctctccgcaagtccttccgccgggagctgggcgggactgcaaacgccgccttgcgccgagagtctcagggctccctcaactcctccgccagcctggaccttggcttcctagccttcgtcagcagcaaatctgagagccaccggaagagccttgggagcacggagggtgaaagtgaaagccggccagggaagtactgctgtgtgtacctgcccgatggcacagcctccttggccctggccagacctggcctcaccatccgagacatgctggcagggatctgtgagaaacgaggcctctctctacctgacatcaaggtctacctggtgggcaatgaacaggccctggtcctggatcaggactgcaccgtgctggcggatcaggaagtgcggctggaaaacaggatcaccttcgagctggagctgacggcgctggagcgcgtggtacgaatctcagccaagcccaccaagcggctgcaggaggcgctgcagcccattctggagaagcacggcttgagcccgctagaggtggtgctgcaccggccaggcgagaaacagcctctggatctggggaagctagtgagctcggtggcggcccagagactggttttggacactcttccaggtgtgaagatctccaaagcccgtgacaaatctccctgccgcagccagggctgcccacctagaactcaggataaggccacccatccccctccagcgtcccccagttctctggtgaaggtgcccagtagtgccactggaaagcggcagacctgtgacatcgaaggcctggtggagctgctgaaccgggtgcagagcagcggggcccacgaccagaggggccttctgaggaaagaggacctggtacttccagaatttctgcagctgcccgcccaagggcccagctccgaggagaccccaccacagaccaaatcagcagcccagcccatcgggggatccttgaactccaccaccgactcagccctctgacagctacccaacagtccaggacagctgcatggcacccggcgggccgagcatgccatgggtccgctctgcatgccctgtctgtgccatgagtgtccctggccccttcctgccatgggcaggcccgcaggaagagccggtaggggtggaaaggggactcagatgagacacaccccacagctgccaccgccttgtccctcaacaagctcacccccaatcccttgcagccaggccacaatgggggaggtgagtccagccccttggaacaggcttgcccaacatggagggatggcgttggcagtgccagcctccccagcctgtgccaagcttcaacaggggcaagaggaggggccggcccctcctcaggaagctggtatgagtaaggccttgagggtgcaggcaggcagccctgtaccccacccacatagactatactgtacatacagattttgcagtaggcttggggcagctgggtttgtccttgatgtatgatactgttattataataattattattattctgccatga

SEQ ID NO: 25815 - DNA, 1536 bp, Homo sapiens
  source 1..1536: mol_type = unassigned DNA
tgagcccagtgaacatcgaccgtcaggcctggcttggcgaggaggtgctggccgagccccggccggacatgtttcgggcacagcagcttcagatcttcaacttgatgaagttcgacagctatgcgcgcttcgtcaagtccccgctgtaccgcgagtgcctgctagccgaagccgagggacgccctctgcgggaacctggctcctcgcgcctcggcagccctgacgccacgaggaagaagccgaagctgaagcccgggaagtcgctgccgctgggtgtggaggagttggggcagctgccacccgttgagggtcctgggggccgccctctccgcaagtccttccgccgggagctgggcgggactgcaaacgccgccttgcgccgagagtctcagggctccctcaactcctccgccagcctggaccttggcttcctagccttcgtcagcagcaaatctgagagccaccggaagagccttgggagcacggagggtgaaagtgaaagccggccagggaagtactgctgtgtgtacctgcccgatggcacagcctccttggccctggccagacctggcctcaccatccgagacatgctggcagggatctgtgagaaacgaggcctctctctacctgacatcaaggtctacctggtgggcaatgaacagaaggccctggtcctggatcaggactgcaccgtgctggcggatcaggaagtgcggctggaaaacaggatcaccttcgagctggagctgacggcgctggagcgcgtggtacgaatctcagccaagcccaccaagcggctgcaggaggcgctgcagcccattctggagaagcacggcttgagcccgctagaggtggtgctgcaccggccaggcgagaaacagcctctggatctggggaagctagtgagctcggtggcggcccagagactggttttggacactcttccaggtgtgaagatctccaaagcccgtgacaaatctccctgccgcagccagggctgcccacctagaactcaggataaggccacccatccccctccagcgtcccccagttctctggtgaaggtgcccagtagtgccactggaaagcggcagacctgtgacatcgaaggcctggtggagctgctgaaccgggtgcagagcagcggggcccacgaccagaggggccttctgaggaaagaggacctggtacttccagaatttctgcagctgcccgcccaagggcccagctccgaggagaccccaccacagaccaaatcagcagcccagcccatcgggggatccttgaactccaccaccgactcagccctctgacagctacccaacagtccaggacagctgcatggcacccggcgggccgagcatgccatgggtccgctctgcatgccctgtctgtgccatgagtgtccctggccccttcctgccatgggcaggcccgcaggaagagccggtaggggtggaaaggggactcagatgagacacaccccacagctgccaccgccttgtccctcaacaagctcacccccaatcccttgca

SEQ ID NO: 25816 - DNA, 2427 bp, Homo sapiens
  source 1..2427: mol_type = unassigned DNA
gcggccgctcagtctgggcgcttgcaggctgctaaacccaaccgcagttgactagcacctgctaccgcgcctttgcttcctggcgcacgcggagcctcctggagcctgccaccatcctgcctactacgtgctgccctgcgcccgcagccatgtgccgcaccctggccgccttccccaccacctgcctggagagagccaaagagttcaagacacgtctggggatctttcttcacaaatcagagctgggctgcgatactgggagtactggcaagttcgagtggggcagtaaacacagcaaagagaatagaaacttctcagaagatgtgctggggtggagagagtcgttcgacctgctgctgagcagtaaaaatggagtggctgccttccacgctttcctgaagacagagttcagtgaggagaacctggagttctggctggcctgtgaggagttcaagaagatccgatcagctaccaagctggcctccagggcacaccagatctttgaggagttcatttgcagtgaggcccctaaagaggtcaacattgaccatgagacccacgagctgacgaggatgaacctgcagactgccacagccacatgctttgatgcggctcaggggaagacacgtaccctgatggagaaggactcctacccacgcttcctgaagtcgcctgcttaccgggacctggctgcccaagcctcagccgcctctgccactctgtccagctgcagcctggacgagccctcacacacctgagtctccacggcagtgaggaagccagccgggaagagaggttgagtcacccatccccgaggtggctgcccctgtgtgggaggcaggttctgcaaagcaagtgcaagaggacaaaaaaaaaaaaaaaaaaaaaaaaaatgcgctccagcagcctgtttgggaagcagcagtctctccttcagatactgtgggactcatgctggagaggagccgcccacttccaggacctgtgaataagggctaatgatgagggttggtggggctctctgtggggcaaaaaggtggtatgggggttagcactggctctcgttctcaccggagaaggaagtgttctagtgtggtttaggaaacatgtggataaagggaaccatgaaaatgagaggaggaaagacatccagatcagctgttttgcctgttgctcagttgactctgattgcatcctgttttcctaattcccagactgttctgggcacggaagggaccctggatgtggagtcttcccctttggccctcctcactggcctctgggctagcccagagtcccttagcttgtacctcgtaacactcctgtgtgtctgtccagccttgcagtcatgtcaaggccagcaagctgatgtgactcttgccccatgcgagatatttatacctcaaacactggcctgtgagccctttccaagtcagtggagagccctgaaaggaggctcacttgaatccagctcagtgctctgggtggccccctgcaggtggcccctgaccctgcgttgcagcagggtccacctgtgagcaggcccgccctggggcctcttcctggatgtgccctctctgagttctgtgctgtctcttggaggcagggcccaggagaacaaagtgtggaggcctcggggagtggcttttccagctctcatgccccgcagtgtggaacaaggcagaaaaggatcctaggaaataagtctcttggcggtccctgagagtcctgctgaaatccagccagtgttttttgtggtatgagaacaggcaaaaagagatgccccgagatagaaggggagccttgtgtttctttcctgcagacgtgagatgaacactggagtgggcagaggtggcccaggaccatggcacccttagagtgcagaagctggggggagaggctgcttcgaagggcaggactggggataatcagaacctgcctgtcacctcagggcatcactgaacaaacatttcctgatggcaactcctgcggcagagcccaggctggggaagtgaactacccagggcagcccctttgtggcccaggataatcaacactgttctctctgtaccatgagctcctccaggagattatttaagtgtattgtatcattggttttctgtgattgtcataacattgtttttgttattgttggtgctgttgttatttattattgtaatttcagtttgcctctactggagaatctcagcaggggtttcagcctgactgtctccctttctctaccagactctacctctgaatgtgctgggaacctcttggagcctgtcaggaactcctcactgtttaaatatttatttattgtgacaaatggagctggtttcctagatatgaatgatgtttgcaatccccattttcctgtttcagcatgttatattcttataaaataaaagcaaaagtcaaatatga

SEQ ID NO: 25817 - DNA, 1794 bp, Homo sapiens
  source 1..1794: mol_type = unassigned DNA
gttaccacttggaaaacaattcatctgaaagaagcacagattttctcatctatcctgtcaacaaagaaggaatcaagagagcaaggacagtgatttcccctgcattgcatttgtcttgaagatcagtcagaaagagaaactcggcatcatctgtgacagacagtggaacgaaaaatgccagtgaaatgctgtttctacaggtcaccaactgcggaaacaatgacatggtctgaaaatatggacacgcttttagccaaccaagctggtctagatgcttttcgaatatttctaaaatcagagtttagtgaagaaaatgttgagttctggcttgcctgtgaagactttaagaaaacgaaaaatgcagacaaaattgcttccaaagccaagatgatttattctgaattcattgaagctgatgcacctaaagagattaacattgacttcggtaccagagacctcatctcaaagaatattgctgaaccaacactcaaatgctttgatgaggctcagaaattaatctattgtctcatggccaaggattctttccctcgatttctgaagtcagagatttataaaaaactggtaaatagccaacaggttccaaatcataaaaaatggctcccttttttgtgaggaaggtaaaagttaactaatcactatacttcagggctacaatattttaaatatacaagcatgatgcattgtcttttgttttgtttttaggatttagaaaacattttttacccaaacagatgaataacgttttatacaacaagcctgaatttctaactcagttgtttagaatgtatttgctttaccagctatttaatctcctactgggggagtacaaagaaagtttatagagatacaatatagtcttaaaccaaaactgaatattcttattatattataatgtaaggaattatacatatcttcacgtggcagaatgaaagacttttgagcatcatatacacaattttaaataccattgctttattcaaaaaaatctcacttttgtaaaaagagaatttctgaaccaaaatacaagctttcatttaatatatttaactgttttttttctgccatttctttccaactatttctaataatgtggttatgaaaactgctacgcctctcaaattatattttttaaatcacaggaatgtatacacatttatatgtatgtcttgaatgcaccatggaccaaagtttttcaaaatatatcacttggctcaattcaatggcatcacatataaaatgtgatgagttatgtatgaaaaggcctcaagggtggggaatactgattttcttatgttaacagaaatataaaagaaagtggaagactaaggagcatagataaatccttataagatgaagtatatagcaagtcataaaatttaagaatttgcaacattatctactcaattgtggggaagtatctattcactccttcagcactgatacttgtttataaaacccaaacaatttttaaatgcatttattttgagatgttcctaaaattgtttcattctatatgtaaatatcctgtgataaatacgaataatttcatttcaatatgagaagctgtaaagattcaacagatctcccacgtttccattttctttgcacagatttatttatctgcattgatatttctgcttttagattgtttgaacattaaaaaatggaggaaaaatagcatggcttattttatgttttcacaaactactcatttgatagacaaaattttgtcttcccttcatcatgagaaataaacatttaaacatattcaaa

SEQ ID NO: 25818 - DNA, 2542 bp, Homo sapiens
  source 1..2542: mol_type = unassigned DNA
ctccggttactggggagcaacacagccgcctcgggttgcagacgctcctgtccgggtcgcagtgggacgccatggagcgctccctgcaccgcgtctccctcgggagccggcgtgcccacccggacttgtccttctacctcaccacctttggtcagctgaggctgtccattgatgcccaggaccgggttctgctgcttcacattatagaaggtaaaggcctgatcagcaaacagcctggcacctgtgatccgtatgtgaagatttctttgatccctgaagatagtagactacgccaccagaagacgcagaccgttccagactgcagagacccggctttccacgagcacttcttctttcctgtccaagaggaggatgatcagaagcgtctcttggttactgtgtggaacagggccagccagtccagacagagtggactcattggctgcatgagctttggggtgaagtctctcctgactccagacaaggagatcagtggttggtactacctcctaggggagcacctgggccggaccaagcacttgaaggtggccaggcggcgactgcggccgctgagagacccgctgctgagaatgccaggaggtggggacactgagaatgggaagaaactaaagatcaccatcccgaggggaaaggacggctttggcttcaccatctgctgcgactctccagttcgagtccaggccgtggattccgggggtccggcggaacgggcagggctgcagcagctggacacggtgctgcagctgaatgagaggcctgtggagcactggaaatgtgtggagctggcccacgagatccggagctgccccagtgagatcatcctactcgtgtggcgcatggtcccccaggtcaagccaggaccagatggcggggtcctgcggcgggcctcctgcaagtcgacacatgacctccagtcaccccccaacaaacgggagaagaactgcacccatggggtccaggcacggcctgagcagcgccacagctgccacctggtatgtgacagctctgatgggctgctgctcggcggctgggagcgctacaccgaggtggccaagcgcgggggccagcacaccctgcctgcactgtcccgtgccactgcccccaccgaccccaactacatcatcctggccccgctgaatcctgggagccagctgctccggcctgtgtaccaggaggataccatccccgaagaatcagggagtcccagtaaagggaagtcctacacaggcctggggaagaagtcccggctgatgaagacagtgcagaccatgaagggccacgggaactaccaaaactgcccggttgtgaggccgcatgccacgcactcaagctatggcacctacgtcaccctggcccccaaagtcctggtgttccctgtctttgttcagcctctagatctctgtaatcctgcccggaccctcctgctgtcagaggagctgctgctgtatgaagggaggaacaaggctgccgaggtgacactgtttgcctattcggacctgctgctcttcaccaaggaggacgagcctggccgctgcgacgtcctgaggaaccccctctacctccagagtgtgaagctgcaggaaggttcttcagaagacctgaaattctgcgtgctctatctagcagagaaggcagagtgcttattcactttggaagcgcactcgcaggagcagaagaagagagtgtgctggtgcctgtcggagaacatcgccaagcagcaacagctggcagcatcacccccggacagcaagaaactccaccctttcggctctctccagcaggagatggggccggtcaactcaaccaatgccacccaggatagaagctttacctcaccaggacagactctgattggctgagcaaacccaagggcgggactctgcttctggcaacttaaccctttcttgggcatcccctaccacacagtaacctcacctcaactggacctgaaacagaggaccaagatggtgggtctagggtcatctgaagggagtggtcccaagggtgcatgtggatgtcaacagaaggaccacaatggtgtgagaggccttgtgggcatgcagagactggcagcagaaagtcccaagaggagaggactcagaggcttcttccttccaaggaggaggaggaggaggacattccacatctgggcttccagtggtggctcccggacctgccttgggggcagcaggagaggttgggagaggtcaccctgatgaagaacaatgccatgatctgctgctgccagaggacatctccgcccatccactcattttccacctgtacacattggctcattcattcgatggatatttcgggtgcatctactttatgccaggctctatgctaggagctggggatactgtggagaaaaagtcggatatggtctcgctctcatcaagatttcagtctagctgggagtgagcgttaaataagtcaataccaacacacacacgtgcacacacgtgatggcaagctgtgatcatctatgaaagaaaaaacacagatttctttaagaggg

SEQ ID NO: 25819 - DNA, 1582 bp, Homo sapiens
  source 1..1582: mol_type = unassigned DNA
ggatggacgcctctcccccggagcagcactttggggccagcttgggccctggggatgagccacaggggacccacagcctatgcgtgtgagcatgtaacccgggagccagctgggcccctcgcggggtgggcagaaggacgggctggcccaggaccctcttctttgagacatcccggactccatctcggatgaaagtgctttgagaaaccacagagttttctgtttaatggaagaaagaaatccagcctctctccagagtggcggtggccggctagacaggagccaaggacatgaagaacaagctggggatcttcagacggcggaatgagtcccctggagcccctcccgcgggcaaggcagacaaaatgatgaagtcattcaagcccacctcagaggaagccctcaagtggggcgagtccttggagaagctgctggttcacaaatacgggttagcagtgttccaagccttccttcgcactgagttcagtgaggagaatctggagttctggttggcttgtgaggacttcaagaaggtcaagtcacagtccaagatggcatccaaggccaagaagatctttgctgaatacatcgcgatccaggcatgcaaggaggtcaacctggactcctacacgcgggagcacaccaaggacaacctgcagagcgtcacgcggggctgcttcgacctggcacagaagcgcatcttcgggctcatggaaaaggactcgtaccctcgctttctccgttctgacctctacctggaccttattaaccagaagaagatgagtcccccgctttaggggccactggagtcgagctcagcgttcacaccaggcgggctgggtcccctgcccacctgcctccctgccccctgtgacggagggggcaagcaagcccccagaggctgtgtctctggacagacggatagacatacggaagcgaggcctggaccaagagaggcccaggctactggaggagtagaaggatgggccccgtggggtccccactgccccggtacgagggggcccaagaccctggcaggtcaggggccctggccaagccagatctggagctgctgctccctgctgcggagaccgcggaggcttcgcgttgaccaagttccttaaagaactggctgatggggcaggaggtccaggcctgggctctcgggccctcctagagggccattggagcttgcagctcagacccccactttgagttttatttatttaaatagtagttggatgcttggcacgtcgtcctgtaataggaaacccttgcctcatcagttttcctgatttacaagtgcaatattttagccaatgccttgggagaagctgccatgcaaaggtggacaccattctccagcttcaggggatatgctcgtcccgggcaccggtggcaggcagctggccttctggactaaggcagcctggggggacactgcagtctggctacacacagagatctggcaccccctgggtggagtgtccctcgggggctttgggaaagcatggcaccctcagaccacacagtagccaagttctggagcaaataaaaggcctgtgttatttcttgttcttga

SEQ ID NO: 25820 - DNA, 3689 bp, Homo sapiens
  source 1..3689: mol_type = unassigned DNA
ttggggaggtgagaggtgatttcctgccattcttctgtggggcgggcttcccagggtgctcatgccaggctgacgggtccagtgcgggctcccgctgctgggggagagctgggttttcatggggcggcagccgaggcaggacccgcagccatgaaccgcttcaatgggctctgcaaggtgtgctcggagcgccgctaccgccagatcaccatcccgaggggaaaggacggctttggcttcaccatctgctgcgactctccagttcgagtccaggccgtggattccgggggtccggcggaacgggcagggctgcagcagctggacacggtgctgcagctgaatgagaggcctgtggagcactggaaatgtgtggagctggcccacgagatccggagctgccccagtgagatcatcctactcgtgtggcgcatggtcccccaggtcaagccaggaccagatggcggggtcctgcggcgggcctcctgcaagtcgacacatgacctccagtcaccccccaacaaacgggagaagaactgcacccatggggtccaggcacggcctgagcagcgccacagctgccacctggtatgtgacagctctgatgggctgctgctcggcggctgggagcgctacaccgaggtggccaagcgcgggggccagcacaccctgcctgcactgtcccgtgccactgcccccaccgaccccaactacatcatcctggccccgctgaatcctgggagccagctgctccggcctgtgtaccaggaggataccatccccgaagaatcagggagtcccagtaaagggaagtcctacacaggcctggggaagaagtcccggctgatgaagacagtgcagaccatgaagggccacgggaactaccaaaactgcccggttgtgaggccgcatgccacgcactcaagctatggcacctacgtcaccctggcccccaaagtcctggtgttccctgtctttgttcagcctctagatctctgtaatcctgcccggaccctcctgctgtcagaggagctgctgctgtatgaagggaggaacaaggctgccgaggtgacactgtttgcctattcggacctgctgctcttcaccaaggaggacgagcctggccgctgcgacgtcctgaggaaccccctctacctccagagtgtgaagctgcaggaaggttcttcagaagacctgaaattctgcgtgctctatctagcagagaaggcagagtgcttattcactttggaagcgcactcgcaggagcagaagaagagagtgtgctggtgcctgtcggagaacatcgccaagcagcaacagctggcagcatcacccccggacagcaagatgtttgagacggaggcagatgagaagagggagatggccttggaggaagggaaggggcctggtgccgaggattccccacccagcaaggagccctctcctggccaggagcttcctccaggacaagaccttccacccaacaaggactccccttctgggcaggaacccgctcccagccaagaaccactgtccagcaaagactcagctacctctgaaggatcccctccaggcccagatgctccgcccagcaaggatgtgccaccatgccaggaaccccctccagcccaagacctctcaccctgccaggacctacctgctggtcaagaacccctgcctcaccaggaccctctactcaccaaagacctccctgccatccaggaatcccccacccgggaccttccaccctgtcaagatctgcctcctagccaggtctccctgccagccaaggcccttactgaggacaccatgagctccggggacctactagcagctactggggacccacctgcggcccccaggccagccttcgtgatccctgaggtccggctggatagcacctacagccagaaggcaggggcagagcagggctgctcgggagatgaggaggatgcagaagaggccgaggaggtggaggagggggaggaaggggaggaggacgaggatgaggacaccagcgatgacaactacggagagcgcagtgaggccaagcgcagcagcatgatcgagacgggccagggggctgagggtggcctctcactgcgtgtgcagaactcgctgcggcgccggacgcacagcgagggcagcctgctgcaggagccccgagggccctgctttgcctccgacaccaccttgcactgctcagacggtgagggcgccgcctccacctggggcatgccttcgcccagcaccctcaagaaagagctgggccgcaatggtggctccatgcaccacctttccctcttcttcacaggacacaggaagatgagcggggctgacaccgttggggatgatgacgaagcctcccggaagagaaagagcaaaaacctagccaaggacatgaagaacaagctggggatcttcagacggcggaatgagtcccctggagcccctcccgcgggcaaggcagacaaaatgatgaagtcattcaagcccacctcagaggaagccctcaagtggggcgagtccttggagaagctgctggttcacaaatacgggttagcagtgttccaagccttccttcgcactgagttcagtgaggagaatctggagttctggttggcttgtgaggacttcaagaaggtcaagtcacagtccaagatggcatccaaggccaagaagatctttgctgaatacatcgcgatccaggcatgcaaggaggtcaacctggactcctacacgcgggagcacaccaaggacaacctgcagagcgtcacgcggggctgcttcgacctggcacagaagcgcatcttcgggctcatggaaaaggactcgtaccctcgctttctccgttctgacctctacctggaccttattaaccagaagaagatgagtcccccgctttaggggccactggagtcgagctcagcgttcacaccaggcgggctgggtcccctgcccacctgcctccctgccccctgtgacggagggggcaagcaagcccccagaggctgtgtctctggacagacggatagacatacggaagcgaggcctggaccaagagaggcccaggctactggaggagtagaaggatgggccccgtggggtccccactgccccggtacgagggggcccaagaccctggcaggtcaggggccctggccaagccagatctggagctgctgctccctgctgcggagaccgcggaggcttcgcgttgaccaagttccttaaagaactggctgatggggcaggaggtccaggcctgggctctcgggccctcctagagggccattggagcttgcagctcagacccccactttgagttttatttatttaaatagtagttggatgcttggcacgtcgtcctgtaataggaaacccttgcctcatcagttttcctgatttacaagtgcaatattttagccaatgccttgggagaagctgccatgcaaaggtggacaccattctccagcttcaggggatatgctcgtcccgggcaccggtggcaggcagctggccttctggactaaggcagcctggggggacactgcagtctggctacacacagagatctggcaccccctgggtggagtgtccctcgggggctttgggaaagcatggcaccctcagaccacacagtagccaagttctggagcaaataaaaggcctgtgttatttcttgttcttga

SEQ ID NO: 25821 - DNA, 4398 bp, Homo sapiens
  source 1..4398: mol_type = unassigned DNA
gccaggcgcagtggctcatgcctgtaatcccagcactttgggaggttgagatgggcagatcgcaaggtcaggagatcgagaccatcctggctaacaggtcacattcagacagcacacctttgcccaattttctttctggatctcaccgtcctgagtgttgtacctgcaggttgctcacagcctctggagcccaagatagtctcccctttgggaggaggctctacagtggtccctggcgaagttgtgaagaggtctgccacgtctctgtgctcagtgtcctctctacatcctgtggcttgagcctgagcttgcccatattccctggctggatggagtggctaagccctgatatcgctctgcccagaagagatgagtggactcaaacttctccagccaggaagaggatcacgcatgccaaagtccagggtgcaggtcagctgaggctgtccattgatgcccaggaccgggttctgctgcttcacattatagaaggtaaaggcctgatcagcaaacagcctggcacctgtgatccgtatgtgaagatttctttgatccctgaagatagtagactacgccaccagaagacgcagaccgttccagactgcagagacccggctttccacgagcacttcttctttcctgtccaagaggaggatgatcagaagcgtctcttggttactgtgtggaacagggccagccagtccagacagagtggactcattggctgcatgagctttggggtgaagtctctcctgactccagacaaggagatcagtggttggtactacctcctaggggagcacctgggccggaccaagcacttgaaggtggccaggcggcgactgcggccgctgagagacccgctgctgagaatgccaggaggtggggacactgagaatgggaagaaactaaagatcaccatcccgaggggaaaggacggctttggcttcaccatctgctgcgactctccagttcgagtccaggccgtggattccgggggtccggcggaacgggcagggctgcagcagctggacacggtgctgcagctgaatgagaggcctgtggagcactggaaatgtgtggagctggcccacgagatccggagctgccccagtgagatcatcctactcgtgtggcgcatggtcccccaggtcaagccaggaccagatggcggggtcctgcggcgggcctcctgcaagtcgacacatgacctccagtcaccccccaacaaacgggagaagaactgcacccatggggtccaggcacggcctgagcagcgccacagctgccacctggtatgtgacagctctgatgggctgctgctcggcggctgggagcgctacaccgaggtggccaagcgcgggggccagcacaccctgcctgcactgtcccgtgccactgcccccaccgaccccaactacatcatcctggccccgctgaatcctgggagccagctgctccggcctgtgtaccaggaggataccatccccgaagaatcagggagtcccagtaaagggaagtcctacacaggcctggggaagaagtcccggctgatgaagacagtgcagaccatgaagggccacgggaactaccaaaactgcccggttgtgaggccgcatgccacgcactcaagctatggcacctacgtcaccctggcccccaaagtcctggtgttccctgtctttgttcagcctctagatctctgtaatcctgcccggaccctcctgctgtcagaggagctgctgctgtatgaagggaggaacaaggctgccgaggtgacactgtttgcctattcggacctgctgctcttcaccaaggaggacgagcctggccgctgcgacgtcctgaggaaccccctctacctccagagtgtgaagctgcaggaaggttcttcagaagacctgaaattctgcgtgctctatctagcagagaaggcagagtgcttattcactttggaagcgcactcgcaggagcagaagaagagagtgtgctggtgcctgtcggagaacatcgccaagcagcaacagctggcagcatcacccccggacagcaagatgtttgagacggaggcagatgagaagagggagatggccttggaggaagggaaggggcctggtgccgaggattccccacccagcaaggagccctctcctggccaggagcttcctccaggacaagaccttccacccaacaaggactccccttctgggcaggaacccgctcccagccaagaaccactgtccagcaaagactcagctacctctgaaggatcccctccaggcccagatgctccgcccagcaaggatgtgccaccatgccaggaaccccctccagcccaagacctctcaccctgccaggacctacctgctggtcaagaacccctgcctcaccaggaccctctactcaccaaagacctccctgccatccaggaatcccccacccgggaccttccaccctgtcaagatctgcctcctagccaggtctccctgccagccaaggcccttactgaggacaccatgagctccggggacctactagcagctactggggacccacctgcggcccccaggccagccttcgtgatccctgaggtccggctggatagcacctacagccagaaggcaggggcagagcagggctgctcgggagatgaggaggatgcagaagaggccgaggaggtggaggagggggaggaaggggaggaggacgaggatgaggacaccagcgatgacaactacggagagcgcagtgaggccaagcgcagcagcatgatcgagacgggccagggggctgagggtggcctctcactgcgtgtgcagaactcgctgcggcgccggacgcacagcgagggcagcctgctgcaggagccccgagggccctgctttgcctccgacaccaccttgcactgctcagacggtgagggcgccgcctccacctggggcatgccttcgcccagcaccctcaagaaagagctgggccgcaatggtggctccatgcaccacctttccctcttcttcacaggacacaggaagatgagcggggctgacaccgttggggatgatgacgaagcctcccggaagagaaagagcaaaaacctagccaaggacatgaagaacaagctggggatcttcagacggcggaatgagtcccctggagcccctcccgcgggcaaggcagacaaaatgatgaagtcattcaagcccacctcagaggaagccctcaagtggggcgagtccttggagaagctgctggttcacaaatacgggttagcagtgttccaagccttccttcgcactgagttcagtgaggagaatctggagttctggttggcttgtgaggacttcaagaaggtcaagtcacagtccaagatggcatccaaggccaagaagatctttgctgaatacatcgcgatccaggcatgcaaggaggtcaacctggactcctacacgcgggagcacaccaaggacaacctgcagagcgtcacgcggggctgcttcgacctggcacagaagcgcatcttcgggctcatggaaaaggactcgtaccctcgctttctccgttctgacctctacctggaccttattaaccagaagaagatgagtcccccgctttaggggccactggagtcgagctcagcgttcacaccaggcgggctgggtcccctgcccacctgcctccctgccccctgtgacggagggggcaagcaagcccccagaggctgtgtctctggacagacggatagacatacggaagcgaggcctggaccaagagaggcccaggctactggaggagtagaaggatgggccccgtggggtccccactgccccggtacgagggggcccaagaccctggcaggtcaggggccctggccaagccagatctggagctgctgctccctgctgcggagaccgcggaggcttcgcgttgaccaagttccttaaagaactggctgatggggcaggaggtccaggcctgggctctcgggccctcctagagggccattggagcttgcagctcagacccccactttgagttttatttatttaaatagtagttggatgcttggcacgtcgtcctgtaataggaaacccttgcctcatcagttttcctgatttacaagtgcaatattttagccaatgccttgggagaagctgccatgcaaaggtggacaccattctccagcttcaggggatatgctcgtcccgggcaccggtggcaggcagctggccttctggactaaggcagcctggggggacactgcagtctggctacacacagagatctggcaccccctgggtggagtgtccctcgggggctttgggaaagcatggcaccctcagaccacacagtagccaagttctggagcaaataaaaggcctgtgttatttcttgttcttg

SEQ ID NO: 25822 - DNA, 2862 bp, Homo sapiens
  source 1..2862: mol_type = unassigned DNA
ttctcggctgatctctctgggtaggtgccctctgggggcagtacccctgcctgagtggcacttcccctcctggctttgtttggtttggcctcgatttagaacagggttggcagaggcaggctgacttgcatttctggttttgggtttgttgctgcactttccccaaggggtgggcgggctctgactgacagtcaccactgggacaggcctgggccccaccctcaccacccaggaaaggggaaatgcggcccgctccccactcagtgccactctgtgccactccgtgccaggccctgagggcacccggttgctgcttccttccgtctttccccaaggactatcagagatgccagcgtgacccctgacacgtgtgtgcagcagcctgcagctgccccaagccatggctgaacactgactcccagctgtggggcttcaccattacagactccccagggcttcaaagacttctcagcttcgagcatggcttttggctgtcagggcagctgtacaatagtggatgtttgagacggaggcagatgagaagagggagatggccttggaggaagggaaggggcctggtgccgaggattccccacccagcaaggagccctctcctggccaggagcttcctccaggacaagaccttccacccaacaaggactccccttctgggcaggaacccgctcccagccaagaaccactgtccagcaaagactcagctacctctgaaggatcccctccaggcccagatgctccgcccagcaaggatgtgccaccatgccaggaaccccctccagcccaagacctctcaccctgccaggacctacctgctggtcaagaacccctgcctcaccaggaccctctactcaccaaagacctccctgccatccaggaatcccccacccgggaccttccaccctgtcaagatctgcctcctagccaggtctccctgccagccaaggcccttactgaggacaccatgagctccggggacctactagcagctactggggacccacctgcggcccccaggccagccttcgtgatccctgaggtccggctggatagcacctacagccagaaggcaggggcagagcagggctgctcgggagatgaggaggatgcagaagaggccgaggaggtggaggagggggaggaaggggaggaggacgaggatgaggacaccagcgatgacaactacggagagcgcagtgaggccaagcgcagcagcatgatcgagacgggccagggggctgagggtggcctctcactgcgtgtgcagaactcgctgcggcgccggacgcacagcgagggcagcctgctgcaggagccccgagggccctgctttgcctccgacaccaccttgcactgctcagacggtgagggcgccgcctccacctggggcatgccttcgcccagcaccctcaagaaagagctgggccgcaatggtggctccatgcaccacctttccctcttcttcacaggacacaggaagatgagcggggctgacaccgttggggatgatgacgaagcctcccggaagagaaagagcaaaaacctagccaaggacatgaagaacaagctggggatcttcagacggcggaatgagtcccctggagcccctcccgcgggcaaggcagacaaaatgatgaagtcattcaagcccacctcagaggaagccctcaagtggggcgagtccttggagaagctgctggttcacaaatacgggttagcagtgttccaagccttccttcgcactgagttcagtgaggagaatctggagttctggttggcttgtgaggacttcaagaaggtcaagtcacagtccaagatggcatccaaggccaagaagatctttgctgaatacatcgcgatccaggcatgcaaggaggtcaacctggactcctacacgcgggagcacaccaaggacaacctgcagagcgtcacgcggggctgcttcgacctggcacagaagcgcatcttcgggctcatggaaaaggactcgtaccctcgctttctccgttctgacctctacctggaccttattaaccagaagaagatgagtcccccgctttaggggccactggagtcgagctcagcgttcacaccaggcgggctgggtcccctgcccacctgcctccctgccccctgtgacggagggggcaagcaagcccccagaggctgtgtctctggacagacggatagacatacggaagcgaggcctggaccaagagaggcccaggctactggaggagtagaaggatgggccccgtggggtccccactgccccggtacgagggggcccaagaccctggcaggtcaggggccctggccaagccagatctggagctgctgctccctgctgcggagaccgcggaggcttcgcgttgaccaagttccttaaagaactggctgatggggcaggaggtccaggcctgggctctcgggccctcctagagggccattggagcttgcagctcagacccccactttgagttttatttatttaaatagtagttggatgcttggcacgtcgtcctgtaataggaaacccttgcctcatcagttttcctgatttacaagtgcaatattttagccaatgccttgggagaagctgccatgcaaaggtggacaccattctccagcttcaggggatatgctcgtcccgggcaccggtggcaggcagctggccttctggactaaggcagcctggggggacactgcagtctggctacacacagagatctggcaccccctgggtggagtgtccctcgggggctttgggaaagcatggcaccctcagaccacacagtagccaagttctggagcaaataaaaggcctgtgttatttcttgttcttga

SEQ ID NO: 25823 - DNA, 4591 bp, Homo sapiens
  source 1..4591: mol_type = unassigned DNA
aactttggctcagcctgtcttcatccactgtatcctgacacctctcctactccttctctttaatgtacagctgagactgggatacccttagactgaaaggaaggacacggctatgtagaaaagaattgactgaaggggaggagtactcgtgaaccccttgcttcagcctcccaatgttctgagagaggaggagccaggcgcagtggctcatgcctgtaatcccagcactttgggaggttgagatgggcagatcgcaaggtcaggagatcgagaccatcctggctaacaggtcacattcagacagcacacctttgcccaattttctttctggatctcaccgtcctgagtgttgtacctgcaggttgctcacagcctctggagcccaagatagtctcccctttgggaggaggctctacagtggtccctggcgaagttgtgaagaggtctgccacgtctctgtgctcagtgtcctctctacatcctgtggcttgagcctgagcttgcccatattccctggctggatggagtggctaagccctgatatcgctctgcccagaagagatgagtggactcaaacttctccagccaggaagaggatcacgcatgccaaagtccagggtgcaggtcagctgaggctgtccattgatgcccaggaccgggttctgctgcttcacattatagaaggtaaaggcctgatcagcaaacagcctggcacctgtgatccgtatgtgaagatttctttgatccctgaagatagtagactacgccaccagaagacgcagaccgttccagactgcagagacccggctttccacgagcacttcttctttcctgtccaagaggaggatgatcagaagcgtctcttggttactgtgtggaacagggccagccagtccagacagagtggactcattggctgcatgagctttggggtgaagtctctcctgactccagacaaggagatcagtggttggtactacctcctaggggagcacctgggccggaccaagcacttgaaggtggccaggcggcgactgcggccgctgagagacccgctgctgagaatgccaggaggtggggacactgagaatgggaagaaactaaagatcaccatcccgaggggaaaggacggctttggcttcaccatctgctgcgactctccagttcgagtccaggccgtggattccgggggtccggcggaacgggcagggctgcagcagctggacacggtgctgcagctgaatgagaggcctgtggagcactggaaatgtgtggagctggcccacgagatccggagctgccccagtgagatcatcctactcgtgtggcgcatggtcccccaggtcaagccaggaccagatggcggggtcctgcggcgggcctcctgcaagtcgacacatgacctccagtcaccccccaacaaacgggagaagaactgcacccatggggtccaggcacggcctgagcagcgccacagctgccacctggtatgtgacagctctgatgggctgctgctcggcggctgggagcgctacaccgaggtggccaagcgcgggggccagcacaccctgcctgcactgtcccgtgccactgcccccaccgaccccaactacatcatcctggccccgctgaatcctgggagccagctgctccggcctgtgtaccaggaggataccatccccgaagaatcagggagtcccagtaaagggaagtcctacacaggcctggggaagaagtcccggctgatgaagacagtgcagaccatgaagggccacgggaactaccaaaactgcccggttgtgaggccgcatgccacgcactcaagctatggcacctacgtcaccctggcccccaaagtcctggtgttccctgtctttgttcagcctctagatctctgtaatcctgcccggaccctcctgctgtcagaggagctgctgctgtatgaagggaggaacaaggctgccgaggtgacactgtttgcctattcggacctgctgctcttcaccaaggaggacgagcctggccgctgcgacgtcctgaggaaccccctctacctccagagtgtgaagctgcaggaaggttcttcagaagacctgaaattctgcgtgctctatctagcagagaaggcagagtgcttattcactttggaagcgcactcgcaggagcagaagaagagagtgtgctggtgcctgtcggagaacatcgccaagcagcaacagctggcagcatcacccccggacagcaagatgtttgagacggaggcagatgagaagagggagatggccttggaggaagggaaggggcctggtgccgaggattccccacccagcaaggagccctctcctggccaggagcttcctccaggacaagaccttccacccaacaaggactccccttctgggcaggaacccgctcccagccaagaaccactgtccagcaaagactcagctacctctgaaggatcccctccaggcccagatgctccgcccagcaaggatgtgccaccatgccaggaaccccctccagcccaagacctctcaccctgccaggacctacctgctggtcaagaacccctgcctcaccaggaccctctactcaccaaagacctccctgccatccaggaatcccccacccgggaccttccaccctgtcaagatctgcctcctagccaggtctccctgccagccaaggcccttactgaggacaccatgagctccggggacctactagcagctactggggacccacctgcggcccccaggccagccttcgtgatccctgaggtccggctggatagcacctacagccagaaggcaggggcagagcagggctgctcgggagatgaggaggatgcagaagaggccgaggaggtggaggagggggaggaaggggaggaggacgaggatgaggacaccagcgatgacaactacggagagcgcagtgaggccaagcgcagcagcatgatcgagacgggccagggggctgagggtggcctctcactgcgtgtgcagaactcgctgcggcgccggacgcacagcgagggcagcctgctgcaggagccccgagggccctgctttgcctccgacaccaccttgcactgctcagacggtgagggcgccgcctccacctggggcatgccttcgcccagcaccctcaagaaagagctgggccgcaatggtggctccatgcaccacctttccctcttcttcacaggacacaggaagatgagcggggctgacaccgttggggatgatgacgaagcctcccggaagagaaagagcaaaaacctagccaaggacatgaagaacaagctggggatcttcagacggcggaatgagtcccctggagcccctcccgcgggcaaggcagacaaaatgatgaagtcattcaagcccacctcagaggaagccctcaagtggggcgagtccttggagaagctgctggttcacaaatacgggttagcagtgttccaagccttccttcgcactgagttcagtgaggagaatctggagttctggttggcttgtgaggacttcaagaaggtcaagtcacagtccaagatggcatccaaggccaagaagatctttgctgaatacatcgcgatccaggcatgcaaggaggtcaacctggactcctacacgcgggagcacaccaaggacaacctgcagagcgtcacgcggggctgcttcgacctggcacagaagcgcatcttcgggctcatggaaaaggactcgtaccctcgctttctccgttctgacctctacctggaccttattaaccagaagaagatgagtcccccgctttaggggccactggagtcgagctcagcgttcacaccaggcgggctgggtcccctgcccacctgcctccctgccccctgtgacggagggggcaagcaagcccccagaggctgtgtctctggacagacggatagacatacggaagcgaggcctggaccaagagaggcccaggctactggaggagtagaaggatgggccccgtggggtccccactgccccggtacgagggggcccaagaccctggcaggtcaggggccctggccaagccagatctggagctgctgctccctgctgcggagaccgcggaggcttcgcgttgaccaagttccttaaagaactggctgatggggcaggaggtccaggcctgggctctcgggccctcctagagggccattggagcttgcagctcagacccccactttgagttttatttatttaaatagtagttggatgcttggcacgtcgtcctgtaataggaaacccttgcctcatcagttttcctgatttacaagtgcaatattttagccaatgccttgggagaagctgccatgcaaaggtggacaccattctccagcttcaggggatatgctcgtcccgggcaccggtggcaggcagctggccttctggactaaggcagcctggggggacactgcagtctggctacacacagagatctggcaccccctgggtggagtgtccctcgggggctttgggaaagcatggcaccctcagaccacacagtagccaagttctggagcaaataaaaggcctgtgttatttcttgttcttga

SEQ ID NO: 25824 - DNA, 2623 bp, Homo sapiens
  source 1..2623: mol_type = unassigned DNA
agtgcgggctcccgctgctgggggagagctgggttttcatggggcggcagccgaggcaggacccgcagccatgaaccgcttcaatgggctctgcaaggtgtgctcggagcgccgctaccgccagatcaccatcccgaggggaaaggacggctttggcttcaccatctgctgcgactctccagttcgagtccaggccgtggattccgggggtccggcggaacgggcagggctgcagcagctggacacggtgctgcagctgaatgagaggcctgtggagcactggaaatgtgtggagctggcccacgagatccggagctgccccagtgagatcatcctactcgtgtggcgcatggtcccccaggtcaagccaggaccagatggcggggtcctgcggcgggcctcctgcaagtcgacacatgacctccagtcaccccccaacaaacgggagaagaactgcacccatggggtccaggcacggcctgagcagcgccacagctgccacctggtatgtgacagctctgatgggctgctgctcggcggctgggagcgctacaccgaggtggccaagcgcgggggccagcacaccctgcctgcactgtcccgtgccactgcccccaccgaccccaactacatcatcctggccccgctgaatcctgggagccagctgctccggcctgtgtaccaggaggataccatccccgaagaatcagggagtcccagtaaagggaagtcctacacaggcctggggaagaagtcccggctgatgaagacagtgcagaccatgaagggccacgggaactaccaaaactgcccggttgtgaggccgcatgccacgcactcaagctatggcacctacgtcaccctggcccccaaagtcctggtgttccctgtctttgttcagcctctagatctctgtaatcctgcccggaccctcctgctgtcagaggagctgctgctgtatgaagggaggaacaaggctgccgaggtgacactgtttgcctattcggacctgctgctcttcaccaaggaggacgagcctggccgctgcgacgtcctgaggaaccccctctacctccagagtgtgaagctgcaggaaggttcttcagaagacctgaaattctgcgtgctctatctagcagagaaggcagagtgcttattcactttggaagcgcactcgcaggagcagaagaagagagtgtgctggtgcctgtcggagaacatcgccaagcagcaacagctggcagcatcacccccggacagcaagatgagcggggctgacaccgttggggatgatgacgaagcctcccggaagagaaagagcaaaaacctagccaaggacatgaagaacaagctggggatcttcagacggcggaatgagtcccctggagcccctcccgcgggcaaggcagacaaaatgatgaagtcattcaagcccacctcagaggaagccctcaagtggggcgagtccttggagaagctgctggttcacaaatacgggttagcagtgttccaagccttccttcgcactgagttcagtgaggagaatctggagttctggttggcttgtgaggacttcaagaaggtcaagtcacagtccaagatggcatccaaggccaagaagatctttgctgaatacatcgcgatccaggcatgcaaggaggtcaacctggactcctacacgcgggagcacaccaaggacaacctgcagagcgtcacgcggggctgcttcgacctggcacagaagcgcatcttcgggctcatggaaaaggactcgtaccctcgctttctccgttctgacctctacctggaccttattaaccagaagaagatgagtcccccgctttaggggccactggagtcgagctcagcgttcacaccaggcgggctgggtcccctgcccacctgcctccctgccccctgtgacggagggggcaagcaagcccccagaggctgtgtctctggacagacggatagacatacggaagcgaggcctggaccaagagaggcccaggctactggaggagtagaaggatgggccccgtggggtccccactgccccggtacgagggggcccaagaccctggcaggtcaggggccctggccaagccagatctggagctgctgctccctgctgcggagaccgcggaggcttcgcgttgaccaagttccttaaagaactggctgatggggcaggaggtccaggcctgggctctcgggccctcctagagggccattggagcttgcagctcagacccccactttgagttttatttatttaaatagtagttggatgcttggcacgtcgtcctgtaataggaaacccttgcctcatcagttttcctgatttacaagtgcaatattttagccaatgccttgggagaagctgccatgcaaaggtggacaccattctccagcttcaggggatatgctcgtcccgggcaccggtggcaggcagctggccttctggactaaggcagcctggggggacactgcagtctggctacacacagagatctggcaccccctgggtggagtgtccctcgggggctttgggaaagcatggcaccctcagaccacacagtagccaagttctggagcaaataaaaggcctgtgttatttctt

SEQ ID NO: 25825 - DNA, 2759 bp, Homo sapiens
  source 1..2759: mol_type = unassigned DNA
atcggctctgtcctgctctccacaggcctctgctgtgttgggagccactgccttcctcccctcccccaacctgtgggcccacagctcgccagctggcccttgaacccacttccctgcgcctctggctgcctcaatgtcactggggattagtgtgcatttgcggcttttggcggacactcccctcctggctgcagcctcaccctctggagcccagggatgggcttgggcctgggagccccctgaaccagggagcagccctgaccgtccgtttctctattttccctgacgtcagaaggcagagtgcttattcactttggaagcgcactcgcaggagcagaagaagagagtgtgctggtgcctgtcggagaacatcgccaagcagcaacagctggcagcatcacccccggacagcaagatgtttgagacggaggcagatgagaagagggagatggccttggaggaagggaaggggcctggtgccgaggattccccacccagcaaggagccctctcctggccaggagcttcctccaggacaagaccttccacccaacaaggactccccttctgggcaggaacccgctcccagccaagaaccactgtccagcaaagactcagctacctctgaaggatcccctccaggcccagatgctccgcccagcaaggatgtgccaccatgccaggaaccccctccagcccaagacctctcaccctgccaggacctacctgctggtcaagaacccctgcctcaccaggaccctctactcaccaaagacctccctgccatccaggaatcccccacccgggaccttccaccctgtcaagatctgcctcctagccaggtctccctgccagccaaggcccttactgaggacaccatgagctccggggacctactagcagctactggggacccacctgcggcccccaggccagccttcgtgatccctgaggtccggctggatagcacctacagccagaaggcaggggcagagcagggctgctcgggagatgaggaggatgcagaagaggccgaggaggtggaggagggggaggaaggggaggaggacgaggatgaggacaccagcgatgacaactacggagagcgcagtgaggccaagcgcagcagcatgatcgagacgggccagggggctgagggtggcctctcactgcgtgtgcagaactcgctgcggcgccggacgcacagcgagggcagcctgctgcaggagccccgagggccctgctttgcctccgacaccaccttgcactgctcagacggtgagggcgccgcctccacctggggcatgccttcgcccagcaccctcaagaaagagctgggccgcaatggtggctccatgcaccacctttccctcttcttcacaggacacaggaagatgagcggggctgacaccgttggggatgatgacgaagcctcccggaagagaaagagcaaaaacctagccaaggacatgaagaacaagctggggatcttcagacggcggaatgagtcccctggagcccctcccgcgggcaaggcagacaaaatgatgaagtcattcaagcccacctcagaggaagccctcaagtggggcgagtccttggagaagctgctggttcacaaatacgggttagcagtgttccaagccttccttcgcactgagttcagtgaggagaatctggagttctggttggcttgtgaggacttcaagaaggtcaagtcacagtccaagatggcatccaaggccaagaagatctttgctgaatacatcgcgatccaggcatgcaaggaggtcaacctggactcctacacgcgggagcacaccaaggacaacctgcagagcgtcacgcggggctgcttcgacctggcacagaagcgcatcttcgggctcatggaaaaggactcgtaccctcgctttctccgttctgacctctacctggaccttattaaccagaagaagatgagtcccccgctttaggggccactggagtcgagctcagcgttcacaccaggcgggctgggtcccctgcccacctgcctccctgccccctgtgacggagggggcaagcaagcccccagaggctgtgtctctggacagacggatagacatacggaagcgaggcctggaccaagagaggcccaggctactggaggagtagaaggatgggccccgtggggtccccactgccccggtacgagggggcccaagaccctggcaggtcaggggccctggccaagccagatctggagctgctgctccctgctgcggagaccgcggaggcttcgcgttgaccaagttccttaaagaactggctgatggggcaggaggtccaggcctgggctctcgggccctcctagagggccattggagcttgcagctcagacccccactttgagttttatttatttaaatagtagttggatgcttggcacgtcgtcctgtaataggaaacccttgcctcatcagttttcctgatttacaagtgcaatattttagccaatgccttgggagaagctgccatgcaaaggtggacaccattctccagcttcaggggatatgctcgtcccgggcaccggtggcaggcagctggccttctggactaaggcagcctggggggacactgcagtctggctacacacagagatctggcaccccctgggtggagtgtccctcgggggctttgggaaagcatggcaccctcagaccacacagtagccaagttctggagcaaataaaaggcctgtgttatttcttgttcttg

SEQ ID NO: 25826 - DNA, 2155 bp, Homo sapiens
  source 1..2155: mol_type = unassigned DNA
attaaataattaaactttaaaatggtgtttttgtaagtttataggacttgtacttctgaagttattcaggcttaaaactactaagatgttggggtcctgctgtatattcatgactggatgtcgccaatgcaggtgactgaggctgagaggccggctggcaggagccattctctgggaggtgccctgtacagggggtctagggaaaagaggggcgaacatgagcaagaggcatttaactcctttcttgccagcagtttcacccagtgctgaattctgctgcctccttggggaccggcaaggctaaaaatggttcttggctaaaaatagccagtcctgccaccccggtggtgggcagtgcctcccctggctccctccttccctttcagcaatttgctgacttgtcccccaccccccaccactgtctccctgctgccatggtaacgaggaggccagtcacaaatagctgggactggcttcctgccggggcggccccagaggctgtcccttgcagacacatgcccctttcacggctccctctcagggttggccagaaggaatttttttttccgctccccctcctggtccctcccatttcctggctcctcctgtctgagtcccagccccggcttgtgcctgggagtccagtcatcaggccaggattccagagagcgtgtgtggctgcagcctgcaccgttgctgcccgctgcccaggacgcggggtgggggacaggagccagagtggtgcctcctacagaccaatctgcggccccaaggtggggggccctacagagatgctccgaggcatgtacctcactcgcaacgggaacctgcagaggcgacacacgatgaaggaagccaaggacatgaagaacaagctggggatcttcagacggcggaatgagtcccctggagcccctcccgcgggcaaggcagacaaaatgatgaagtcattcaagcccacctcagaggaagccctcaagtggggcgagtccttggagaagctgctggttcacaaatacgggttagcagtgttccaagccttccttcgcactgagttcagtgaggagaatctggagttctggttggcttgtgaggacttcaagaaggtcaagtcacagtccaagatggcatccaaggccaagaagatctttgctgaatacatcgcgatccaggcatgcaaggaggtcaacctggactcctacacgcgggagcacaccaaggacaacctgcagagcgtcacgcggggctgcttcgacctggcacagaagcgcatcttcgggctcatggaaaaggactcgtaccctcgctttctccgttctgacctctacctggaccttattaaccagaagaagatgagtcccccgctttaggggccactggagtcgagctcagcgttcacaccaggcgggctgggtcccctgcccacctgcctccctgccccctgtgacggagggggcaagcaagcccccagaggctgtgtctctggacagacggatagacatacggaagcgaggcctggaccaagagaggcccaggctactggaggagtagaaggatgggccccgtggggtccccactgccccggtacgagggggcccaagaccctggcaggtcaggggccctggccaagccagatctggagctgctgctccctgctgcggagaccgcggaggcttcgcgttgaccaagttccttaaagaactggctgatggggcaggaggtccaggcctgggctctcgggccctcctagagggccattggagcttgcagctcagacccccactttgagttttatttatttaaatagtagttggatgcttggcacgtcgtcctgtaataggaaacccttgcctcatcagttttcctgatttacaagtgcaatattttagccaatgccttgggagaagctgccatgcaaaggtggacaccattctccagcttcaggggatatgctcgtcccgggcaccggtggcaggcagctggccttctggactaaggcagcctggggggacactgcagtctggctacacacagagatctggcaccccctgggtggagtgtccctcgggggctttgggaaagcatggcaccctcagaccacacagtagccaagttctggagcaaataaaaggcctgtgttatttcttgttcttga

SEQ ID NO: 25827 - DNA, 930 bp, Homo sapiens
  source 1..930: mol_type = unassigned DNA
agatcactcatgtgttcagtgattcaggttctgttgaagataccaaagatattcggttggtcaaaatgacgggcatataaaggcttctcaggtttctgagtgcaaaagatatgaaacatcggctaggtttcctgctgcaaaaatctgattcctgtgaacacaattcttcccacaacaagaaggacaaagtggttatttgccagagagtgagccaagaggaagtcaagaaatgggctgaatcactggaaaacctgattagtcatgaatgtgggctggcagctttcaaagctttcttgaagtctgaatatagtgaggagaatattgacttctggatcagctgtgaagagtacaagaaaatcaaatcaccatctaaactaagtcccaaggccaaaaagatctataatgaattcatctcagtccaggcaaccaaagaggtgaacctggattcttgcaccagggaagagacaagccggaacatgctagagcctacaataacctgctttgatgaggcccagaagaagattttcaacctgatggagaaggattcctaccgccgcttcctcaagtctcgattctatcttgatttggtcaacccgtccagctgtggggcagaaaagcagaaaggagccaagagttcagcagactgtgcttccctggtccctcagtgtgcctaattctcacctgaaggcagagggatgaaatgccaagactctatgctctggaaaacctgaggccaaatattgatctgtattaagctccagtgctttatccacattgtagcctaatattcatgctgcctgccatgtgtgagtcacttctacgcataaactagatatagcttttggtgtttgagtgttcatcagggtgggaccccattccagtccaattttcctaagtttctttgagggttccatgggagcaaatatctaa

SEQ ID NO: 25828 - DNA, 2606 bp, Homo sapiens
  source 1..2606: mol_type = unassigned DNA
aagacgctcagaggattctgacaatatctttaccggagaagaggcaaagtacgctcaaagccgaagccacagctcctcctgccgcatttctttcctgcttgcgaattccaagctgttaaataagatgtgcaaagggcttgcaggtctgccggcttcttgcttgaggagtgcaaaagatatgaaacatcggctaggtttcctgctgcaaaaatctgattcctgtgaacacaattcttcccacaacaagaaggacaaagtggttatttgccagagagtgagccaagaggaagtcaagaaatgggctgaatcactggaaaacctgattagtcatgaatgtgaacctggattcttgcaccagggaagagacaagccggaacatgctagagcctacaataacctgctttgatgaggcccagaagaagattttcaacctgatggagaaggattcctaccgccgcttcctcaagtctcgattctatcttgatttggtcaacccgtccagctgtggggcagaaaagcagaaaggagccaagagttcagcagactgtgcttccctggtccctcagtgtgcctaattctcacctgaaggcagagggatgaaatgccaagactctatgctctggaaaacctgaggccaaatattgatctgtattaagctccagtgctttatccacattgtagcctaatattcatgctgcctgccatgtgtgagtcacttctacgcataaactagatatagcttttggtgtttgagtgttcatcagggtgggaccccattccagtccaattttcctaagtttctttgagggttccatgggagcaaatatctaaataatggcctggtaggtctggattttcaaagattgttggcagtttcctcctcccaacagttttacctcgggatggttggttagtgcatgtcacatgacatccacatgcacatgtattctgttggccagcacgttctccagactctagatgtttagatgaggttgagctatgatatgtgcttgtgtgtatgtctatgtgtatatattatatatacattagacacacatatacattatttctgtatatagatgtctgtgtatacatatgtatgtgtgagtgtatgtatacacacacacacacacacacacacacacttttgcaagagtgatgggaaagaccctaggtgctcataactagagtatgtgtatgtacttacatgggtgttttgatctctgttctttcatactacatttgaacagggcaaaatgaactaactgccatgtaggctaagaaagaaatgctaacctgtggaaagttggttttgtaaaattccatggatcttgctggagaagcatccaaggaacttcatgcttgatttgaccactgacagcctccaccttgagcactattctaaggagcaaataccttagctcccttgagctggttttctctgatggcacttttgagctcctaagctgccagccttcccttcttttcctgggtgctcagggcatgcttattagcagctgggttggtatggagttggcagacaggatgttcaacttaatgaagaaatacagctaaggccttgccagcaacacctgccgtaagttactggctgagtgagggcatagaagttaaaggttactgtttttatcctctatccttttttcctttcctgatcaaggtgctcttctcattttttcctgagaaccttagccatcagatgaggctccttagtttattgtggttggttgttttttctttataatggctctgggctatatgcctatatttataaaccagcagcaggggaaagattatattttataagagggaacaaattttcacaatttgaaaagcccacataagttttctcttttaaggtagaatcttgttaatttcattccaaacatcggggctaacagagactggaggcatttctttttaggctctgagactaaatgagaggaaaagaaaagaaaaaaaaaatgattgtctaaccaattgtgagaattactgtttgaaacttttcaaggcacattgaaatacttgaaaacttctcatttatgttatttatgatgttattttgtacgtgttattattattatattgttttataaatggaggtacaggatatcacctgaattattaatgaatgcccaggaagtaattttcttctcattcttctaaaactactgcctttcaaagtgcacacacacgcgtccacatacactgcattcgttgctccagtataaattacatgcatgagcacctttctggcttttaagccaatataatgggctgcaaaatgaagacaccagagtgtatgcatacaaatctcactgtattaaagatgcaggttttctaattgtacccttcttgtctctctggcaatcttgcccttaatatccctggagttcctcatcagtgtcattttctgttatacacagttccacaattttgtctctagttgacttcaaatgtgtaactttattggtcttgccctattataattgtcatgactttcagattgtatctgaactcacagactgctgtcttactaataggtctggaaggtcacgctgaatgagaagtaaattattttatgtaat

SEQ ID NO: 25829 - DNA, 3200 bp, Homo sapiens
  source 1..3200: mol_type = unassigned DNA
gacattgagtacattttttcccatatccctacttttcagaaggattttctctgctcgttcacttaacattgctgatgcgtcagtcttttcttcctcatctctttcaggggctggagaggcagagggagacagaggagctggtactgcagagcggtcgtctgattggctggacggtcgtagctgggctataaaagagacccctacaggcttagcaggaagacgctcagaggattctgacaatatctttaccggagaagaggcaaagtacgctcaaagccgaagccacagctcctcctgccgcatttctttcctgcttgcgaattccaagctgttaaataagatgtgcaaagggcttgcaggtctgccggcttcttgcttgaggagtgcaaaagatatgaaacatcggctaggtttcctgctgcaaaaatctgattcctgtgaacacaattcttcccacaacaagaaggacaaagtggttatttgccagagagtgagccaagaggaagtcaagaaatgggctgaatcactggaaaacctgattagtcatgaatgtgggctggcagctttcaaagctttcttgaagtctgaatatagtgaggagaatattgacttctggatcagctgtgaagagtacaagaaaatcaaatcaccatctaaactaagtcccaaggccaaaaagatctataatgaattcatctcagtccaggcaaccaaagaggtgaacctggattcttgcaccagggaagagacaagccggaacatgctagagcctacaataacctgctttgatgaggcccagaagaagattttcaacctgatggagaaggattcctaccgccgcttcctcaagtctcgattctatcttgatttggtcaacccgtccagctgtggggcagaaaagcagaaaggagccaagagttcagcagactgtgcttccctggtccctcagtgtgcctaattctcacctgaaggcagagggatgaaatgccaagactctatgctctggaaaacctgaggccaaatattgatctgtattaagctccagtgctttatccacattgtagcctaatattcatgctgcctgccatgtgtgagtcacttctacgcataaactagatatagcttttggtgtttgagtgttcatcagggtgggaccccattccagtccaattttcctaagtttctttgagggttccatgggagcaaatatctaaataatggcctggtaggtctggattttcaaagattgttggcagtttcctcctcccaacagttttacctcgggatggttggttagtgcatgtcacatgacatccacatgcacatgtattctgttggccagcacgttctccagactctagatgtttagatgaggttgagctatgatatgtgcttgtgtgtatgtctatgtgtatatattatatatacattagacacacatatacattatttctgtatatagatgtctgtgtatacatatgtatgtgtgagtgtatgtatacacacacacacacacacacacacacacttttgcaagagtgatgggaaagaccctaggtgctcataactagagtatgtgtatgtacttacatgggtgttttgatctctgttctttcatactacatttgaacagggcaaaatgaactaactgccatgtaggctaagaaagaaatgctaacctgtggaaagttggttttgtaaaattccatggatcttgctggagaagcatccaaggaacttcatgcttgatttgaccactgacagcctccaccttgagcactattctaaggagcaaataccttagctcccttgagctggttttctctgatggcacttttgagctcctaagctgccagccttcccttcttttcctgggtgctcagggcatgcttattagcagctgggttggtatggagttggcagacaggatgttcaacttaatgaagaaatacagctaaggccttgccagcaacacctgccgtaagttactggctgagtgagggcatagaagttaaaggttactgtttttatcctctatccttttttcctttcctgatcaaggtgctcttctcattttttcctgagaaccttagccatcagatgaggctccttagtttattgtggttggttgttttttctttataatggctctgggctatatgcctatatttataaaccagcagcaggggaaagattatattttataagagggaacaaattttcacaatttgaaaagcccacataagttttctcttttaaggtagaatcttgttaatttcattccaaacatcggggctaacagagactggaggcatttctttttaggctctgagactaaatgagaggaaaagaaaagaaaaaaaaaatgattgtctaaccaattgtgagaattactgtttgaaacttttcaaggcacattgaaatacttgaaaacttctcatttatgttatttatgatgttattttgtacgtgttattattattatattgttttataaatggaggtacaggatatcacctgaattattaatgaatgcccaggaagtaattttcttctcattcttctaaaactactgcctttcaaagtgcacacacacgcgtccacatacactgcattcgttgctccagtataaattacatgcatgagcacctttctggcttttaagccaatataatgggctgcaaaatgaagacaccagagtgtatgcatacaaatctcactgtattaaagatgcaggttttctaattgtacccttcttgtctctctggcaatcttgcccttaatatccctggagttcctcatcagtgtcattttctgttatacacagttccacaattttgtctctagttgacttcaaatgtgtaactttattggtcttgccctattataattgtcatgactttcagattgtatctgaactcacagactgctgtcttactaataggtctggaaggtcacgctgaatgagaagtaaattattttatgtaatacatttttgagtgtgtttttcagttgtatttccctgttatttcatcactatttccaatggtgagcttgcctgctcatgctccctggacagaatactccttccttttgcatgcctgtttctatcatgtgcttgataggcctcaaagctaatgcttccagtgaaacacacgcatcttaataataagggtaaataaacgctccatatgaaacta

SEQ ID NO: 25830 - DNA, 3311 bp, Homo sapiens
  source 1..3311: mol_type = unassigned DNA
agtttctgtatgctgccgggcttataactgtctgtcatccagctatttctctccaccttcttgtttgcataacaaccaaggcaacttccgcaaatcactgcgtggagacgatgatcctgccagctcccttttggaaatcgtgaggatcagatcttggaccatgtataatatgatgcttctaatccaaaagaggaaaggcattgggagtcagctcctaagggctggagaggcagagggagacagaggagctggtactgcagagcggtcgtctgattggctggacggtcgtagctgggctataaaagagacccctacaggcttagcaggaagacgctcagaggattctgacaatatctttaccggagaagaggcaaagtacgctcaaagccgaagccacagctcctcctgccgcatttctttcctgcttgcgaattccaagctgttaaataagatgtgcaaagggcttgcaggtctgccggcttcttgcttgaggagtgcaaaagatatgaaacatcggctaggtttcctgctgcaaaaatctgattcctgtgaacacaattcttcccacaacaagaaggacaaagtggttatttgccagagagtgagccaagaggaagtcaagaaatgggctgaatcactggaaaacctgattagtcatgaatgtgggctggcagctttcaaagctttcttgaagtctgaatatagtgaggagaatattgacttctggatcagctgtgaagagtacaagaaaatcaaatcaccatctaaactaagtcccaaggccaaaaagatctataatgaattcatctcagtccaggcaaccaaagaggtgaacctggattcttgcaccagggaagagacaagccggaacatgctagagcctacaataacctgctttgatgaggcccagaagaagattttcaacctgatggagaaggattcctaccgccgcttcctcaagtctcgattctatcttgatttggtcaacccgtccagctgtggggcagaaaagcagaaaggagccaagagttcagcagactgtgcttccctggtccctcagtgtgcctaattctcacctgaaggcagagggatgaaatgccaagactctatgctctggaaaacctgaggccaaatattgatctgtattaagctccagtgctttatccacattgtagcctaatattcatgctgcctgccatgtgtgagtcacttctacgcataaactagatatagcttttggtgtttgagtgttcatcagggtgggaccccattccagtccaattttcctaagtttctttgagggttccatgggagcaaatatctaaataatggcctggtaggtctggattttcaaagattgttggcagtttcctcctcccaacagttttacctcgggatggttggttagtgcatgtcacatgacatccacatgcacatgtattctgttggccagcacgttctccagactctagatgtttagatgaggttgagctatgatatgtgcttgtgtgtatgtctatgtgtatatattatatatacattagacacacatatacattatttctgtatatagatgtctgtgtatacatatgtatgtgtgagtgtatgtatacacacacacacacacacacacacacacttttgcaagagtgatgggaaagaccctaggtgctcataactagagtatgtgtatgtacttacatgggtgttttgatctctgttctttcatactacatttgaacagggcaaaatgaactaactgccatgtaggctaagaaagaaatgctaacctgtggaaagttggttttgtaaaattccatggatcttgctggagaagcatccaaggaacttcatgcttgatttgaccactgacagcctccaccttgagcactattctaaggagcaaataccttagctcccttgagctggttttctctgatggcacttttgagctcctaagctgccagccttcccttcttttcctgggtgctcagggcatgcttattagcagctgggttggtatggagttggcagacaggatgttcaacttaatgaagaaatacagctaaggccttgccagcaacacctgccgtaagttactggctgagtgagggcatagaagttaaaggttactgtttttatcctctatccttttttcctttcctgatcaaggtgctcttctcattttttcctgagaaccttagccatcagatgaggctccttagtttattgtggttggttgttttttctttataatggctctgggctatatgcctatatttataaaccagcagcaggggaaagattatattttataagagggaacaaattttcacaatttgaaaagcccacataagttttctcttttaaggtagaatcttgttaatttcattccaaacatcggggctaacagagactggaggcatttctttttaggctctgagactaaatgagaggaaaagaaaagaaaaaaaaaatgattgtctaaccaattgtgagaattactgtttgaaacttttcaaggcacattgaaatacttgaaaacttctcatttatgttatttatgatgttattttgtacgtgttattattattatattgttttataaatggaggtacaggatatcacctgaattattaatgaatgcccaggaagtaattttcttctcattcttctaaaactactgcctttcaaagtgcacacacacgcgtccacatacactgcattcgttgctccagtataaattacatgcatgagcacctttctggcttttaagccaatataatgggctgcaaaatgaagacaccagagtgtatgcatacaaatctcactgtattaaagatgcaggttttctaattgtacccttcttgtctctctggcaatcttgcccttaatatccctggagttcctcatcagtgtcattttctgttatacacagttccacaattttgtctctagttgacttcaaatgtgtaactttattggtcttgccctattataattgtcatgactttcagattgtatctgaactcacagactgctgtcttactaataggtctggaaggtcacgctgaatgagaagtaaattattttatgtaatacatttttgagtgtgtttttcagttgtatttccctgttatttcatcactatttccaatggtgagcttgcctgctcatgctccctggacagaatactccttccttttgcatgcctgtttctatcatgtgcttgataggcctcaaagctaatgcttccagtgaaacacacgcatcttaataataagggtaaataaacgctccatatgaaacta

SEQ ID NO: 25831 - DNA, 817 bp, Homo sapiens
  source 1..817: mol_type = unassigned DNA
aagacgctcagaggattctgacaatatctttaccggagaagaggcaaatgcaaaagatatgaaacatcggctaggtttcctgctgcaaaaatctgattcctgtgaacacaattcttcccacaacaagaaggacaaagtggttatttgccagagagtgagccaagaggaagtcaagaaatgggctgaatcactggaaaacctgattagtcatgaatgtgggctggcagctttcaaagctttcttgaagtctgaatatagtgaggagaatattgacttctggatcagctgtgaagagtacaagaaaatcaaatcaccatctaaactaagtcccaaggccaaaaagatctataatgaattcatctcagtccaggcaaccaaagaggtgaacctggattcttgcaccagggaagagacaagccggaacatgctagagcctacaataacctgctttgatgaggcccagaagaagattttcaacctgatggagaaggattcctaccgccgcttcctcaagtctcgattctatcttgatttggtcaacccgtccagctgtggggcagaaaagcagaaaggagccaagagttcagcagactgtgcttccctggtccctcagtgtgcctaattctcacctgaaggcagagggatgaaatgccaagactctatgctctggaaaacctgaggccaaatattgatctgtattaagctccagtgctttatccacattgtagcctaatattcatgctgcctgccatgtgtgagtcacttctacgcataaactagatatagcttttggtgtttgagtgttcatcagggtggg

SEQ ID NO: 25832 - DNA, 551 bp, Homo sapiens
  source 1..551: mol_type = unassigned DNA
aaactgaagggtcagaattccagttgtggatgaaggaaatggtgttatgactgcctcaaggttttgtagcaagtcatagggaaccaagaggaatcttgttttcctcagagtgcaaaagatatgaaacatcggctaggtttcctgctgcaaaaatctgattcctgtgaacacaattcttcccacaacaagaaggacaaagtggttatttgccagagagtgagccaagaggaagtcaagaaatgggctgaatcactggaaaacctgattagtcatgaatgtgggctggcagctttcaaagctttcttgaagtctgaatatagtgaggagaatattgacttctggatcagctgtgaagagtacaagaaaatcaaatcaccatctaaactaagtcccaaggccaaaaagatctataatgaattcatctcagtccaggcaaccaaagaggtgaacctggattcttgcaccagggaagagacaagccggaacatgctagagcctacaataacctgctttgatgaggcccagaagaagattttcaacctgatggagaa

SEQ ID NO: 25833 - DNA, 5862 bp, Homo sapiens
  source 1..5862: mol_type = unassigned DNA
gagtgttgtgataagagcagatgaaagccttatgccacagtagtgcctgtagcagagaaaggattccctcctccacctcagggcccactgctgctgctctccagcctgcagtttcctctaaggctctggattggctggaagagcaacagagggctgggaaagagcttctatatatacctcaggaggaaaggcatcccagacagttttgaagttttcaaagactggctctgctgttaagaagttgtacttaaagcggaggagctaagccacctgccaaaatgtgcaaaggacttgcagctttgccccactcatgcctggaaagggccaaggagattaagatcaagttgggaattctcctccagaagccagactcagttggtgaccttgtcattccgtacaatgagaagccagagaaaccagccaagacccagaaaacctcgctggacgaggccctgcagtggcgtgattccctggacaaactcctgcagaacaactatggacttgccagtttcaaaagtttcctgaagtctgaattcagtgaggaaaaccttgagttctggattgcctgtgaggattacaagaagatcaagtcccctgccaagatggctgagaaggcaaagcaaatttatgaagaattcattcaaacggaggctcctaaagaggtgaatattgaccacttcactaaggacatcacaatgaagaacctggtggaaccttccctgagcagctttgacatggcccagaaaagaatccatgccctgatggaaaaggattctctgcctcgctttgtgcgctctgagttttatcaggagttaatcaagtagtaatttagccaggctatgaaatcatcctgtgagttatttcctccataataaccctgcatttcccattaatctacatatcttcccacagcagctttgctcagtgatacccacatgggaaaaatcccaggggatgttgcttactctttttgcccacactgctttggatacttatctactgtccgaaggccttctttccccactcaattcttcctgccctgttattaattaagatatcttcagcttgtagtcagacacaatcagaatcacagaaaaatcctgcctaaggcaaagaaatataagacaagactatgatatcaatgaatgtgggttaagtaatagatttccagctaaattggtctaaaaaagaatattaagtgtggacagacctatttcaaaggagcttaattgatctcacttgttttagttctgatccagggagatcacccctctaattatttctgaacttggttaataaaagtttataagatttttatgaagcagccactgtatgatattttaagcaaatatgttatttaaaatattgatccttcccttggaccaccttcatgttagttgggtattataaataagagatacaaccatgaatatattatgtttatacaaaatcaatctgaacacaattcataaagatttctcttttataccttcctcactggccccctccacctgcccatagtcaccaaattctgttttaaatcaatgacctaagatcaacaatgaagtattttataaatgtatttatgctgctagactgtgggtcaaatgtttccattttcaaattatttagaattcttatgagtttaaaatttgtaaatttctaaatccaatcatgtaaaatgaaactgttgctccattggagtagtctcccacctaaatatcaagatggctatatgctaaaaagagaaaatatggtcaagtctaaaatggctaattgtcctatgatgctattatcatagactaatgacatttatcttcaaaacaccaaattgtctttagaaaaattaatgtgattacaggtagaggccttctaggtgagacacttttaaggtacactgcattttgcaaaaaaaaaaaaaaaaagtaatcttttagcaaccccagtattccttcactatttcgcttcctgcattagcaaattttacttacagtcaaaagtgcagatttatactcctgacgtgtctcattcacagctaaataataggccataggacttttggtaggtttaaacttttaattctgtatttcatgattataagtcttgctagaattttttctaatctttagtagatttgattaaataatgattcacagaatttagtaacagaatcaaactaagccatgtatgagggtaatcgagatgaggatattaactcaaaagaaatagggtgatttttaaaggattaataaaattctgaaatgttaagtagaagattacattgtctagtcttgtatttcctccttctgttgctctctttcattcacacactctcagtttctcatatttgtagctcatttatttggttatttcctaagaatattgaaagtgaagcaactatgtgactgtattcttcaggtaaacactgactgcgcttgttggattttccctatttttgtgacttcaagaataatatgccctgctgaatacatgccatttcacattctgaaactgggtagagtggttgggtgttctgccaacaattgctagtggtgtgaattcattcatatttgccagtattgctcacttcaaagaaactccttcatcaagcagtccagagctaggccagatcaatgctacaatcatgaagttctcattgcatgcaattgtgtaggattgacaaggaactcagataaaaatttccagggtgcacttccagaaccagcttcaacatatgtctacattgcccccaagttaataaagtgccaaccctttactctctcatacagccagaaatgttagaaatccaaaatcttggtgcattattttttcataaacgctaaaacatttgaagaaacaatttaattatttaaaattcaagtattttattcacattatttgcaatatccaaatgtttaaaaattcccagataattaactagctattacagatctcacctagagggttgatgttatgaagactccagtggactgtactcacaaattgactggacaccctatgaaagtgggtagacctctcagcggaaaataagaagggcttttacctacagggcaggacagggtcccatgagagcagttctgtggagatataaaaagaatggaagaaggaatgccttatagtgatattgtgacattatatctatatatctacatatatctatctatctatatctacatctatataatcttacatttaaaattgtattcctacacatattagaaactcttctaataaatgaagtaaaaaaattaaaaagaatacaaatattccagccccaaatgagaaatcaaacatattaaaattgttcaagaaaatttctttgaacacttctgaaagtttttggaaacttagaaaagagggaaaaaaatccagtgttactagtaatttccatggtaatacagataaaatacattcttttaattctgggaaattagaaaaagtggggtgatctttccaggaaaaacatgtgtaacatctgcttatcactccagctccctcctcctcctcctctccacgttcccttgagtaaatgtctgggaaagcatgaagcttgatgcaagaaccctgttgtactggcgttttcctcccctgtgaaaacgtaactactgttgggagtgaattgaggatgtagaaaggtggtggaaccaaattgtggtcaatggaaataggagaatatggttctcactcttgagaaaaaaacctaagattagcccaggtagttgcctgtaacttcagtttttctgcctgggtttgatatagtttagggttggggttagattaagatctaaattacatcaggacaaagagacagactattaactccacagttaattaaggacgtatgttccatgtttatttgttaaagcagtgtgaatagccttcaagcatgtgaataatcttccatcttccccgccacacatacacacacacactttttgtttctttcaggtagacaccttttaaaatgcagaactaactgaggcatttcagtaactttgctttcaaatcaataaagtcaaatgtatggaaacattttgtgccctactctccataccccgtgtactcaaattctctactgtatgaattatgctttaagtagaattcagtgccaaggagaacttggtgaaataaattattttaattttttttttatcctttacaaagccatggattttatttggttgatgtgtgctctgtacacaagccatttcaataggatggagctgttaattattttccaaagagtaatagacatgcaaaagtttcaataaaaactgggccattaacaaataaattaataaactaataagcattcccttctaggtttttgccaaactgcctatccaataacaaatttgagaatcgttgtaaaagctagttatatttcagagaaatgattttcattattgaaactgttctccctagcaggccattttccctttttcctgggagtttagcaagtttaggagagaatagtcatgaaaagaaagggaagaaaggggagaagggaagaggttaaaaagtaagtgctcagacctatgaacgtaatccctttgctacaaatatttaagagcagctcagcttggttgaaactgagttttgtcatcttccatatttgcaggaaggtattttctgacttgcaatgcagctagatgtaaaattttattttatcatcctagaaagccttgactagaaaaatgaataaatattgagggtttcctgtccatatctggcttgcatgtgccagaaagcagagaatagaaaatgtaatctccaacatccaagcatcgaaacccaaggggtaggcaattctatgtaggttttggacatgaagtttggtgcatcttggtttatgctggctcaactgctattaaacctctctggcttatagtctcttcattctattagacaagcacgtatcgaacacttgcttcgcacaaggctctttagttaacaatttagcagctactgtttgtgttaaacacacttttcaccaaataggttctgaggcaaacgagagcaatgactatttaaagaaaggctttcccagcatcacttacacatcccaaaactaaaaagatcaactcttccaactgagaaaagactcctggctttgaatggaaacttacagcagagagtcacaggccacggcaacaacaacgacaacaacaaacatttggaatattattctcaactcacgttttaataatacatcttattatttttctagtagagaaactacaaatcagcctcttcaacatttatatacagtttaataagcctcttgcaagttacttgttctctcacctgaggtatttttttcctccccaccttgcccctgttcctcccttcctcttctccctttgcaagaggaaatatttaacatatttgggtccaacttcaataatgtaataattaatacattaaaagcatttaacttcctttctagaaaaatgcacaggctaaggcatagacaaaacaaagagaaatgctgagaaatttgccactggagacaagcaatctgaataaatatttgccaaaagttctttttatgtcatatagtgtcaggatttgaaggagctatttttttttaatgttgcaactagcaactcatcttcggaagacacagccaggagaatgaagtagaagtgaaaggtttataaatccatttgtaagcatttatcccatatattttaaattcaagaaaaattgtgtttatctttagaattttgtattcaatactttatgtactatgtgactcatgcttctggataaataaagcaccaaatatgtatctgtaaccacaatcacacatattatattaaatatatatctatataa

SEQ ID NO: 25834 - DNA, 934 bp, Homo sapiens
  source 1..934: mol_type = unassigned DNA
agaagtgtctgacaaaacaaagaaacaaaacctcagtgaaaaatgtgcgcaagaaacatttcacaggatattctcatcttacagatgcacagtgctcattggcatatcaatggcaaatatgaggaaaagagtaacctgatgttctgggccaaggagattaagatcaagttgggaattctcctccagaagccagactcagttggtgaccttgtcattccgtacaatgagaagccagagaaaccagccaagacccagaaaacctcgctggacgaggccctgcagtggcgtgattccctggacaaactcctgcagaacaactatggacttgccagtttcaaaagtttcctgaagtctgaattcagtgaggaaaaccttgagttctggattgcctgtgaggattacaagaagatcaagtcccctgccaagatggctgagaaggcaaagcaaatttatgaagaattcattcaaacggaggctcctaaagaggtgaatattgaccacttcactaaggacatcacaatgaagaacctggtggaaccttccctgagcagctttgacatggcccagaaaagaatccatgccctgatggaaaaggattctctgcctcgctttgtgcgctctgagttttatcaggagttaatcaagtagtaatttagccaggctatgaaatcatcctgtgagttatttcctccataataaccctgcatttcccattaatctacatatcttcccacagcagctttgctcagtgatacccacatgggaaaaatcccaggggatgttgcttactctttttgcccacactgctttggatacttatctactgtccgaaggccttctttccccactcaattcttcctgccctgttattaattaagatatcttcagcttgtagtcagacacaatcagaatcacagaaaaatcctgcctaagg

SEQ ID NO: 25835 - DNA, 373 bp, Homo sapiens
  source 1..373: mol_type = unassigned DNA
atgtgcaaaggacttgcagctttgccccactcatgcctggaaagatggacttgccagtttcaaaagtttcctgaagtctgaattcagtgaggaaaaccttgagttctggattgcctgtgaggattacaagaagatcaagtcccctgccaagatggctgagaaggcaaagcaaatttatgaagaattcattcaaacggaggctcctaaagaggtgaatattgaccacttcactaaggacatcacaatgaagaacctggtggaaccttccctgagcagctttgacatggcccagaaaagaatccatgccctgatggaaaaggattctctgcctcgctttgtgcgctctgagttttatcaggagttaatcaagtag

SEQ ID NO: 25836 - DNA, 1362 bp, Homo sapiens
  source 1..1362: mol_type = unassigned DNA
atggctcaaggatccggggatcaaagagcagtgggggttgctgacccagaggagagttctccaaacatgatcgtttactgcaaaattgaagacatcattacaaagatgcaagatgacaagacagggggtgtgcccatcagaacagtcaagagctttctctccaaaatccccagtgtcgtcacaggtactgacattgtgcagtggcttatgaagaacctttccattgaggacccagttgaagcaatacacttggggagccttatcgctgcccagggctacatctttccaatctcagaccatgttctcaccatgaaggatgatggcaccttttatcgtttccaggctccgtacttctggccttcgaactgctgggaacctgaaaacactgactatgccatctatctctgtaagaggacaatgcaaaataaagcaaggctggaactggcagattatgaagcagaaaacttagcaagactccagagggcctttgcgaggaagtgggaattcatctttatgcaagcagaagcacaagtaaagattgaccggaaaaaagacaagacagaaaggaaaattttggatagtcaagaacgagccttttgggatgtccacaggcctgtgccaggctgtgtgaacacaacagaaatggatatccgaaaatgtcgacgtttgaagaatccacaaaaggttaaaaagtccgtgtatggcgtgactgaagagtcccaggcacagagcccggtgcatgtactcagccaaccaatcaggaaaacaacaaaagaggacatccggaaacagataacatttttgaacgcacagatcgacagacattgtttgaaaatgtccaaagtggctgaaagcaaagagcccagccaacagcgagtaaaaagatggggcttctctttcgatgagatattgaaggaccaggtggggcgggaccagtttctacgattcctggagtccgaattcagttcagaaaacctcaggttctggctggctgtccaagatcttaagaaacaacccctacaggatgtggccaagagggtagaagaaatctggcaagagtttctggctccaggggctccaagtgcaatcaacctggattctcacagctatgagataaccagtcaaaatgtcaaagatggagggagatatacatttgaagacgcccaggagcacatctacaagctgatgaagagtgacagctatgcccgcttcctccggtcaaatgcttaccaggatttgctgctggccaagaagaagccagaaagtgagcaaggtcgtagaacttccctagaaaagttcactcgcagtgtgggaaagtcgctggcgggcaagcgcctcacgggcctgatgcagtcctcctga

SEQ ID NO: 25837 - DNA, 1564 bp, Homo sapiens
  source 1..1564: mol_type = unassigned DNA
atggctcaaggatccggggatcaaagagcagtgggggttgctgacccagaggagagttctccaaacatgatcgtttactgcaaaattgaagacatcattacaaagatgcaagatgacaagacagggggtgtgcccatcagaacagtcaagagctttctctccaaaatccccagtgtcgtcacaggtactgacattgtgcagtggcttatgaagaacctttccattgaggacccagttgaagcaatacacttggggagccttatcgctgcccagggctacatctttccaatctcagaccatgttctcaccatgaaggatgatggcaccttttatcgtttccaggctccgtacttctggccttcgaactgctgggaacctgaaaacactgactatgccatctatctctgtaagaggacaatgcaaaataaagcaaggctggaactggcagattatgaagcagaaaacttagcaagactccagagggcctttgcgaggaagtgggaattcatctttatgcaagcagaagcacaagtaaagattgaccggaaaaaagacaagacagaaaggaaaattttggatagtcaagaacgagccttttgggatgtccacaggcctgtgccaggctgtgtgaacacaacagaaatggatatccgaaaatgtcgacgtttgaagaatccacaaaaggttaaaaagtccgtgtatggcgtgactgaagagtcccaggcacagagcccggtgcatgtactcagccaaccaatcaggaaaacaacaaaagaggacatccggaaacagataacatttttgaacgcacagatcgacagacattgtttgaaaatgtccaaagtggctgaaagtttaattgcctacacggaacaatatgtggaatatgaccctttgataacaccagctgagccatccaacccttggatcagcgatgacgttgctttgtgggacatagagatgagcaaagagcccagccaacagcgagtaaaaagatggggcttctctttcgatgagatattgaaggaccaggtggggcgggaccagtttctacgattcctggagtccgaattcagttcagaaaacctcaggttctggctggctgtccaagatcttaagaaacaacccctacaggatgtggccaagagggtagaagaaatctggcaagagtttctggctccaggggctccaagtgcaatcaacctggattctcacagctatgagataaccagtcaaaatgtcaaagatggagggagatatacatttgaagacgcccaggagcacatctacaagctgatgaagagtgacagctatgcccgcttcctccggtcaaatgcttaccaggatttgctgctggccaagaagaaggtgtggctactgtgatgggcagtgtggagcctggcctcctgtcgattcccctgctggaggatgccaatggaggggctcctttggaggaggccgacaccctcatacatggctctaatgcccattttttctaagaactagaggaaagaaaaattataggaacttttgataactccagcccagatctcatggatgaagg

SEQ ID NO: 25838 - DNA, 1419 bp, Homo sapiens
  source 1..1419: mol_type = unassigned DNA
atggctcaaggatccggggatcaaagagcagtgggggttgctgacccagaggagagttctccaaacatgatcgtttactgcaaaattgaagacatcattacaaagatgcaagatgacaagacagggggtgtgcccatcagaacagtcaagagctttctctccaaaatccccagtgtcgtcacaggtactgacattgtgcagtggcttatgaagaacctttccattgaggacccagttgaagcaatacacttggggagccttatcgctgcccagggctacatctttccaatctcagaccatgttctcaccatgaaggatgatggcaccttttatcgtttccaggctccgtacttctggccttcgaactgctgggaacctgaaaacactgactatgccatctatctctgtaagaggacaatgcaaaataaagcaaggctggaactggcagattatgaagcagaaaacttagcaagactccagagggcctttgcgaggaagtgggaattcatctttatgcaagcagaagcacaagtaaagattgaccggaaaaaagacaagacagaaaggaaaattttggatagtcaagaacgagccttttgggatgtccacaggcctgtgccaggctgtgtgaacacaacagaaatggatatccgaaaatgtcgacgtttgaagaatccacaaaaggttaaaaagtccgtgtatggcgtgactgaagagtcccaggcacagagcccggtgcatgtactcagccaaccaatcaggaaaacaacaaaagaggacatccggaaacagataacatttttgaacgcacagatcgacagacattgtttgaaaatgtccaaagtggctgaaagtttaattgcctacacggaacaatatgtggaatatgaccctttgataacaccagctgagccatccaacccttggatcagcgatgacgttgctttgtgggacatagagatgagcaaagagcccagccaacagcgagtaaaaagatggggcttctctttcgatgagatattgaaggaccaggtggggcgggaccagtttctacgattcctggagtccgaattcagttcagaaaacctcaggttctggctggctgtccaagatcttaagaaacaacccctacaggatgtggccaagagggtagaagaaatctggcaagagtttctggctccaggggctccaagtgcaatcaacctggattctcacagctatgagataaccagtcaaaatgtcaaagatggagggagatatacatttgaagacgcccaggagcacatctacaagctgatgaagagtgacagctatgcccgcttcctccggtcaaatgcttaccaggatttgctgctggccaagaagaagggaaagtcgctggcgggcaagcgcctcacgggcctgatgcagtcctcctga

SEQ ID NO: 25839 - DNA, 1497 bp, Homo sapiens
  source 1..1497: mol_type = unassigned DNA
atggctcaaggatccggggatcaaagagcagtgggggttgctgacccagaggagagttctccaaacatgatcgtttactgcaaaattgaagacatcattacaaagatgcaagatgacaagacagggggtgtgcccatcagaacagtcaagagctttctctccaaaatccccagtgtcgtcacaggtactgacattgtgcagtggcttatgaagaacctttccattgaggacccagttgaagcaatacacttggggagccttatcgctgcccagggctacatctttccaatctcagaccatgttctcaccatgaaggatgatggcaccttttatcgtttccaggctccgtacttctggccttcgaactgctgggaacctgaaaacactgactatgccatctatctctgtaagaggacaatgcaaaataaagcaaggctggaactggcagattatgaagcagaaaacttagcaagactccagagggcctttgcgaggaagtgggaattcatctttatgcaagcagaagcacaagtaaagattgaccggaaaaaagacaagacagaaaggaaaattttggatagtcaagaacgagccttttgggatgtccacaggcctgtgccaggctgtgtgaacacaacagaaatggatatccgaaaatgtcgacgtttgaagaatccacaaaaggttaaaaagtccgtgtatggcgtgactgaagagtcccaggcacagagcccggtgcatgtactcagccaaccaatcaggaaaacaacaaaagaggacatccggaaacagataacatttttgaacgcacagatcgacagacattgtttgaaaatgtccaaagtggctgaaagtttaattgcctacacggaacaatatgtggaatatgaccctttgataacaccagctgagccatccaacccttggatcagcgatgacgttgctttgtgggacatagagatgagcaaagagcccagccaacagcgagtaaaaagatggggcttctctttcgatgagatattgaaggaccaggtggggcgggaccagtttctacgattcctggagtccgaattcagttcagaaaacctcaggttctggctggctgtccaagatcttaagaaacaacccctacaggatgtggccaagagggtagaagaaatctggcaagagtttctggctccaggggctccaagtgcaatcaacctggattctcacagctatgagataaccagtcaaaatgtcaaagatggagggagatatacatttgaagacgcccaggagcacatctacaagctgatgaagagtgacagctatgcccgcttcctccggtcaaatgcttaccaggatttgctgctggccaagaagaagccagaaagtgagcaaggtcgtagaacttccctagaaaagttcactcgcagtgtgtgtctgcagcttctcttctagggatgaaaatgcaaaaaagagcaagcggctccctctgcagaaggtgcacccttg

SEQ ID NO: 25840 - DNA, 1476 bp, Homo sapiens
  source 1..1476: mol_type = unassigned DNA
atggctcaaggatccggggatcaaagagcagtgggggttgctgacccagaggagagttctccaaacatgatcgtttactgcaaaattgaagacatcattacaaagatgcaagatgacaagacagggggtgtgcccatcagaacagtcaagagctttctctccaaaatccccagtgtcgtcacaggtactgacattgtgcagtggcttatgaagaacctttccattgaggacccagttgaagcaatacacttggggagccttatcgctgcccagggctacatctttccaatctcagaccatgttctcaccatgaaggatgatggcaccttttatcgtttccaggctccgtacttctggccttcgaactgctgggaacctgaaaacactgactatgccatctatctctgtaagaggacaatgcaaaataaagcaaggctggaactggcagattatgaagcagaaaacttagcaagactccagagggcctttgcgaggaagtgggaattcatctttatgcaagcagaagcacaagtaaagattgaccggaaaaaagacaagacagaaaggaaaattttggatagtcaagaacgagccttttgggatgtccacaggcctgtgccaggctgtgtgaacacaacagaaatggatatccgaaaatgtcgacgtttgaagaatccacaaaaggttaaaaagtccgtgtatggcgtgactgaagagtcccaggcacagagcccggtgcatgtactcagccaaccaatcaggaaaacaacaaaagaggacatccggaaacagataacatttttgaacgcacagatcgacagacattgtttgaaaatgtccaaagtggctgaaagtttaattgcctacacggaacaatatgtggaatatgaccctttgataacaccagctgagccatccaacccttggatcagcgatgacgttgctttgtgggacatagagatgagcaaagagcccagccaacagcgagtaaaaagatggggcttctctttcgatgagatattgaaggaccaggtggggcgggaccagtttctacgattcctggagtccgaattcagttcagaaaacctcaggttctggctggctgtccaagatcttaagaaacaacccctacaggatgtggccaagagggtagaagaaatctggcaagagtttctggctccaggggctccaagtgcaatcaacctggattctcacagctatgagataaccagtcaaaatgtcaaagatggagggagatatacatttgaagacgcccaggagcacatctacaagctgatgaagagtgacagctatgcccgcttcctccggtcaaatgcttaccaggatttgctgctggccaagaagaagccagaaagtgagcaaggtcgtagaacttccctagaaaagttcactcgcagtgtgggatgaaaatgcaaaaaagagcaagcggctccctctgcagaaggtgcacccttg

SEQ ID NO: 25841 - DNA, 1497 bp, Homo sapiens
  source 1..1497: mol_type = unassigned DNA
atggctcaaggatccggggatcaaagagcagtgggggttgctgacccagaggagagttctccaaacatgatcgtttactgcaaaattgaagacatcattacaaagatgcaagatgacaagacagggggtgtgcccatcagaacagtcaagagctttctctccaaaatccccagtgtcgtcacaggtactgacattgtgcagtggcttatgaagaacctttccattgaggacccagttgaagcaatacacttggggagccttatcgctgcccagggctacatctttccaatctcagaccatgttctcaccatgaaggatgatggcaccttttatcgtttccaggctccgtacttctggccttcgaactgctgggaacctgaaaacactgactatgccatctatctctgtaagaggacaatgcaaaataaagcaaggctggaactggcagattatgaagcagaaaacttagcaagactccagagggcctttgcgaggaagtgggaattcatctttatgcaagcagaagcacaagtaaagattgaccggaaaaaagacaagacagaaaggaaaattttggatagtcaagaacgagccttttgggatgtccacaggcctgtgccaggctgtgtgaacacaacagaaatggatatccgaaaatgtcgacgtttgaagaatccacaaaaggttaaaaagtccgtgtatggcgtgactgaagagtcccaggcacagagcccggtgcatgtactcagccaaccaatcaggaaaacaacaaaagaggacatccggaaacagataacatttttgaacgcacagatcgacagacattgtttgaaaatgtccaaagtggctgaaagtttaattgcctacacggaacaatatgtggaatatgaccctttgataacaccagctgagccatccaacccttggatcagcgatgacgttgctttgtgggacatagagatgagcaaagagcccagccaacagcgagtaaaaagatggggcttctctttcgatgagatattgaaggaccaggtggggcgggaccagtttctacgattcctggagtccgaattcagttcagaaaacctcaggttctggctggctgtccaagatcttaagaaacaacccctacaggatgtggccaagagggtagaagaaatctggcaagagtttctggctccaggggctccaagtgcaatcaacctggattctcacagctatgagataaccagtcaaaatgtcaaagatggagggagatatacatttgaagacgcccaggagcacatctacaagctgatgaagagtgacagctatgcccgcttcctccggtcaaatgcttaccaggatttgctgctggccaagaagaagccagaaagtgagcaaggtcgtagaacttccctagaaaagttcactcgcagtgtgcttctcttctagggatgaaaatgcaaaaaagagcaagcggctccctctgcagaaggtgcacccttgatcgcccag

SEQ ID NO: 25842 - DNA, 1828 bp, Homo sapiens
  source 1..1828: mol_type = unassigned DNA
cgttgcaggtactgacattgtgcagtggcttatgaagaacctttccattgaggacccagttgaagcaatacacttggggagccttatcgctgcccagggctacatctttccaatctcagaccatgttctcaccatgaaggatgatggcaccttttatcgtttccaggctccgtacttctggccttcgaactgctgggaacctgaaaacactgactatgccatctatctctgtaagaggacaatgcaaaataaagcaaggctggaactggcagattatgaagcagaaaacttagcaagactccagagggcctttgcgaggaagtgggaattcatctttatgcaagcagaagcacaagtaaagattgaccggaaaaaagacaagacagaaaggaaaattttggatagtcaagaacgagccttttgggatgtccacaggcctgtgccaggctgtgtgaacacaacagaaatggatatccgaaaatgtcgacgtttgaagaatccacaaaaggttaaaaagtccgtgtatggcgtgactgaagagtcccaggcacagagcccggtgcatgtactcagccaaccaatcaggaaaacaacaaaagaggacatccggaaacagataacatttttgaacgcacagatcgacagacattgtttgaaaatgtccaaagtggctgaaagtttaattgcctacacggaacaatatgtggaatatgaccctttgataacaccagctgagccatccaacccttggatcagcgatgacgttgctttgtgggacatagagatgagcaaagagcccagccaacagcgagtaaaaagatggggcttctctttcgatgagatattgaaggaccaggtggggcgggaccagtttctacgattcctggagtccgaattcagttcagaaaacctcaggttctggctggctgtccaagatcttaagaaacaacccctacaggatgtggccaagagggtagaagaaatctggcaagagtttctggctccaggggctccaagtgcaatcaacctggattctcacagctatgagataaccagtcaaaatgtcaaagatggagggagatatacatttgaagacgcccaggagcacatctacaagctgatgaagagtgacagctatgcccgcttcctccggtcaaatgcttaccaggatttgctgctggccaagaagaagccagaaagtgagcaaggtcgtagaacttccctagaaaagttcactcgcagtgtgaatgtgcagaacacaaggcctgcgggtgcctggtctatcttcatggctgctttgccaatggccgtgtggctccgcacaccaagaagctgccacgggctgtcagagtcaaggcttctgggacttccttcactccatgatggcctgagagaaggacagagcctgcctcagtcctgtccggggagcagcagcaccgcagcagagggggccagagaaagagcatccaatggcaggagtctggcaaggcgacagcactgccaatgtcacggtcaaggagaggagacccaactctgcctgtggtccagactggaaagttcaaagagaagtcagagagcttcaagtctgaggacttcaaaggctaagaagaaaagacagactgtcaagcaaggaccgaaagcctggccttaacatcatagcacattacactgggaaatggagatggagcatccaagacaacacttaacccaaccttgtaatcttctgcagcaaaagtggtgggggaattctgatacgtgctctgtcctggttaatactagaaggttctgaggcatccataattctaaataattaaaggagtcaatcaat

SEQ ID NO: 25843 - DNA, 1480 bp, Homo sapiens
  source 1..1480: mol_type = unassigned DNA
attgaagacatcattacaaagatgcaagatgacaagacagggggtgtgcccatcagaacagtcaagagctttctctccaaaatccccagtgtcgtcacaggtactgacattgtgcagtggcttatgaagaacctttccattgaggacccagttgaagcaatacacttggggagccttatcgctgcccagggctacatctttccaatctcagaccatgttctcaccatgaaggatgatggcaccttttatcgtttccaggctccgtacttctggccttcgaactgctgggaacctgaaaacactgactatgccatctatctctgtaagaggacaatgcaaaataaagcaaggctggaactggcagattatgaagcagaaaacttagcaagactccagagggcctttgcgaggaagtgggaattcatctttatgcaagcagaagcacaagtaaagattgaccggaaaaaagacaagacagaaaggaaaattttggatagtcaagaacgagccttttgggatgtccacaggcctgtgccaggctgtgtgaacacaacagaaatggatatccgaaaatgtcgacgtttgaagaatccacaaaaggttaaaaagtccgtgtatggcgtgactgaagagtcccaggcacagagcccggtgcatgtactcagccaaccaatcaggaaaacaacaaaagaggacatccggaaacagataacatttttgaacgcacagatcgacagacattgtttgaaaatgtccaaagtggctgaaagtttaattgcctacacggaacaatatgtggaatatgaccctttgataacaccagctgagccatccaacccttggatcagcgatgacgttgctttgtgggacatagagatgagcaaagagcccagccaacagcgagtaaaaagatggggcttctctttcgatgagatattgaaggaccaggtggggcgggaccagtttctacgattcctggagtccgaattcagttcagaaaacctcaggttctggctggctgtccaagatcttaagaaacaacccctacaggatgtggccaagagggtagaagaaatctggcaagagtttctggctccaggggctccaagtgcaatcaacctggattctcacagctatgagataaccagtcaaaatgtcaaagatggagggagatatacatttgaagacgcccaggagcacatctacaagctgatgaagagtgacagctatgcccgcttcctccggtcaaatgcttaccaggatttgctgctggccaagaagaaggtgtggctactgtgatgggcagtgtggagcctggcctcctgtcgattcccctgctggaggatgccaatggaggggctcctttggaggaggccgacaccctcatacatggctctaatgcccattttttctaagaactagaggaaagaaaaattataggaacttttgataactccagcccagatctcatggatgaagg

SEQ ID NO: 25844 - DNA, 1103 bp, Homo sapiens
  source 1..1103: mol_type = unassigned DNA
aaaacactgactatgaaggaggaagacattgaagaaggaaagccatctatctctgtaagaggacaatgcaaaataaagcaaggctggaactggcagattatgaagcagaaaacttagcaagactccagagggcctttgcgaggaagtgggaattcatctttatgcaagcagaagcacaagtaaagattgaccggaaaaaagacaagacagaaaggaaaattttggatagtcaagaacgagccttttgggatgtccacaggcctgtgccaggctgtgtgaacacaacagaaatggatatccgaaaatgtcgacgtttgaagaatccacaaaaggttaaaaagtccgtgtatggcgtgactgaagagtcccaggcacagagcccggtgcatgtactcagccaaccaatcaggaaaacaacaaaagaggacatccggaaacagataacatttttgaacgcacagatcgacagacattgtttgaaaatgtccaaagtggctgaaagtttaattgcctacacggaacaatatgtggaatatgaccctttgataacaccagctgagccatccaacccttggatcagcgatgacgttgctttgtgggacatagagatgagcaaagagcccagccaacagcgagtaaaaagatggggcttctctttcgatgagatattgaaggaccaggtggggcgggaccagtttctacgattcctggagtccgaattcagttcagaaaacctcaggttctggctggctgtccaagatcttaagaaacaacccctacaggatgtggccaagagggtagaagaaatctggcaagagtttctggctccaggggctccaagtgcaatcaacctggattctcacagctatgagataaccagtcaaaatgtcaaagatggagggagatatacatttgaagacgcccaggagcacatctacaagctgatgaagagtgacagctatgcccgcttcctccggtcaaatgcttaccaggatttgctgctggccaagaagaagccagaaagtgagcaaggtcgtagaacttccctagaaaagttcactcgcagtgtgctttggttgttgtttcctttgggaaagcggccg

SEQ ID NO: 25845 - DNA, 2005 bp, Homo sapiens
  source 1..2005: mol_type = unassigned DNA
gcgagttggggcagctcctcgcgctcggccctgctcggcggcgagagctccgcctgggcgccgcgttcctacagccgccggagccgccaggcgccgagggaacggacagacctccgcgcacccttgccgaccggggcgggcagaggcgggcaagcggcgaacgcctgggagcgcggagagccaggccagcccggagcgcgccggggacaccctgtgcgccccgagtcccggcaccatgcgacccgccgcgcgtcctcgcgggcccggggcttcgctcttcgctcgctgagcccctgcgctcgccaccacggaaactcggaaagaggaggcgaggctgtggggagcggcgcggagacggactagacttcccctccgcccccaagaggctgccggtccccggttccctgggcttctccagctttatcatgaacctggcgcaaggttggctttaggaaaaattctggagccagagggagagtcaaggcaattctttggttgctaagtgtgagtgaagacactcaggatggctcaaggatccggggatcaaagagcagtgggggttgctgacccagaggagagttctccaaacatgatcgtttactgcaaaattgaagacatcattacaaagatgcaagatgacaagacagggggtgtgcccatcagaacagtcaagagctttctctccaaaatccccagtgtcgtcacaggtactgacattgtgcagtggcttatgaagaacctttccattgaggacccagttgaagcaatacacttggggagccttatcgctgcccagggctacatctttccaatctcagaccatgttctcaccatgaaggatgatggcaccttttatcgtttccaggctccgtacttctggccttcgaactgctgggaacctgaaaacactgactatgccatctatctctgtaagaggacaatgcaaaataaagcaaggctggaactggcagattatgaagcagaaaacttagcaagactccagagggcctttgcgaggaagtgggaattcatctttatgcaagcagaagcacaagtaaagattgaccggaaaaaagacaagacagaaaggaaaattttggatagtcaagaacgagccttttgggatgtccacaggcctgtgccaggctgtgtgaacacaacagaaatggatatccgaaaatgtcgacgtttgaagaatccacaaaaggttaaaaagtccgtgtatggcgtgactgaagagtcccaggcacagagcccggtgcatgtactcagccaaccaatcaggaaaacaacaaaagaggacatccggaaacagataacatttttgaacgcacagatcgacagacattgtttgaaaatgtccaaagtggctgaaagtttaattgcctacacggaacaatatgtggaatatgaccctttgataacaccagctgagccatccaacccttggatcagcgatgacgttgctttgtgggacatagagatgagcaaagagcccagccaacagcgagtaaaaagatggggcttctctttcgatgagatattgaaggaccaggtggggcgggaccagtttctacgattcctggagtccgaattcagttcagaaaacctcaggttctggctggctgtccaagatcttaagaaacaacccctacaggatgtggccaagagggtagaagaaatctggcaagagtttctggctccaggggctccaagtgcaatcaacctggattctcacagctatgagataaccagtcaaaatgtcaaagatggagggagatatacatttgaagacgcccaggagcacatctacaagctgatgaagagtgacagctatgcccgcttcctccggtcaaatgcttaccaggatttgctgctggccaagaagaagccagaaagtgagcaaggtcgtagaacttccctagaaaagttcactcgcagtgtgggaaagtcgctggcgggcaagcgcctcacgggcctgatgcagtcctcctgaccgttccta

SEQ ID NO: 25846 - DNA, 3105 bp, Homo sapiens
  source 1..3105: mol_type = unassigned DNA
gactgtggaagcacgagcttacataagtggttaggcaagctggcgtgtggacttgtgtgggatgggtgcaggtctgcatataaatcatgttcctgggtttctgggtgtgaagcgcacaccgacggggacgagagcgcagaggatggcgcttttagatacttccagtcttccgatgttgtgatcgcagtgtgagtgaagacactcaggatggctcaaggatccggggatcaaagagcagtgggggttgctgacccagaggagagttctccaaacatgatcgtttactgcaaaattgaagacatcattacaaagatgcaagatgacaagacagggggtgtgcccatcagaacagtcaagagctttctctccaaaatccccagtgtcgtcacaggtactgacattgtgcagtggcttatgaagaacctttccattgaggacccagttgaagcaatacacttggggagccttatcgctgcccagggctacatctttccaatctcagaccatgttctcaccatgaaggatgatggcaccttttatcgtttccaggctccgtacttctggccttcgaactgctgggaacctgaaaacactgactatgccatctatctctgtaagaggacaatgcaaaataaagcaaggctggaactggcagattatgaagcagaaaacttagcaagactccagagggcctttgcgaggaagtgggaattcatctttatgcaagcagaagcacaagtaaagattgaccggaaaaaagacaagacagaaaggaaaattttggatagtcaagaacgagccttttgggatgtccacaggcctgtgccaggctgtgtgaacacaacagaaatggatatccgaaaatgtcgacgtttgaagaatccacaaaaggttaaaaagtccgtgtatggcgtgactgaagagtcccaggcacagagcccggtgcatgtactcagccaaccaatcaggaaaacaacaaaagaggacatccggaaacagataacatttttgaacgcacagatcgacagacattgtttgaaaatgtccaaagtggctgaaagtttaattgcctacacggaacaatatgtggaatatgaccctttgataacaccagctgagccatccaacccttggatcagcgatgacgttgctttgtgggacatagagatgagcaaagagcccagccaacagcgagtaaaaagatggggcttctctttcgatgagatattgaaggaccaggtggggcgggaccagtttctacgattcctggagtccgaattcagttcagaaaacctcaggttctggctggctgtccaagatcttaagaaacaacccctacaggatgtggccaagagggtagaagaaatctggcaagagtttctggctccaggggctccaagtgcaatcaacctggattctcacagctatgagataaccagtcaaaatgtcaaagatggagggagatatacatttgaagacgcccaggagcacatctacaagctgatgaagagtgacagctatgcccgcttcctccggtcaaatgcttaccaggatttgctgctggccaagaagaagggaaagtcgctggcgggcaagcgcctcacgggcctgatgcagtcctcctgaccgttcctaccgcaggtccagggcctgggcccgcggaccccacaggcaggcggcggcgctccacatctgcggacagagtttccttacgaggagacttggtcactgtgaaggagaaagagtgagggcaatgaagggcgatggtggggagactcggtgggtgaatggggagaccagaaagaaagagtccacagagcctgggctgggcccggtggaggctcctgtttacagccctctcttctttgtacagttgtattccaacactccactcgctaagaggccctgatcccagctcattcaggggagaacacgtcgtggggttcctgtcacgactatcacttgagattatattattatcctcactccctcgctgtctggagacggtcacaccttctggcaaattcaagaggcatgagtggaccgagagcacatccagcatttgcatcacctccctggcacctcccatagttacagccactacatccccaccgccgcctgtcatccctcacgtctctgtggccacccgggtgtcactgccagcaccaggcactgctttcacgtaaaatgtccaaatcacatcttcagcaagaaagcaacctcacggattgccccgcctcaaggtctttccaccctctttgagatcagcgttcggagaggtccccgccagcccggtggctgccctcaggtcccgtcacatgtctcaagggtccagcgttcgaggaagcactgttgtagatgacagagctttttgtttcacagctgcggggattctgctgaccatcttttagaaaattatttcataatttattctggctttgcccccttgctccttggtttattccctcatgttttactcaaaataaacatggccatgaactcaggggccattgggattctcccctctggcagccccaggtgggagctgggagggtccccagcccaggaggtggctggattgcagggctggcagcccccacgtggtggcatcctgacaggcacagtgagacccttgctgggtcaggtctcctttgtgtgtgaagctggggcagagtatgctacgaagggaccaggccaggccacagggctctcctcccagtctttatctgaaggcccagccaaagcacccctctaaaccggtcacctaggggaaatgcaaaaacctgcaaaagatccacctgtattccctgtgtgtgtgtgtcaaaatgaccatttgccaacctggctgtgaggtaatgtatgtaaagcaccgagtcaggtgcctgatacgcagtaggtgcttagcaaacggtagctaatactatcatcattgtcattgttattgtgacacccatgagcccacagacagagctgtattaagtaacctgttttgaatccagacattcactcccccacttgctatgactaccctcctttgatctatttttggtcataggtaaaaaaaaaaatctctcttgggagcatataaacaaaaaacatagaagc

SEQ ID NO: 25847 - DNA, 1110 bp, Homo sapiens
  source 1..1110: mol_type = unassigned DNA
aaaacactgactatgaaggaggaagacattgaagaaggaaagccatctatctctgtaagaggacaatgcaaaataaagcaaggctggaactggcagattatgaagcagaaaacttagcaagactccagagggcctttgcgaggaagtgggaattcatctttatgcaagcagaagcacaagtaaagattgaccggaaaaaagacaagacagaaaggaaaattttggatagtcaagaacgagccttttgggatgtccacaggcctgtgccaggctgtgtgaacacaacagaaatggatatccgaaaatgtcgacgtttgaagaatccacaaaaggttaaaaagtccgtgtatggcgtgactgaagagtcccaggcacagagcccggtgcatgtactcagccaaccaatcaggaaaacaacaaaagaggacatccggaaacagataacatttttgaacgcacagatcgacagacattgtttgaaaatgtccaaagtggctgaaagtttaattgcctacacggaacaatatgtggaatatgaccctttgataacaccagctgagccatccaacccttggatcagcgatgacgttgctttgtgggacatagagatgagcaaagagcccagccaacagcgagtaaaaagatggggcttctctttcgatgagatattgaaggaccaggtggggcgggaccagtttctacgattcctggagtccgaattcagttcagaaaacctcaggttctggctggctgtccaagatcttaagaaacaacccctacaggatgtggccaagagggtagaagaaatctggcaagagtttctggctccaggggctccaagtgcaatcaacctggattctcacagctatgagataaccagtcaaaatgtcaaagatggagggagatatacatttgaagacgcccaggagcacatctacaagctgatgaagagtgacagctatgcccgcttcctccggtcaaatgcttaccaggatttgctgctggccaagaagaagccagaaagtgagcaaggtcgtagaacttccctagaaaagttcactcgcagtgtgttgtattccaacactccactcgctaagaggccctgatccc

SEQ ID NO: 25848 - DNA, 1764 bp, Homo sapiens
  source 1..1764: mol_type = unassigned DNA
agccaggccagcccggagcgcgccggggacaccctgtgcgccccgagtcccggcaccatgcgacccgccgcgcgtcctcgcgggcccggggcttcgctcttcgctcgctgagcccctgcgctcgccaccacggaaactcggaaagaggaggcgaggctgtggggagcggcgcggagacggactagacttcccctccgcccccaagaggctgccggtccccggttccctgggcttctccagctttatcatgaacctggcgcaaggttggctttaggaaaaattctggagccagagggagagtcaaggcaattctttggttgctaagtgtgagtgaagacactcaggatggctcaaggatccggggatcaaagagcagtgggggttgctgacccagaggagagttctccaaacatgatcgtttactgcaaaattgaagacatcattacaaagatgcaagatgacaagacagggggtgtgcccatcagaacagtcaagagctttctctccaaaatccccagtgtcgtcacaggtactgacattgtgcagtggcttatgaagaacctttccattgaggacccagttgaagcaatacacttggggagccttatcgctgcccagggctacatctttccaatctcagaccatgttctcaccatgaaggatgatggcaccttttatcgtttccaggctccgtacttctggccttcgaactgctgggaacctgaaaacactgactatgccatctatctctgtaagaggacaatgcaaaataaagcaaggctggaactggcagattatgaagcagaaaacttagcaagactccagagggcctttgcgaggaagtgggaattcatctttatgcaagcagaagcacaagtaaagattgaccggaaaaaagacaagacagaaaggaaaattttggatagtcaagaacgagccttttgggatgtccacaggcctgtgccaggctgtgtgaacacaacagaaatggatatccgaaaatgtcgacgtttgaagaatccacaaaaggttaaaaagtccgtgtatggcgtgactgaagagtcccaggcacagagcccggtgcatgtactcagccaaccaatcaggaaaacaacaaaagaggacatccggaaacagataacatttttgaacgcacagatcgacagacattgtttgaaaatgtccaaagtggctgaaagtttaattgcctacacggaacaatatgtggaatatgaccctttgataacaccagctgagccatccaacccttggatcagcgatgacgttgctttgtgggacatagagatgagcaaagagcccagccaacagcgagtaaaaagatggggcttctctttcgatgagatattgaaggaccaggtggggcgggaccagtttctacgattcctggagtccgaattcagttcagaaaacctcaggttctggctggctgtccaagatcttaagaaacaacccctacaggatgtggccaagagggtagaagaaatctggcaagagtttctggctccaggggctccaagtgcaatcaacctggattctcacagctatgagataaccagtcaaaatgtcaaagatggagggagatatacatttgaagacgcccaggagcacatctacaagctgatgaagagtgacagctatgcccgcttcctccggtcaaatgcttaccaggatttgctgctggccaagaagaagggaaagtcgctggcgggcaagcgcctcacgggcctgatgcagtcctcctga

SEQ ID NO: 25849 - DNA, 1689 bp, Homo sapiens
  source 1..1689: mol_type = unassigned DNA
caccgacggggacgagagcgcagaggatggcgcttttagatacttccagtcttccgatgttgtgatcgcagtgtgagtgaagacactcaggatggctcaaggatccggggatcaaagagcagtgggggttgctgacccagaggagagttctccaaacatgatcgtttactgcaaaattgaagacatcattacaaagatgcaagatgacaagacagggggtgtgcccatcagaacagtcaagagctttctctccaaaatccccagtgtcgtcacaggtactgacattgtgcagtggcttatgaagaacctttccattgaggacccagttgaagcaatacacttggggagccttatcgctgcccagggctacatctttccaatctcagaccatgttctcaccatgaaggatgatggcaccttttatcgtttccaggctccgtacttctggccttcgaactgctgggaacctgaaaacactgactatgccatctatctctgtaagaggacaatgcaaaataaagcaaggctggaactggcagattatgaagcagaaaacttagcaagactccagagggcctttgcgaggaagtgggaattcatctttatgcaagcagaagcacaagtaaagattgaccggaaaaaagacaagacagaaaggaaaattttggatagtcaagaacgagccttttgggatgtccacaggcctgtgccaggctgtgtgaacacaacagaaatggatatccgaaaatgtcgacgtttgaagaatccacaaaaggttaaaaagtccgtgtatggcgtgactgaagagtcccaggcacagagcccggtgcatgtactcagccaaccaatcaggaaaacaacaaaagaggacatccggaaacagataacatttttgaacgcacagatcgacagacattgtttgaaaatgtccaaagtggctgaaagtttaattgcctacacggaacaatatgtggaatatgaccctttgataacaccagctgagccatccaacccttggatcagcgatgacgttgctttgtgggacatagagatgagcaaagagcccagccaacagcgagtaaaaagatggggcttctctttcgatgagatattgaaggaccaggtggggcgggaccagtttctacgattcctggagtccgaattcagttcagaaaacctcaggttctggctggctgtccaagatcttaagaaacaacccctacaggatgtggccaagagggtagaagaaatctggcaagagtttctggctccaggggctccaagtgcaatcaacctggattctcacagctatgagataaccagtcaaaatgtcaaagatggagggagatatacatttgaagacgcccaggagcacatctacaagctgatgaagagtgacagctatgcccgcttcctccggtcaaatgcttaccaggatttgctgctggccaagaagaagccagaaagtgagcaaggtcgtagaacttccctagaaaagttcactcgcagtgtgggaaagtcgctggcgggcaagcgcctcacgggcctgatgcagtcctcctgaccgttcctaccgcaggtccagggcctgggcccgcggaccccacaggcaggcggcggcgctccacatctgcggacagagtttccttacgaggagacttggtcactgtgaaggagaaagagtgaggg

SEQ ID NO: 25850 - DNA, 2111 bp, Homo sapiens
  source 1..2111: mol_type = unassigned DNA
gttaggcaagctggcgtgtggacttgtgtgggatgggtgcaggtctgcatataaatcatgttcctgggtttctgggtgtgaagcgcacaccgacggggacgagagcgcagaggatggcgcttttagatacttccagtcttccgatgttgtgatcgcagtgtgagtgaagacactcaggatggctcaaggatccggggatcaaagagcagtgggggttgctgacccagaggagagttctccaaacatgatcgtttactgcaaaattgaagacatcattacaaagatgcaagatgacaagacagggggtgtgcccatcagaacagtcaagagctttctctccaaaatccccagtgtcgtcacaggtactgacattgtgcagtggcttatgaagaacctttccattgaggacccagttgaagcaatacacttggggagccttatcgctgcccagggctacatctttccaatctcagaccatgttctcaccatgaaggatgatggcaccttttatcgtttccaggctccgtacttctggccttcgaactgctgggaacctgaaaacactgactatgccatctatctctgtaagaggacaatgcaaaataaagcaaggctggaactggcagattatgaagcagaaaacttagcaagactccagagggcctttgcgaggaagtgggaattcatctttatgcaagcagaagcacaagtaaagattgaccggaaaaaagacaagacagaaaggaaaattttggatagtcaagaacgagccttttgggatgtccacaggcctgtgccaggctgtgtgaacacaacagaaatggatatccgaaaatgtcgacgtttgaagaatccacaaaaggttaaaaagtccgtgtatggcgtgactgaagagtcccaggcacagagcccggtgcatgtactcagccaaccaatcaggaaaacaacaaaagaggacatccggaaacagataacatttttgaacgcacagatcgacagacattgtttgaaaatgtccaaagtggctgaaagtttaattgcctacacggaacaatatgtggaatatgaccctttgataacaccagctgagccatccaacccttggatcagcgatgacgttgctttgtgggacatagagatgagcaaagagcccagccaacagcgagtaaaaagatggggcttctctttcgatgagatattgaaggaccaggtggggcgggaccagtttctacgattcctggagtccgaattcagttcagaaaacctcaggttctggctggctgtccaagatcttaagaaacaacccctacaggatgtggccaagagggtagaagaaatctggcaagagtttctggctccaggggctccaagtgcaatcaacctggattctcacagctatgagataaccagtcaaaatgtcaaagatggagggagatatacatttgaagacgcccaggagcacatctacaagctgatgaagagtgacagctatgcccgcttcctccggtcaaatgcttaccaggatttgctgctggccaagaagaagaaagtgagcaaggtcgtagaacttccctagaaaagttcactcgcagtgtgtgctgctggcgcagagtcagaatggccgctgcatttcacccccgaggtggcttccttccagcagtggggaaagtcgctggcgggcaagcgcctcacgggcctgatgcagtcctcctgaccgttcctaccgcaggtccagggcctgggcccgcggaccccacaggcaggcggcggcgctccacatctgcggacagagtttccttacgaggagacttggtcactgtgaaggagaaagagtgagggcaatgaagggcgatggtggggagactcggtgggtgaatggggagaccagaaagaaagagtccacagagcctgggctgggcccggtggaggctcctgtttacagccctctcttctttgtacagttgtattccaacactccactcgctaagaggccctgatcccagctcattcaggggagaacacgtcgtggggttcctgtcacgactatcacttgagattatattattatcctcactccctcgctgtctggagacggtcacaccttctggcaa

SEQ ID NO: 25851 - DNA, 1822 bp, Homo sapiens
  source 1..1822: mol_type = unassigned DNA
tctttgaaagcagtcacacagcaggttaacaccctgcctccatgctgctcagtgaaacgttgcatttatggcttcccaaggaagggggaatctttatgtaggtttacaaagctgcttccgtgaaccgcagccatgagaaggttcacggataaattatgtctggataaagataaaaacagctgaatgcatgtacatgatcacgttttcagtctagaacaccaatcctatttttacttggagttaaaatttttttctcttgtggaaatgatgactcagaaaaatggaatattttggaatacaaccacagaagtcacttttactttccagcctcctattctcactcctttgggatcccatgaactgagaggggatgagactatacaaagaaaacactgccactcatagctacgcacctaaattcagcccgaagcagagatggaagacgtcatagcacggatgcaagatgaaaaaaatggaattcctattcgtacggtcaaaagctttctttccaagatacctagcgtcttctctggttcagacattgttcaatggttgataaagaacttaactatagaagatccagtggaggcgctccatttgggaacattaatggctgcccacggctacttctttccaatctcagatcatgtcctcacactcaaggatgatggcaccttttaccggtttcaaaccccctatttttggccatcaaattgttgggagccggaaaacacagattatgccgtttacctctgcaagagaacaatgcaaaacaaggcacgactggagctcgcagactatgaggctgagagcctggccaggctgcagagagcatttgcccggaagtgggagttcattttcatgcaagcagaagcacaagcaaaagtggacaagaagagagacaagattgaaaggaagatccttgacagccaagagagagcgttctgggacgtgcacaggcccgtgcctggatgtgtaaatacaactgaagtggacattaagaagtcatccagaatgagaaacccccacaaaacacggaagtctgtctatggtttacaaaatgatattagaagtcacagtcctacccacacacccacaccagaaactaaacctccaacagaagatgagttacaacaacagataaaatattggcaaatacagttagatagacatcggttaaaaatgtcaaaagtcgctgacagtctactaagttacacggaacagtatttagaatacgacccgtttcttttgccacctgacccttctaacccatggctgtccgatgacaccactttctgggaacttgaggcaagcaaagaaccgagccagcagagggtaaaacgatggggttttggcatggacgaggcattgaaagacccagttgggagagaacagttccttaaatttctagagtcagaattcagctcggaaaatttaagattctggctggcagtggaggacctgaaaaagaggcctattaaagaagtaccctcaagagttcaggaaatatggcaagagtttctggctcccggagcccccagtgctattaacttggattccaagagttatgacaaaaccacacagaacgtgaaggaacctggacgatacacatttgaagatgctcaggagcacatttacaaactgatgaaaagtgattcatacccacgttttataagatccagtgcctatcaggagcttctacaggcaaagaaaaagggcagaaacatccctattttcccatgccataaaaactgtacaccaacactgagggccagcactaacctgttatgaaaagaggtcatcgttgcagaaagataaaaga

SEQ ID NO: 25852 - DNA, 1980 bp, Homo sapiens
  source 1..1980: mol_type = unassigned DNA
atggcccaggggaataattatgggcagaccagcaacggggtggccgatgaatcacccaacatgctggtgtacagaaagatggaagacgtcatagcacggatgcaagatgaaaaaaatggaattcctattcgtacggtcaaaagctttctttccaagatacctagcgtcttctctggttcagacattgttcaatggttgataaagaacttaactatagaagatccagccgtttacctctgcaagagaacaatgcaaaacaaggcacgactggagctcgcagactatgaggctgagagcctggccaggctgcagagagcatttgcccggaagtgggagttcattttcatgcaagcagaagcacaagcaaaagtggacaagaagagagacaagattgaaaggaagatccttgacagccaagagagagcgttctgggacgtgcacaggcccgtgcctggatgtgtaaatacaactgaagtggacattaagaagtcatccagaatgagaaacccccacaaaacacggaagtctgtctatggtttacaaaatgatattagaagtcacagtcctacccacacacccacaccagaaactaaacctccaacagaagatgagttacaacaacagataaaatattggcaaatacagttagatagacatcggttaaaaatgtcaaaagtcgctgacagtctactaagttacacggaacagtatttagaatacgacccgtttcttttgccacctgacccttctaacccatggctgtccgatgacaccactttctgggaacttgaggcaagcaaagaaccgagccagcagagggtaaaacgatggggttttggcatggacgaggcattgaaagacccagttgggagagaacagttccttaaatttctagagtcagaattcagctcggaaaatttaagattctggctggcagtggaggacctgaaaaagaggcctattaaagaagtaccctcaagagttcaggaaatatggcaagagtttctggctcccggagcccccagtgctattaacttggattccaagagttatgacaaaaccacacagaacgtgaaggaacctggacgatacacatttgaagatgctcaggagcacatttacaaactgatgaaaagtgattcatacccacgttttataagatccagtgcctatcaggagcttctacaggcaaagaaaaagggcagaaacatccctattttcccatgccataaaaactgtacaccaacactgagggccagcactaacctgttatgaaaagaggggaaatctctcacgtccaagaggttaacaagccttgctcagtcttactaaacggatcatcttgtagcatgaatgcagactggagtcactgcacacactttgtagctcaatgttgtgacctggagcagaggacattagaacaagatgttgcatgagcaaaggacctaaattgttatttttgtgtgtacattccatctccaatggactcttccgtctcaatgcctccattccaaactgttgtctgctttctttctccttctactatgctggatctgtgtctcttcctttttaacaagttcaagtgaagtaaaaccttttctttttttccttctttctctctctctctctctcaaagcttcagttagacacacagttcactgaaaattcagtcagtcaaaaactggaagaactgtaaaagaaaaaagtatatatcaataagtatacatgtggcttcacatttattaaacaataaattccgcacagaaagtttcatttcaccaatgtgtcacagtcagaaacaaactcatgtcttcgtctgttgtctgtacattctccgttaatgtttctcgcatttatttttataccatatttaaagaagaaacaccttttactccaaatgtattaaagttgatcccttctctgtaaatttgtgtatgtttatattgttgttttatctttcattaaaagatgcagaatctc

SEQ ID NO: 25853 - DNA, 1410 bp, Homo sapiens
  source 1..1410: mol_type = unassigned DNA
atggcccaggggaataattatgggcagaccagcaacggggtggccgatgaatcacccaacatgctggtgtacagaaagatggaagacgtcatagcacggatgcaagatgaaaaaaatggaattcctattcgtacggtcaaaagctttctttccaagatacctagcgtcttctctggttcagacattgttcaatggttgataaagaacttaactatagaagatccagtggaggcgctccatttgggaacattaatggctgcccacggctacttctttccaatctcagatcatgtcctcacactcaaggatgatggcaccttttaccggtttcaaaccccctatttttggccatcaaattgttgggagccggaaaacacagattatgccgtttacctctgcaagagaacaatgcaaaacaaggcacgactggagctcgcagactatgaggctgagagcctggccaggctgcagagagcatttgcccggaagtgggagttcattttcatgcaagcagaagcacaagcaaaagtggacaagaagagagacaagattgaaaggaagatccttgacagccaagagagagcgttctgggacgtgcacaggcccgtgcctggatgtgtaaatacaactgaagtggacattaagaagtcatccagaatgagaaacccccacaaaacacggaagtctgtctatggtttacaaaatgatattagaagtcacagtcctacccacacacccacaccagaaactaaacctccaacagaagatgagttacaacaacagataaaatattggcaaatacagttagatagacatcggttaaaaatgtcaaaagtcgctgacagtctactaagttacacggaacagtatttagaatacgacccgtttcttttgccacctgacccttctaacccatggctgtccgatgacaccactttctgggaacttgaggcaagcaaagaaccgagccagcagagggtaaaacgatggggttttggcatggacgaggcattgaaagacccagttgggagagaacagttccttaaatttctagagtcagaattcagctcggaaaatttaagattctggctggcagtggaggacctgaaaaagaggcctattaaagaagtaccctcaagagttcaggaaatatggcaagagtttctggctcccggagcccccagtgctattaacttggattccaagagttatgacaaaaccacacagaacgtgaaggaacctggacgatacacatttgaagatgctcaggagcacatttacaaactgatgaaaagtgattcatacccacgttttataagatccagtgcctatcaggagcttctacaggcaaagaaaaaggggaaatctctcacgtccaagaggttaacaagccttgctcagtcttactaa

SEQ ID NO: 25854 - DNA, 2206 bp, Homo sapiens
  source 1..2206: mol_type = unassigned DNA
tgaccttggcggaggagggcacactgataattcttgtatcttgagagtggaccaagttttgggtgacatggcccaggggaataattatgggcagaccagcaacggggtggccgatgaatcacccaacatgctggtgtacagaaagatggaagacgtcatagcacggatgcaagatgaaaaaaatggaattcctattcgtacggtcaaaagctttctttccaagatacctagcgtcttctctggttcagacattgttcaatggttgataaagaacttaactatagaagatccagtggaggcgctccatttgggaacattaatggctgcccacggctacttctttccaatctcagatcatgtcctcacactcaaggatgatggcaccttttaccggtttcaaaccccctatttttggccatcaaattgttgggagccggaaaacacagattatgccgtttacctctgcaagagaacaatgcaaaacaaggcacgactggagctcgcagactatgaggctgagagcctggccaggctgcagagagcatttgcccggaagtgggagttcattttcatgcaagcagaagcacaagcaaaagtggacaagaagagagacaagattgaaaggaagatccttgacagccaagagagagcgttctgggacgtgcacaggcccgtgcctggatgtgtaaatacaactgaagtggacattaagaagtcatccagaatgagaaacccccacaaaacacggaagtctgtctatggtttacaaaatgatattagaagtcacagtcctacccacacacccacaccagaaactaaacctccaacagaagatgagttacaacaacagataaaatattggcaaatacagttagatagacatcggttaaaaatgtcaaaagtcgctgacagtctactaagttacacggaacagtatttagaatacgacccgtttcttttgccacctgacccttctaacccatggctgtccgatgacaccactttctgggaacttgaggcaagcaaagaaccgagccagcagagggtaaaacgatggggttttggcatggacgaggcattgaaagacccagttgggagagaacagttccttaaatttctagagtcagaattcagctcggaaaatttaagattctggctggcagtggaggacctgaaaaagaggcctattaaagaagtaccctcaagagttcaggaaatatggcaagagtttctggctcccggagcccccagtgctattaacttggattccaagagttatgacaaaaccacacagaacgtgaaggaacctggacgatacacatttgaagatgctcaggagcacatttacaaactgatgaaaagtgattcatacccacgttttataagatccagtgcctatcaggagcttctacaggcaaagaaaaagggcagaaacatccctattttcccatgccataaaaactgtacaccaacactgagggccagcactaacctgttatgaaaagaggggaaatctctcacgtccaagaggttaacaagccttgctcagtcttactaaacggatcatcttgtagcatgaatgcagactggagtcactgcacacactttgtagctcaatgttgtgacctggagcagaggacattagaacaagatgttgcatgagcaaaggacctaaattgttatttttgtgtgtacattccatctccaatggactcttccgtctcaatgcctccattccaaactgttgtctgctttctttctccttctactatgctggatctgtgtctcttcctttttaacaagttcaagtgaagtaaaaccttttctttttttccttctttctctctctctctctctcaaagcttcagttagacacacagttcactgaaaattcagtcagtcaaaaactggaagaactgtaaaagaaaaaagtatatatcaataagtatacatgtggcttcacatttattaaacaataaattccgcacagaaagtttcatttcaccaatgtgtcacagtcagaaacaaactcatgtcttcgtctgttgtctgtacattctccgttaatgtttctcgcatttatttttataccatatttaaagaagaaacaccttttactccaaatgtattaaagttgatcccttctctgtaaatttgtgtatgtttatattgttgttttatctttcattaaaagatgcagaatctc

SEQ ID NO: 25855 - DNA, 2295 bp, Homo sapiens
  source 1..2295: mol_type = unassigned DNA
gggcggcggcgaggcgagggtggcggtcgcctgagcagctagagccggggcggcgcggaatccgcatccgccgcgagtgtgatgaagctaccctgcctcgctgctccgcttgccgccagctgacaccgcctgcacccagcccgcccgggaggggagacgccgcggggccgtgaccttggcggaggagggcacactgataattcttgtatcttgagagtggaccaagttttgggtgacatggcccaggggaataattatgggcagaccagcaacggggtggccgatgaatcacccaacatgctggtgtacagaaagatggaagacgtcatagcacggatgcaagatgaaaaaaatggaattcctattcgtacggtcaaaagctttctttccaagatacctagcgtcttctctggttcagacattgttcaatggttgataaagaacttaactatagaagatccagtggaggcgctccatttgggaacattaatggctgcccacggctacttctttccaatctcagatcatgtcctcacactcaaggatgatggcaccttttaccggtttcaaaccccctatttttggccatcaaattgttgggagccggaaaacacagattatgccgtttacctctgcaagagaacaatgcaaaacaaggcacgactggagctcgcagactatgaggctgagagcctggccaggctgcagagagcatttgcccggaagtgggagttcattttcatgcaagcagaagcacaagcaaaagtggacaagaagagagacaagattgaaaggaagatccttgacagccaagagagagcgttctgggacgtgcacaggcccgtgcctggatgtgtaaatacaactgaagtggacattaagaagtcatccagaatgagaaacccccacaaaacacggaagtctgtctatggtttacaaaatgatattagaagtcacagtcctacccacacacccacaccagaaactaaacctccaacagaagatgagttacaacaacagataaaatattggcaaatacagttagatagacatcggttaaaaatgtcaaaagtcgctgacagtctactaagttacacggaacagtatttagaatacgacccgtttcttttgccacctgacccttctaacccatggctgtccgatgacaccactttctgggaacttgaggcaagcaaagaaccgagccagcagagggtaaaacgatggggttttggcatggacgaggcattgaaagacccagttgggagagaacagttccttaaatttctagagtcagaattcagctcggaaaatttaagattctggctggcagtggaggacctgaaaaagaggcctattaaagaagtaccctcaagagttcaggaaatatggcaagagtttctggctcccggagcccccagtgctattaacttggattccaagagttatgacaaaaccacacagaacgtgaaggaacctggacgatacacatttgaagatgctcaggagcacatttacaaactgatgaaaagtgattcatacccacgttttataagatccagtgcctatcaggagcttctacaggcaaagaaaaaggggaaatctctcacgtccaagaggttaacaagccttgctcagtcttactaaacggatcatcttgtagcatgaatgcagactggagtcactgcacacactttgtagctcaatgttgtgacctggagcagaggacattagaacaagatgttgcatgagcaaaggacctaaattgttatttttgtgtgtacattccatctccaatggactcttccgtctcaatgcctccattccaaactgttgtctgctttctttctccttctactatgctggatctgtgtctcttcctttttaacaagttcaagtgaagtaaaaccttttctttttttccttctttctctctctctctctctcaaagcttcagttagacacacagttcactgaaaattcagtcagtcaaaaactggaagaactgtaaaagaaaaaagtatatatcaataagtatacatgtggcttcacatttattaaacaataaattccgcacagaaagtttcatttcaccaatgtgtcacagtcagaaacaaactcatgtcttcgtctgttgtctgtacattctccgttaatgtttctcgcatttatttttataccatatttaaagaagaaacaccttttactccaaatgtattaaagttgatcccttctctgtaaatttgtgtatgtttatattgttgttttatctttcattaaaagatgcagaatctc

SEQ ID NO: 25856 - DNA, 2494 bp, Homo sapiens
  source 1..2494: mol_type = unassigned DNA
gtcgcgcgcacgggccgggcgtctcgactcccgcgcgcgctcggctggtcccagtccccgggagaagaagcggaggagggagagagccagcgaggcggcccaggggagcgggcgcgagtggcggctgccggagccgcctgtgcacgggcggcggcgaggcgagggtggcggtcgcctgagcagctagagccggggcggcgcggaatccgcatccgccgcgagtgtgatgaagctaccctgcctcgctgctccgcttgccgccagctgacaccgcctgcacccagcccgcccgggaggggagacgccgcggggccgtgaccttggcggaggagggcacactgataattcttgtatcttgagagtggaccaagttttgggtgacatggcccaggggaataattatgggcagaccagcaacggggtggccgatgaatcacccaacatgctggtgtacagaaagatggaagacgtcatagcacggatgcaagatgaaaaaaatggaattcctattcgtacggtcaaaagctttctttccaagatacctagcgtcttctctggttcagacattgttcaatggttgataaagaacttaactatagaagatccagtggaggcgctccatttgggaacattaatggctgcccacggctacttctttccaatctcagatcatgtcctcacactcaaggatgatggcaccttttaccggtttcaaaccccctatttttggccatcaaattgttgggagccggaaaacacagattatgccgtttacctctgcaagagaacaatgcaaaacaaggcacgactggagctcgcagactatgaggctgagagcctggccaggctgcagagagcatttgcccggaagtgggagttcattttcatgcaagcagaagcacaagcaaaagtggacaagaagagagacaagattgaaaggaagatccttgacagccaagagagagcgttctgggacgtgcacaggcccgtgcctggatgtgtaaatacaactgaagtggacattaagaagtcatccagaatgagaaacccccacaaaacacggaagtctgtctatggtttacaaaatgatattagaagtcacagtcctacccacacacccacaccagaaactaaacctccaacagaagatgagttacaacaacagataaaatattggcaaatacagttagatagacatcggttaaaaatgtcaaaagtcgctgacagtctactaagttacacggaacagtatttagaatacgacccgtttcttttgccacctgacccttctaacccatggctgtccgatgacaccactttctgggaacttgaggcaagcaaagaaccgagccagcagagggtaaaacgatggggttttggcatggacgaggcattgaaagacccagttgggagagaacagttccttaaatttctagagtcagaattcagctcggaaaatttaagattctggctggcagtggaggacctgaaaaagaggcctattaaagaagtaccctcaagagttcaggaaatatggcaagagtttctggctcccggagcccccagtgctattaacttggattccaagagttatgacaaaaccacacagaacgtgaaggaacctggacgatacacatttgaagatgctcaggagcacatttacaaactgatgaaaagtgattcatacccacgttttataagatccagtgcctatcaggagcttctacaggcaaagaaaaagtctggaaactcaatggatcgcagaacatcttttgaaaaatttgcacagaatgtggggaaatctctcacgtccaagaggttaacaagccttgctcagtcttactaaacggatcatcttgtagcatgaatgcagactggagtcactgcacacactttgtagctcaatgttgtgacctggagcagaggacattagaacaagatgttgcatgagcaaaggacctaaattgttatttttgtgtgtacattccatctccaatggactcttccgtctcaatgcctccattccaaactgttgtctgctttctttctccttctactatgctggatctgtgtctcttcctttttaacaagttcaagtgaagtaaaaccttttctttttttccttctttctctctctctctctctcaaagcttcagttagacacacagttcactgaaaattcagtcagtcaaaaactggaagaactgtaaaagaaaaaagtatatatcaataagtatacatgtggcttcacatttattaaacaataaattccgcacagaaagtttcatttcaccaatgtgtcacagtcagaaacaaactcatgtcttcgtctgttgtctgtacattctccgttaatgtttctcgcatttatttttataccatatttaaagaagaaacaccttttactccaaatgtattaaagttgatcccttctctgtaaatttgtgtatgtttatattgttgttttatctttcattaaaagatgcagaatctc

SEQ ID NO: 25857 - DNA, 1275 bp, Homo sapiens
  source 1..1275: mol_type = unassigned DNA
atggcccaggggaataattatgggcagaccagcaacggggtggccgatgaatcacccaacatgctggtgtacagaaagatggaagacgtcatagcacggatgcaagatgaaaaaaatggaattcctattcgtacggtcaaaagctttctttccaagatacctagcgtcttctctggttcagacattgttcaatggttgataaagaacttaactatagaagatccagccgtttacctctgcaagagaacaatgcaaaacaaggcacgactggagctcgcagactatgaggctgagagcctggccaggctgcagagagcatttgcccggaagtgggagttcattttcatgcaagcagaagcacaagcaaaagtggacaagaagagagacaagattgaaaggaagatccttgacagccaagagagagcgttctgggacgtgcacaggcccgtgcctggatgtgtaaatacaactgaagtggacattaagaagtcatccagaatgagaaacccccacaaaacacggaagtctgtctatggtttacaaaatgatattagaagtcacagtcctacccacacacccacaccagaaactaaacctccaacagaagatgagttacaacaacagataaaatattggcaaatacagttagatagacatcggttaaaaatgtcaaaagtcgctgacagtctactaagttacacggaacagtatttagaatacgacccgtttcttttgccacctgacccttctaacccatggctgtccgatgacaccactttctgggaacttgaggcaagcaaagaaccgagccagcagagggtaaaacgatggggttttggcatggacgaggcattgaaagacccagttgggagagaacagttccttaaatttctagagtcagaattcagctcggaaaatttaagattctggctggcagtggaggacctgaaaaagaggcctattaaagaagtaccctcaagagttcaggaaatatggcaagagtttctggctcccggagcccccagtgctattaacttggattccaagagttatgacaaaaccacacagaacgtgaaggaacctggacgatacacatttgaagatgctcaggagcacatttacaaactgatgaaaagtgattcatacccacgttttataagatccagtgcctatcaggagcttctacaggcaaagaaaaagggcagaaacatccctattttcccatgccataaaaactgtacaccaacactgagggccagcactaacctgttatga

SEQ ID NO: 25858 - DNA, 1488 bp, Homo sapiens
  source 1..1488: mol_type = unassigned DNA
atggcccaggggaataattatgggcagaccagcaacggggtggccgatgaatcacccaacatgctggtgtacagaaagatggaagacgtcatagcacggatgcaagatgaaaaaaatggaattcctattcgtacggtcaaaagctttctttccaagatacctagcgtcttctctggttcagacattgttcaatggttgataaagaacttaactatagaagatccagtggaggcgctccatttgggaacattaatggctgcccacggctacttctttccaatctcagatcatgtcctcacactcaaggatgatggcaccttttaccggtttcaaaccccctatttttggccatcaaattgttgggagccggaaaacacagattatgccgtttacctctgcaagagaacaatgcaaaacaaggcacgactggagctcgcagactatgaggctgagagcctggccaggctgcagagagcatttgcccggaagtgggagttcattttcatgcaagcagaagcacaagcaaaagtggacaagaagagagacaagattgaaaggaagatccttgacagccaagagagagcgttctgggacgtgcacaggcccgtgcctggatgtgtaaatacaactgaagtggacattaagaagtcatccagaatgagaaacccccacaaaacacggaagtctgtctatggtttacaaaatgatattagaagtcacagtcctacccacacacccacaccagaaactaaacctccaacagaagatgagttacaacaacagataaaatattggcaaatacagttagatagacatcggttaaaaatgtcaaaagtcgctgacagtctactaagttacacggaacagtatttagaatacgacccgtttcttttgccacctgacccttctaacccatggctgtccgatgacaccactttctgggaacttgaggcaagcaaagaaccgagccagcagagggtaaaacgatggggttttggcatggacgaggcattgaaagacccagttgggagagaacagttccttaaatttctagagtcagaattcagctcggaaaatttaagattctggctggcagtggaggacctgaaaaagaggcctattaaagaagtaccctcaagagttcaggaaatatggcaagagtttctggctcccggagcccccagtgctattaacttggattccaagagttatgacaaaaccacacagaacgtgaaggaacctggacgatacacatttgaagatgctcaggagcacatttacaaactgatgaaaagtgattcatacccacgttttataagatccagtgcctatcaggagcttctacaggcaaagaaaaagtctggaaactcaatggatcgcagaacatcttttgaaaaatttgcacagaatgtgggcagaaacatccctattttcccatgccataaaaactgtacaccaacactgagggccagcactaacctgttatga

SEQ ID NO: 25859 - DNA, 1686 bp, Homo sapiens
  source 1..1686: mol_type = unassigned DNA
caagcagaagcacaagcaaaagtggacaagaagagagacaagattgaaaggaagatccttgacagccaagagagagcgttctgggacgtgcacaggcccgtgcctggatgtgtaaatacaactgaagtggacattaagaagtcatccagaatgagaaacccccacaaaacacggaagtctgtctatggtttacaaaatgatattagaagtcacagtcctacccacacacccacaccagaaactaaacctccaacagaagatgagttacaacaacagataaaatattggcaaatacagttagatagacatcggttaaaaatgtcaaaagtcgctgacagtctactaagttacacggaacagtatttagaatacgacccgtttcttttgccacctgacccttctaacccatggctgtccgatgacaccactttctgggaacttgaggcaagcaaagaaccgagccagcagagggtaaaacgatggggttttggcatggacgaggcattgaaagacccagttgggagagaacagttccttaaatttctagagtcagaattcagctcggaaaatttaagattctggctggcagtggaggacctgaaaaagaggcctattaaagaagtaccctcaagagttcaggaaatatggcaagagtttctggctcccggagcccccagtgctattaacttggattccaagagttatgacaaaaccacacagaacgtgaaggaacctggacgatacacatttgaagatgctcaggagcacatttacaaactgatgaaaagtgattcatacccacgttttataagatccagtgcctatcaggagcttctacaggcaaagaaaaagtctggaaactcaatggatcgcagaacatcttttgaaaaatttgcacagaatgtgggcagaaacatccctattttcccatgccataaaaactgtacaccaacactgagggccagcactaacctgttatgaaaagaggggaaatctctcacgtccaagaggttaacaagccttgctcagtcttactaaacggatcatcttgtagcatgaatgcagactggagtcactgcacacactttgtagctcaatgttgtgacctggagcagaggacattagaacaagatgttgcatgagcaaaggacctaaattgttatttttgtgtgtacattccatctccaatggactcttccgtctcaatgcctccattccaaactgttgtctgctttctttctccttctactatgctggatctgtgtctcttcctttttaacaagttcaagtgaagtaaaaccttttctttttttccttctttctctctctctctctctcaaagcttcagttagacacacagttcactgaaaattcagtcagtcaaaaactggaagaactgtaaaagaaaaaagtatatatcaataagtatacatgtggcttcacatttattaaacaataaattccgcacagaaagtttcatttcaccaatgtgtcacagtcagaaacaaactcatgtcttcgtctgttgtctgtacattctccgttaatgtttctcgcatttatttttataccatatttaaagaagaaacaccttttactccaaatgtattaaagttgatcccttctctgtaaatttgtgtatgtttatattgttgttttatctttcattaaaagatgcagaatctc

SEQ ID NO: 25860 - DNA, 2209 bp, Homo sapiens
  source 1..2209: mol_type = unassigned DNA
agcttctgtagtgttgccgaggatgtttggactcttgtttctgatgctggcatgaagatggggagggggacacaggtgaaatagggaaactgtgctagatttgcacctgggatgttcctctttgtcatgacggagatggaagacgtcatagcacggatgcaagatgaaaaaaatggaattcctattcgtacggtcaaaagctttctttccaagatacctagcgtcttctctggacaccatcaacctggagggaccggaaaacacgcatcacagggagtgagccactctgtagttgagaagtcaatttcatactagagctgaatggttttacggtccgcagctgtatccaagaagggcgagggggaaaattccatgcctcactggtaccaggttcagacattgttcaatggttgataaagaacttaactatagaagatccagtggaggcgctccatttgggaacattaatggctgcccacggctacttctttccaatctcagatcatgtcctcacactcaaggatgatggcaccttttaccggtttcaaaccccctatttttggccatcaaattgttgggagccggaaaacacagattatgccgtttacctctgcaagagaacaatgcaaaacaaggcacgactggagctcgcagactatgaggctgagagcctggccaggctgcagagagcatttgcccggaagtgggagttcattttcatgcaagcagaagcacaagcaaaagtggacaagaagagagacaagattgaaaggaagatccttgacagccaagagagagcgttctgggacgtgcacaggcccgtgcctggatgtgtaaatacaactgaagtggacattaagaagtcatccagaatgagaaacccccacaaaacacggaagtctgtctatggtttacaaaatgatattagaagtcacagtcctacccacacacccacaccagaaactaaacctccaacagaagatgagttacaacaacagataaaatattggcaaatacagttagatagacatcggttaaaaatgtcaaaagtcgctgacagtctactaagttacacggaacagtatttagaatacgacccgtttcttttgccacctgacccttctaacccatggctgtccgatgacaccactttctgggaacttgaggcaagcaaagaaccgagccagcagagggtaaaacgatggggttttggcatggacgaggcattgaaagacccagttgggagagaacagttccttaaatttctagagtcagaattcagctcggaaaatttaagattctggctggcagtggaggacctgaaaaagaggcctattaaagaagtaccctcaagagttcaggaaatatggcaagagtttctggctcccggagcccccagtgctattaacttggattccaagagttatgacaaaaccacacagaacgtgaaggaacctggacgatacacatttgaagatgctcaggagcacatttacaaactgatgaaaagtgattcatacccacgttttataagatccagtgcctatcaggagcttctacaggcaaagaaaaagggcagaaacatccctattttcccatgccataaaaactgtacaccaacactgagggccagcactaacctgttatgaaaagaggggaaatctctcacgtccaagaggttaacaagccttgctcagtcttactaaacggatcatcttgtagcatgaatgcagactggagtcactgcacacactttgtagctcaatgttgtgacctggagcagaggacattagaacaagatgttgcatgagcaaaggacctaaattgttatttttgtgtgtacattccatctccaatggactcttccgtctcaatgcctccattccaaactgttgtctgctttctttctccttctactatgctggatctgtgtctcttcctttttaacaagttcaagtgaagtaaaaccttttctttttttccttctttctctctctctctctctcaaagcttcagttagacacacagttcactgaaaattcagtcagtcaaaaactggaagaactgtaaaagaaaaaagtatatatcaataagtatacatgtggcttcacatttattaaacaataaattccgcacagaaagtttcatttcaccaatgtgtcacagtcagaaacaaactcatgtcttcgtctgttgtctgtacattctc

SEQ ID NO: 25861 - DNA, 4160 bp, Homo sapiens
  source 1..4160: mol_type = unassigned DNA
agccttgcaatccatgccgagaggaaggcagtgcgagcccgcgccagcgcccagctcccgggacagggtcggcaatgctgctgagcagaacttgatcgcgctccttcctcgctgctagtggaagcgatgctgcacggcacagctagcgcttccccggctctccttcaagctgaaggttaccgacccgcgcagccagccccagcactgtgagctgcgcgcctcaggtccgggctccggctgcttggcggcggcgcccagggcaacaaccgggccgcccgcgccggggcgcactgcaccagcggcttcggcttggtggatgtgtatgcatgagttctgcaccgaatgggcgcaaaaagcgccccagccggtccacccgctcctcgatcttccagatcagcaagcccccgctgcagagcggagattgggagcgcaggggcagcggctccgagagcgcccacaaaacccaacgagccctggacgactgcaagatgcttgtccaagagttcaacacacaagtggccctgtaccgagagctggtcatttctattggggatgtctcggtcagctgcccctcactccgggcggaaatgcacaagacaagaaccaaaggctgtgaaatggcccgtcaggcacaccaaaaattggctgccatctcaggcccggaagatggtgagatccatccagaaatctgtcggctttacatccagctgcagtgctgcttagaaatgtataccacagagatgctaaaatccatatgtctgctggggtctcttcagtttcatcgaaaaggaaaggaacctggcgggggaaccaagagtttggattgcaaaattgaggagagtgctgaaacacctgccctagaagactcctcatcatcccccgtagatagtcagcaacattcctggcaggtttccacagacattgagaacactgaaagagacatgagagaaatgaaaaaccttttaagcaaactcagggaaactatgcctttaccattgaaaaatcaagatgacagcagccttctgaatctaactccctaccccctggtgagaagacggaagagaaggttctttgggctgtgttgtctcatctcaagctaggtggctcctcctggaaacccactgagaacatctgaaaaaaaatcacaaaacccgaggacctccagacagctgaaccacacagttattggtttttgactatgttttctatgcttccttattacttttatctgcctccccctgcccttttaaatgattttacacttgaaagcagctgccgtcaagaaaaaaaagaacagattcaaaaaccaggctgtttttaaaagggaattttaaagctgacattgtgcatgtctgctccaaaccacgccatgacagatgcaagaattatgatttttaaattatttaaaggttttttaaatgtattatacagaggaaaaatatttcacatataatagtatatctatagctcttgctgatctcatgttaaaatttatcgtatatgaaagaagtctttaaacatagaaatctatttaaaactgaaaaactgtgttcaaaaatccaatctatcaatatcattagaaataatattataagcaaacatataccacctcacctattgctttctctgcactcatttacatttagtcttccattctgtcagaatctaagagcttcaacataaaagtatcttaatttataaagcaacaaaaaccacatatgaaaagtactaaaattttgtaaatacacaataatcctaataccttcgtacaaatgcatatgggcaactaatttctttttgatccaatgatgtctttttcagcttcttggagaatgaagtaatccagttaggaaatggtgtagtaacatatacaattgccctcaaatgtaaaatcaaatattattacattttgttctaattgaaatctgaagcatggtgtctgcacatcagcatagtgttaaatcttatagggcatgctggaattagctcagattataaaaatatttaacattttacattgttaataaagttttttagttaagctaagcttgtctcattttagatgactatgcagataagatttttccaacgtgtacttggtgtcttgtcttatgcttagactcttgaaagcaggacacattaagcaatactatattttagaaaggaggaagccacatgctttgtttttctgctcacagctttgttgtgatcttccttcactaaacttgtaacatggtacaaattttgttataccgtctcctgttcttcctttggcccatttcccagacagaatttcccatgggttgagagatcaagtctttgcactttttttcttgttttccatagtctgaaaaaccttcaagtcagacaggaggcaccagtgtccagtacaatagaaggatgagctagatgccgataagtggtttatccaagacacatctttagtcccaaccctgttctttaccaatacttatgtgcacaggcatttatatgtataccaatatttttacctaaaaactaaatatattaaggccttttgctttagtgaagatgaactactgtaataattattgtattaggttgaattatatgaaatttcctatatgtgactgttttgacctacaaaatggcaatttcttatagttcaccctaatatccaatgtggaaattatacttggaattgtcttctagctcttttgattgaaagtgaaagaattaaagggttggaagagaacgttatacaggtctctatttagatcataccagctggtttttggccttattctttgaatctagagttgtgttccaaggaaccagtaattaatgcatggttataggtatacctggcttcaaaaaaaagaagtagccgtggaaagctatatgagaaaatcacaattttctgaatcaaatatttgtaaaacaatttggctatttaaagactcttagggtaaatactccctggaaaagcaagcaatccagacttatctggtctgcaaaccttgatttcagcttaatatcctttcctgaatctaattcattttcacccactaaggtcatttcatttaagatccattgtttttgaaattttgaagtagcccagtttggcagctctcagcacctgcctctgccctctcctatacttcaactatattgaactctagcttcaatctagttcctactaatccatgcaaaagttattaactgataagcccaatcttgttcagcacgttcttctaaatgcctgacctaaataacttctgcttggttaacttgtgttcattctcaccttagcctcagtgtgaaagtaacacttaccttctgtgcaattgtcctttgtacaactgaagactgttaataaattcaggtctcacctccatgtctgaaaaggctatagtagctattcatggagatgggaatttgtctaattacctagccagagtttgcatatttaaggtaatatattcagctaccgtatcttttattcatagtgcctgttttccagcctttgatcagttttgtagttcccgtggataaactccaagatctaaagatcctctttcagtagcatatactaaaattaagtttagtgctcaaaaccctggtaacctacactggcccaaggttacagtaggtaattcaccgtctcacattagacaggccaatgcatcccttaggagctgccccactctcctctcacctaccaaaggattttctcaggtgtggttccaagcgataaagttctactgtctcggcttcctgctggtaattcgctttcagattagcaataacactgagctgatctctagggttaagaagagaacattgaactcattttgtcgcatgtacccacaggcttgaaacagaaaatgatgtaaacttttgtggcatacattcacccattttcccaccatatctttactatcctgtgttgatttttttttcaaattacaaagacaatacatgttctttgtgggaaatctgaaaaatactaccaaatagaaaataaaaatcacctgaattccaccacgaccacattgtttaaaaccacatttctgggttttaaatcagtcagtggctgggcccaaaggcacttttgggtaagataagtgaagaaatgcccacaaggccaaggtgtcacttaaaaaaacaaacaaaaaaaa

SEQ ID NO: 25862 - DNA, 2522 bp, Homo sapiens
  source 1..2522: mol_type = unassigned DNA
gattggctggcgcggattccagctgctttccaagtcagcggcgcctagtgagagtcaggggggcccggcccgcgccctccccgcccagccgcctccccgtcgacgcccagggctggggcgagccaggctgcctttcgaacttggggggcttctcctcttgtctcccactggtgctctggctgtgaatccatccaggggccaggatgacaatccgacaccaaggccagcagtacaggccgaggatggcatttctccaaaagattgaagcgctcgtgaaggacatgcagaacccagagacaggggtccgaatgcagaaccagagggtcctggtcaccagcgttcctcatgccatgacaggaagtgatgttctgcaatggatcgtccagcggctttggatctccagtctggaggcacagaacttgggcaactttattgtcaggtatggctacatttaccccctgcaagaccccaagaatctcattctcaagcctgatggcagcctctacagatttcagacaccgtatttctggcccacccagcagtggccagctgaagataccgattacgccatctatctggccaagcgaaatatcaaaaagaaagggattttggaagaatatgaaaaggaaaattacaatttcttgaaccaaaaaatgaactataagtgggactttgtcattatgcaggccaaagagcagtacagggctggaaaggagaggaacaaagcagacagatatgccctggactgccaggagaaggcatactggctggtgcaccgatgccctcctggaatggacaatgtgctggactacggcctggaccgagtgaccaatccgaatgaagtcaaggtaaaccagaaacaaacagtcgttgctgtcaaaaaagagatcatgtattaccaacaggccttgatgaggtccacagtgaagtcttctgtgtccctgggagggattgtgaaatacagtgagcagttctcatccaacgatgccatcatgtcaggctgcctccccagcaacccctggatcaccgatgacacccagttctgggacttaaatgccaaattggtggaaatcccaaccaagatgcgagtggaacgatgggccttcaacttcagcgaattgatccgagaccccaaaggtcgacagagcttccagtacttcctcaagaaagaattcagtggagagaatctgggattctgggaagcctgcgaggatctgaagtatggagatcagtccaaagtcaaggagaaagcagaggagatttacaagctgttcctggccccgggggcgaggcgctggatcaacatagatggcaaaaccatggacatcacagtgaaggggctgaagcacccccaccgctatgtgctggacgccgcacaaacccacatttacatgctcatgaagaaggattcttatgctcgctatttaaaatctccgatctataaggacatgctggccaaagctattgaacctcaggaaaccaccaagaaaagctccaccctcccttttatgcggcgtcacctgcgctccagcccaagccctgtcatcctgagacagctggaagaggaagccaaggcccgagaagcagccaacactgtggacatcacccagccgggccagcacatggctcccagcccccatctgaccgtgtacaccgggacctgcatgcccccgtctccttctagccccttctcctcctcctgccgctcccccaggaagcctttcgcctcacccagccgcttcatccggcgacccagcaccaccatctgcccctcacccatcagagtggccttggagagctcatcgggcttggagcagaaaggggagtgcagcgggtccatggccccccgtgggccctctgtcaccgagagcagcgaggcctccctcgacacctcctggcctcgcagccggcccagggcccctcctaaggcccgcatggctctgtccttcagcaggtttctgagacgaggctgtctggcctcacctgtctttgccaggctctcacccaagtgccctgctgtgtcccacgggagggtgcagcccctgggggacgtgggccagcagctgccacgattgaaatccaagagagtagcaaactttttccagatcaaaatggatgtgcccacggggagcgggacctgcttgatggactcggaggatgctggaacaggagagtcgggtgaccgggccacagaaaaggaggtcatctgcccctgggagagcctgtaaggaaagaggcaggctgagctgggggctctggaccaggaagatgctctgacagatgccatggtatgggccacaggacacacttgctcgagaaccaaagtgcatttgggtgacatttgaagattggggagacaagatggggtagattgtggcaaagaatgctctggctggttaccaggggccaactccttctcctcttcctgaccctccctcccctgggcagaagaaacgcatgtggaccagaagactttccctgctgccttaaaaccaataaaaggttaactttaagtttcttgg

SEQ ID NO: 25863 - DNA, 2513 bp, Homo sapiens
  source 1..2513: mol_type = unassigned DNA
gattggctggcgcggattccagctgctttccaagtcagcggcgcctagtgagagtcaggggggcccggcccgcgccctccccgcccagccgcctccccgtcgacgcccagggctggggcgagccaggctgcctttcgaacttggggggcttctcctcttgtctcccactggtgctctggctgtgaatccatccaggggccaggatgacaatccgacaccaaggccagcagtacaggccgaggatggcatttctccaaaagattgaagcgctcgtgaaggacatgcagaacccagagacaggggtccgaatgcagaaccagagggtcctggtcaccagcgttcctcatgccatgacaggaagtgatgttctgcaatggatcgtccagcggctttggatctccagtctggaggcacagaacttgggcaactttattgtcaggtatggctacatttaccccctgcaagaccccaagaatctcattctcaagcctgatggcagcctctacagatttcagacaccgtatttctggcccacccagcagtggccagctgaagataccgattacgccatctatctggccaagcgaaatatcaaaaagaaagggattttggaagaatatgaaaaggaaaattacaatttcttgaaccaaaaaatgaactataagtgggactttgtcattatgcaggccaaagagcagtacagggctggaaaggagaggaacaaagcagacagatatgccctggactgccaggagaaggcatactggctggtgcaccgatgccctcctggaatggacaatgtgctggactacggcctggaccgagtgaccaatccgaatgaagtcaagaaacaaacagtcgttgctgtcaaaaaagagatcatgtattaccaacaggccttgatgaggtccacagtgaagtcttctgtgtccctgggagggattgtgaaatacagtgagcagttctcatccaacgatgccatcatgtcaggctgcctccccagcaacccctggatcaccgatgacacccagttctgggacttaaatgccaaattggtggaaatcccaaccaagatgcgagtggaacgatgggccttcaacttcagcgaattgatccgagaccccaaaggtcgacagagcttccagtacttcctcaagaaagaattcagtggagagaatctgggattctgggaagcctgcgaggatctgaagtatggagatcagtccaaagtcaaggagaaagcagaggagatttacaagctgttcctggccccgggggcgaggcgctggatcaacatagatggcaaaaccatggacatcacagtgaaggggctgaagcacccccaccgctatgtgctggacgccgcacaaacccacatttacatgctcatgaagaaggattcttatgctcgctatttaaaatctccgatctataaggacatgctggccaaagctattgaacctcaggaaaccaccaagaaaagctccaccctcccttttatgcggcgtcacctgcgctccagcccaagccctgtcatcctgagacagctggaagaggaagccaaggcccgagaagcagccaacactgtggacatcacccagccgggccagcacatggctcccagcccccatctgaccgtgtacaccgggacctgcatgcccccgtctccttctagccccttctcctcctcctgccgctcccccaggaagcctttcgcctcacccagccgcttcatccggcgacccagcaccaccatctgcccctcacccatcagagtggccttggagagctcatcgggcttggagcagaaaggggagtgcagcgggtccatggccccccgtgggccctctgtcaccgagagcagcgaggcctccctcgacacctcctggcctcgcagccggcccagggcccctcctaaggcccgcatggctctgtccttcagcaggtttctgagacgaggctgtctggcctcacctgtctttgccaggctctcacccaagtgccctgctgtgtcccacgggagggtgcagcccctgggggacgtgggccagcagctgccacgattgaaatccaagagagtagcaaactttttccagatcaaaatggatgtgcccacggggagcgggacctgcttgatggactcggaggatgctggaacaggagagtcgggtgaccgggccacagaaaaggaggtcatctgcccctgggagagcctgtaaggaaagaggcaggctgagctgggggctctggaccaggaagatgctctgacagatgccatggtatgggccacaggacacacttgctcgagaaccaaagtgcatttgggtgacatttgaagattggggagacaagatggggtagattgtggcaaagaatgctctggctggttaccaggggccaactccttctcctcttcctgaccctccctcccctgggcagaagaaacgcatgtggaccagaagactttccctgctgccttaaaaccaataaaaggttaactttaagtttcttgg

SEQ ID NO: 25864 - DNA, 6856 bp, Homo sapiens
  source 1..6856: mol_type = unassigned DNA
cggtgcattctgggtcctggcaatatggcgtcctccttgatgggctgatgagatgagtttcactgtagctccaaaccagagggcaaagctcccatgacccaataagcccacattgtccctttcctccgtggttccgtgtcgcccgtttctcaggactcgttctcaggcaggagagagcctcggggctgaaggccaggaccagccaggccgcgcggacctgaggttgaggaaccgggtgcaggcgagcacgatgggccggtcgtggctctggttgcagcagctcagacgagtgcgggacccgcagggctgagagtggctggaggagacccagggccctttgaacccgatcccttggccggagacctcagcccagtcggcccagtgggcgaaccggcaccaagagcggcctgcctgtcttcggaactgctgaggcggtggaggccgagagcagggtcatcgtgaggcctgaagtctcttacgcttttggcagctcccctcgcagcccctctggaaacgtacagcctcaggagcagccagtggcttgggacctggggtggtgtgtgtctgcggagcttcttgggctgccccatttcctagcggcccccacctccccacttcccgctcagagttagagataaggatctcagacttttgcctgagtaagggtctccgcactctttatccatttggttttcgatttcccgtttttgtttcttatttcaccaattctggtacacgctagtttttaaggctggaggttctcgagcgcttgctgccaaggactcccccaccccctcccccactgatggagtccgaaatgctgcaatcgcctcttctgggcctgggggaggaagatgaggctgatcttacagactggaacctacctttggcttttatgaaaaagaggcactgtgagaaaattgaaggctccaaatccttagctcagagctggaggatgaaggatcggatgaagacagtcagtgttgccttagttttgtgcctgaatgttggtgtggaccctcccgatgtggtgaagaccacgccctgtgcacgcttggaatgctggatcgatcctctgtcgatgggtcctcagaaagctctggaaaccatcggtgcaaatttacagaagcagtacgagaactggcagccaagggcccggtacaagcagagccttgacccaactgtggatgaagtcaagaagctctgcacgtccttacgtcgcaacgccaaggaggagcgagtcctctttcactacaatggccacggggtgccccggcccacagtcaacggggaggtctgggtcttcaacaagaactacacgcagtacatccctctgtccatatatgacctgcagacgtggatgggcagcccgtcgatcttcgtctacgactgctccaatgctggcttgatcgtcaagtccttcaagcagttcgcactacagcgggagcaggagctggaggtagctgcaatcaacccaaatcaccctcttgctcagatgcctttgcctccgtcgatgaaaaactgcatccagctggcagcctgcgaggccaccgagctgctgcccatgatccccgacctcccggctgacctattcacctcctgcctcaccacccccatcaagatcgccctgcgctggttttgcatgcagaaatgtgtcagtctggtgcctggcgtcacactggatttgatagaaaagatccctggccgcctgaacgacaggaggacgcccctgggtgaactgaactggatcttcacagccatcacagacaccatcgcgtggaacgtgctcccccgggatctcttccaaaagctcttcagacaggacttgctggtggctagtctgtttcgaaattttttattggcggaaaggattatgaggtcgtataactgcactcccgtcagcagcccgcgtctgccgcccacgtacatgcacgccatgtggcaagcctgggacctggctgttgacatctgtctgtctcagctgccgacgatcatcgaggaaggcactgcgtttcggcacagcccgttcttcgccgagcagctgaccgcattccaggtgtggctcaccatgggcgtggagaaccgaaacccacccgaacagctgcccatcgtcctgcaggtgctgttaagccaagtgcaccggctgagagcattggacttgcttggaagatttttggacctgggtccctgggcagtgagcctggccttgtctgtcggcatcttcccctacgtgctgaagctgctccagagctcggcccgagagctgcggccacttctcgttttcatctgggccaagatcctcgcagtggacagctcgtgccaagcggacctcgtgaaggacaacggccacaagtacttcctgtcggtcctggcggacccctacatgccagctgaacaccggaccatgacggctttcattctcgccgtgatcgtcaacagctatcacacggggcaggaagcctgccttcagggaaacctcattgccatctgcctggagcagctcaacgacccgcaccccttgctgcgccagtgggtggccatctgcctcggcaggatctggcagaacttcgactcggcgaggtggtgcggcgtgagggacagcgctcatgagaagctctacagcctcctctccgaccccattcccgaggtccgctgcgcagcggtcttcgcccttggcacgttcgtgggcaactctgcagagaggacggaccactccaccaccatcgaccacaacgtggccatgatgctggcccagctggtcagcgacgggagccccatggtccggaaggagctggtggtggctctgagtcatcttgtggttcagtatgaaagcaatttctgcaccgtggccctgcagttcatagaagaggaaaagaactacgccttgccttctccagcaaccacagagggagggagtttgaccccagtgcgagacagcccgtgcacccccagacttcgttctgtgagctcctatggaaacatccgtgctgtcgccacagccaggagcctcaacaaatctttgcagaacctgagtttgacagaggaatctggtggcgcggtggcgttctcccccggaaacctcagcaccagcagcagcgccagcagcaccctgggcagccccgagaatgaggagcatatcctgtccttcgagaccatcgacaagatgcgccgcgccagctcctactcctccctcaactccctcatcggagtttcctttaacagtgtttacactcagatttggagagtcctgctgcacctggctgctgacccctatccagaggtctcggacgtggccatgaaagtactcaacagcatcgcctacaaggccaccgtgaacgcccggccgcagcgcgtcctggacacctcctccctcacgcagtcggcccccgccagccccaccaacaagggcgtgcacatccaccaggcggggggctcccctccggcgtccagcaccagcagctccagcctgaccaacgatgtggccaagcagccggtcagccgagacttgccttctggccggccgggcaccacaggccccgctggggcgcagtacacccctcactcccaccagttcccccggacacggaagatgttcgacaagggcccagagcagactgcggacgacgcggacgatgctgctggacacaaaagtttcatctccgccacggtgcagacggggttctgcgactggagcgcccgctattttgcccagcccgtcatgaagatcccagaagagcacgacctggagagtcagatccgcaaggagcgggagtggcggttcctgcgaaacagccgtgtcaggaggcaggcccagcaagtcattcagaagggcattacgagattggacgaccaaatatttctgaacaggaaccccggcgtcccctctgtggtgaaattccaccccttcacgccgtgcatcgccgtagccgacaaggacagcatctgcttttgggactgggagaaaggggagaagctggattatttccacaatgggaaccctcggtacacgagggtcactgccatggagtatctgaacggccaggactgctcgcttctgctgacggccacagacgatggtgccatcagggtctggaagaattttgctgatttggaaaagaacccagagatggtgaccgcgtggcaggggctctcggacatgctgccaacgacgcgaggagctgggatggtggtggactgggagcaggagaccggcctcctcatgagctcaggagacgtgcggatcgtccggatctgggacacagaccgtgagatgaaggtgcaggacatccctacgggcgcagacagctgtgtgacgagtctgtcctgtgattcccaccgctcactcatcgtggctggcctcggtgacggctccatccgcgtctacgacagaaggatggcactcagcgaatgccgcgtcatgacgtaccgggagcacacagcctgggtggtgaaggcctccctgcagaagcgtcccgacggccacatcgtgagtgtgagcgtcaatggagatgtgcgcatctttgatccccggatgcctgagtcggtaaatgtgcttcagatcgtgaaggggctgacggccctggacatccacccccaggcggacctgatcgcatgtggctccgtcaatcagttcaccgccatctacaacagcagcggagagctcatcaacaacatcaagtactacgacggcttcatgggccagcgggtcggcgccatcagctgcctggccttccacccgcactggcctcacctggccgtgggaagcaacgactactacatctccgtgtactcggtggagaagcgtgtcagatagcggcgtgacccgggcccaccaggccacggccgcctgctgtacatagtgaagctgtcactcgccggggcacggggcgtcggctgctgcggccccgcagtgtgaacgttggctgctgccttagctgctgatgacggcaggagggccctgctactcgcttttgtctgtcttcgctgtcgtgtctggaatgtcagggaaggggagggctcgggttgacggtggcttcccactgagcaccagcatccaggtgcacccccgcggccacggcgcctctgtccctctcctgttctgtgtttctctgagacgctgaaaggggaaacacctcactttatttccatgtaatcagagcattagctgcagaaaaaccccccgacagagccctggcggagaggcaggcgctggggctcctacgggtccctggggcagctgtccccatcaggccaagagcgagcgagaggcgctgccccagccaggcccaccacctctcacagtcagtgcacgcaagcagggacatttcctagccagctgggggacactggaaattcgggaaaccaagagagaggaagaaggagacgcccctccaactggcgggtgtgaaggaagccgcccaggggtccgggctgtccttggccgctggcagcatcactgagcaggaagcgcacagcccaccctccccgcacctccaggtctctggactccagttttggcccctctcacacagagctgtcagcaggggccgctgtggcggtgcacaggggaggcaggtccttggcgaggtagcccctgccttaatccacggggctcctttccctccgaagggctgctcttccccacaggcgcggggacagcagcccgacctgtggtctccatgcctgtgccctcacacaggtgtagcacacgcatgtgcagatggcaccacggccggcacctgggggcacacacatgcaggcggcgtggtctccctgctctgtccccacacgttcctcacatacaggcaagaggcactgccgggtcccggacggctccgggtgacaccagccccgtctccagccttgagccgcccatgctgatgcgacctcggctgacagctgggcctgtggtgcagacaggagctgtgtggacagtcccgcccaggaggggccgcagggcgtgtatgagcagttttgcaaacagaacacaaccacaatgatggtattttgaaaagtgttctttccgtgttcgtcgggaatcaggattattgagaggtgaaggagccaggtggcttcattctggcggtgagaggcccacgaccacgggagtgagagctggtgtggcgaggcccggctctcctgcggtgtggctggtggcctgccgtggccaagagcatcttctgggtggatggaaccctgcctggtcacatttggccagagacacacctggccctcagggggctgagctggagactgagctggggctggccgggacgtgacaaggcaggacagaggcggcccctccgctgctcctttttggaatgcgagctcccaccagaagaaggttccggcacgaatcccatccccacgtctgggccgagaaagcagcccgggtccggaaggtgtagagagtcccggcctcactcagctcacagggcgtgccaggcggcaacaccagaatcttccagaagcccagctccacccgcacacgcagcttcccatccagtccttcaactcaattcttacccaacacgcgtttctgtttgttttgagacaaaatcaccacctgtcaaaaggcaggtggctccagaggggtcaagacccccccccgcccccgctccaccctggagcccacccccatgggcaccgcgtgccgcctgcacgtgggctgtcttcacaggtctgatgtgaaaattcaatcacgacgttaaccggctcgagagagcgccggcctagaggctcattatctatttattttaccaaacgcgaattgagacggactttgacaaaacacgaaatggtaatgtgaagctaagagcagagagtgaccaacagtaaacaacacgcgcagactccg

SEQ ID NO: 25865 - DNA, 2461 bp, Homo sapiens
  source 1..2461: mol_type = unassigned DNA
aggccgcggtgcattctgggtcctggcaatatggcgtcctccttgatgggctgatgagatgagtttcactgtagctccaaaccagagggcaaagctcccatgacccaataagcccacattgtccctttcctccgtggttccgtgtcgcccgtttctcaggactcgttctcaggcaggagagagcctcggggctgaaggccaggaccagccaggccgcgcggacctgaggttgaggaaccgggtgcaggcgagcacgatgggccggtcgtggctctggttgcagcagctcagacgagtgcgggacccgcagggctgagagtggctggaggagacccagggccctttgaacccgatcccttggccggagacctcagcccagtcggcccagtgggcgaaccggcaccaagagcggcctgcctgtcttcggaactgctgaggcggtggaggccgagagcagggtcatcgtgaggcctgaagtctcttacgcttttggcagctcccctcgcagcccctctggaaacgtacagcctcaggagcagccagtggcttgggacctggggtggtgtgtgtctgcggagcttcttgggctgccccatttcctagcggcccccacctccccacttcccgctcagagttagagataaggatctcagacttttgcctgagtaagggtctccgcactctttatccatttggttttcgatttcccgtttttgtttcttatttcaccaattctggtacacgctagtttttaaggctggaggttctcgagcgcttgctgccaaggactcccccaccccctcccccactgatggagtccgaaatgctgcaatcgcctcttctgggcctgggggaggaagatgaggctgatcttacagactggaacctacctttggcttttatgaaaaagaggcactgtgagaaaattgaaggctccaaatccttagctcagagctggaggatgaaggatcggatgaagacagtcagtgttgccttagttttgtgcctgaatgttggtgtggaccctcccgatgtggtgaagaccacgccctgtgcacgcttggaatgctggatcggcccggtacaagcagagccttgacccaactgtggatgaagtcaagaagctctgcacgtccttacgtcgcaacgccaaggaggagcgagtcctctttcactacaatggccacggggtgccccggcccacagtcaacggggaggtctgggtcttcaacaagaactacacgcagtacatccctctgtccatatatgacctgcagacgtggatgggcagcccgtcgatcttcgtctacgactgctccaatgctggcttgatcgtcaagtccttcaagcagttcgcactacagcgggagcaggagctggaggtagctgcaatcaacccaaatcaccctcttgctcagatgcctttgcctccgtcgatgaaaaactgcatccagctggcagcctgcgaggccaccgagctgctgcccatgatccccgacctcccggctgacctattcacctcctgcctcaccacccccatcaagatcgccctgcgctggttttgcatgcagaaatgtgtcagtctggtgcctggcgtcacactggatttgatagaaaagatccctggccgcctgaacgacaggaggacgcccctgggtgaactgaactggatcttcacagccatcacagacaccatcgcgtggaacgtgctcccccgggatctcttccaaaagctcttcagacaggacttgctggtggctagtctgtttcgaaattttttattggcggaaaggattatgaggtcgtataactgcactcccgtcagcagcccgcgtctgccgcccacgtacatgcacgccatgtggcaagcctgggacctggctgttgacatctgtctgtctcagctgccgacgatcatcgaggaaggcactgcgtttcggcacagcccgttcttcgccgagcagctgaccgcattccaggtgtggctcaccatgggcgtggagaaccgaaacccacccgaacagctgcccatcgtcctgcaggtgctgttaagccaagtgcaccggctgagagcattggacttgcttggaagatttttggacctgggtccctgggcagtgagcctggccttgtctgtcggcatcttcccctacgtgctgaagctgctccagagctcggcccgagagctgcggccacttctcgttttcatctgggccaagatcctcgcagtggacagcgtgagtatccccgccctcctccccagagtgatgtgaacctgccggcccttctggggatgccgagccctgcgtttccagcctgccctttctccagcctcgctccctctccaggcaccgccgttcccttcctctcttctggggtaaagtgggacgcgcccgcctcggcagccacctctgggtcgtgggggctgtcacctacctgtcctgtccctggccttcccctg

SEQ ID NO: 25866 - DNA, 6382 bp, Homo sapiens
  source 1..6382: mol_type = unassigned DNA
cggtgcattctgggtcctggcaatatggcgtcctccttgatgggctgatgagatgagtttcactgtagctccaaaccagagggcaaagctcccatgacccaataagcccacattgtccctttcctccgtggttccgtgtcgcccgtttctcaggactcgttctcaggcaggagagagcctcggggctgaaggccaggaccagccaggccgcgcggacctgaggttgaggaaccgggtgcaggcgagcacgatgggccggtcgtggctctggttgcagcagctcagacgagtgcgggacccgcagggctgagagtggctggaggagacccagggccctttgaacccgatcccttggccggagacctcagcccagtcggcccagtgggcgaaccggcaccaagagcggcctgcctgtcttcggaactgctgaggcggtggaggccgagagcagggtcatcgtgaggcctgaagtctcttacgcttttggcagctcccctcgcagcccctctggaaacgtacagcctcaggagcagccagtggcttgggacctggggtggtgtgtgtctgcggagcttcttgggctgccccatttcctagcggcccccacctccccacttcccgctcagagttagagataaggatctcagacttttgcctgagtaagggtctccgcactctttatccatttggttttcgatttcccgtttttgtttcttatttcaccaattctggtacacgctagtttttaaggctggaggttctcgagcgcttgctgccaaggactcccccaccccctcccccactgatggagtccgaaatgctgcaatcgcctcttctgggcctgggggaggaagatgaggctgatcttacagactggaacctacctttggcttttatgaaaaagaggcactgtgagaaaattgaaggctccaaatccttagctcagagctggaggatgaaggatcggatgaagacagtcagtgttgccttagttttgtgcctgaatgttggtgtggaccctcccgatgtggtgaagaccacgccctgtgcacgcttggaatgctggatcgatcctctgtcgatgggtcctcagaaagctctggaaaccatcggtgcaaatttacagaagcagtacgagaactggcagccaagggcccggtacaagcagagccttgacccaactgtggatgaagtcaagaagctctgcacgtccttacgtcgcaacgccaaggaggagcgagtcctctttcactacaatggccacggggtgccccggcccacagtcaacggggaggtctgggtcttcaacaagaactacacgcagtacatccctctgtccatatatgacctgcagacgtggatgggcagcccgtcgatcttcgtctacgactgctccaatgctggcttgatcgtcaagtccttcaagcagttcgcactacagcgggagcaggagctggaggtagctgcaatcaacccaaatcaccctcttgctcagatgcctttgcctccgtcgatgaaaaactgcatccagctggcagcctgcgaggccaccgagctgctgcccatgatccccgacctcccggctgacctattcacctcctgcctcaccacccccatcaagatcgccctgcgctggttttgcatgcagaaatgtgtcagtctggtgcctggcgtcacactggatttgatagaaaagatccctggccgcctgaacgacaggaggacgcccctgggtgaactgaactggatcttcacagccatcacagacaccatcgcgtggaacgtgctcccccgggatctcttccaaaagctcttcagacaggacttgctggtggctagtctgtttcgaaattttttattggcggaaaggattatgaggtcgtataactgcactcccgtcagcagcccgcgtctgccgcccacgtacatgcacgccatgtggcaagcctgggacctggctgttgacatctgtctgtctcagctgccgacgatcatcgaggaaggcactgcgtttcggcacagcccgttcttcgccgagcagctgaccgcattccaggtgtggctcaccatgggcgtggagaaccgaaacccacccgaacagctgcccatcgtcctgcaggtgctgttaagccaagtgcaccggctgagagcattggacttgcttggaagatttttggacctgggtccctgggcagtgagcctggccttgtctgtcggcatcttcccctacgtgctgaagctgctccagagctcggcccgagagctgcggccacttctcgttttcatctgggccaagatcctcgcagtggacagcgagctggtggtggctctgagtcatcttgtggttcagtatgaaagcaatttctgcaccgtggccctgcagttcatagaagaggaaaagaactacgccttgccttctccagcaaccacagagggagggagtttgaccccagtgcgagacagcccgtgcacccccagacttcgttctgtgagctcctatggaaacatccgtgctgtcgccacagccaggagcctcaacaaatctttgcagaacctgagtttgacagaggaatctggtggcgcggtggcgttctcccccggaaacctcagcaccagcagcagcgccagcagcaccctgggcagccccgagaatgaggagcatatcctgtccttcgagaccatcgacaagatgcgccgcgccagctcctactcctccctcaactccctcatcggagtttcctttaacagtgtttacactcagatttggagagtcctgctgcacctggctgctgacccctatccagaggtctcggacgtggccatgaaagtactcaacagcatcgcctacaaggccaccgtgaacgcccggccgcagcgcgtcctggacacctcctccctcacgcagtcggcccccgccagccccaccaacaagggcgtgcacatccaccaggcggggggctcccctccggcgtccagcaccagcagctccagcctgaccaacgatgtggccaagcagccggtcagccgagacttgccttctggccggccgggcaccacaggccccgctggggcgcagtacacccctcactcccaccagttcccccggacacggaagatgttcgacaagggcccagagcagactgcggacgacgcggacgatgctgctggacacaaaagtttcatctccgccacggtgcagacggggttctgcgactggagcgcccgctattttgcccagcccgtcatgaagatcccagaagagcacgacctggagagtcagatccgcaaggagcgggagtggcggttcctgcgaaacagccgtgtcaggaggcaggcccagcaagtcattcagaagggcattacgagattggacgaccaaatatttctgaacaggaaccccggcgtcccctctgtggtgaaattccaccccttcacgccgtgcatcgccgtagccgacaaggacagcatctgcttttgggactgggagaaaggggagaagctggattatttccacaatgggaaccctcggtacacgagggtcactgccatggagtatctgaacggccaggactgctcgcttctgctgacggccacagacgatggtgccatcagggtctggaagaattttgctgatttggaaaagaacccagagatggtgaccgcgtggcaggggctctcggacatgctgccaacgacgcgaggagctgggatggtggtggactgggagcaggagaccggcctcctcatgagctcaggagacgtgcggatcgtccggatctgggacacagaccgtgagatgaaggtgcaggacatccctacgggcgcagacagctgtgtgacgagtctgtcctgtgattcccaccgctcactcatcgtggctggcctcggtgacggctccatccgcgtctacgacagaaggatggcactcagcgaatgccgcgtcatgacgtaccgggagcacacagcctgggtggtgaaggcctccctgcagaagcgtcccgacggccacatcgtgagtgtgagcgtcaatggagatgtgcgcatctttgatccccggatgcctgagtcggtaaatgtgcttcagatcgtgaaggggctgacggccctggacatccacccccaggcggacctgatcgcatgtggctccgtcaatcagttcaccgccatctacaacagcagcggagagctcatcaacaacatcaagtactacgacggcttcatgggccagcgggtcggcgccatcagctgcctggccttccacccgcactggcctcacctggccgtgggaagcaacgactactacatctccgtgtactcggtggagaagcgtgtcagatagcggcgtgacccgggcccaccaggccacggccgcctgctgtacatagtgaagctgtcactcgccggggcacggggcgtcggctgctgcggccccgcagtgtgaacgttggctgctgccttagctgctgatgacggcaggagggccctgctactcgcttttgtctgtcttcgctgtcgtgtctggaatgtcagggaaggggagggctcgggttgacggtggcttcccactgagcaccagcatccaggtgcacccccgcggccacggcgcctctgtccctctcctgttctgtgtttctctgagacgctgaaaggggaaacacctcactttatttccatgtaatcagagcattagctgcagaaaaaccccccgacagagccctggcggagaggcaggcgctggggctcctacgggtccctggggcagctgtccccatcaggccaagagcgagcgagaggcgctgccccagccaggcccaccacctctcacagtcagtgcacgcaagcagggacatttcctagccagctgggggacactggaaattcgggaaaccaagagagaggaagaaggagacgcccctccaactggcgggtgtgaaggaagccgcccaggggtccgggctgtccttggccgctggcagcatcactgagcaggaagcgcacagcccaccctccccgcacctccaggtctctggactccagttttggcccctctcacacagagctgtcagcaggggccgctgtggcggtgcacaggggaggcaggtccttggcgaggtagcccctgccttaatccacggggctcctttccctccgaagggctgctcttccccacaggcgcggggacagcagcccgacctgtggtctccatgcctgtgccctcacacaggtgtagcacacgcatgtgcagatggcaccacggccggcacctgggggcacacacatgcaggcggcgtggtctccctgctctgtccccacacgttcctcacatacaggcaagaggcactgccgggtcccggacggctccgggtgacaccagccccgtctccagccttgagccgcccatgctgatgcgacctcggctgacagctgggcctgtggtgcagacaggagctgtgtggacagtcccgcccaggaggggccgcagggcgtgtatgagcagttttgcaaacagaacacaaccacaatgatggtattttgaaaagtgttctttccgtgttcgtcgggaatcaggattattgagaggtgaaggagccaggtggcttcattctggcggtgagaggcccacgaccacgggagtgagagctggtgtggcgaggcccggctctcctgcggtgtggctggtggcctgccgtggccaagagcatcttctgggtggatggaaccctgcctggtcacatttggccagagacacacctggccctcagggggctgagctggagactgagctggggctggccgggacgtgacaaggcaggacagaggcggcccctccgctgctcctttttggaatgcgagctcccaccagaagaaggttccggcacgaatcccatccccacgtctgggccgagaaagcagcccgggtccggaaggtgtagagagtcccggcctcactcagctcacagggcgtgccaggcggcaacaccagaatcttccagaagcccagctccacccgcacacgcagcttcccatccagtccttcaactcaattcttacccaacacgcgtttctgtttgttttgagacaaaatcaccacctgtcaaaaggcaggtggctccagaggggtcaagacccccccccgcccccgctccaccctggagcccacccccatgggcaccgcgtgccgcctgcacgtgggctgtcttcacaggtctgatgtgaaaattcaatcacgacgttaaccggctcgagagagcgccggcctagaggctcattatctatttattttaccaaacgcgaattgagacggactttgacaaaacacgaaatggtaatgtgaagctaagagcagagagtgaccaacagtaaacaacacgcgcagactccg

SEQ ID NO: 25867 - DNA, 2578 bp, Homo sapiens
  source 1..2578: mol_type = unassigned DNA
gaggagcggccgccgccgccaccgccgccgccatagagactgtagccgtggagactgttacttaccaacggggaccaacacgcagcagccgctgccgccgccgcgggagccgctgcccgaactcccggcccgaactccagacctgagcatgcagaattccgagggtggagcggattcgccagcgtccgtggctctgcgtccctcggcggcagccccgcctgtgccagcctccccgcagagggtgttggtccaggcagccagctccaatcccaaaggggcccagatgcagccgatctccctccccagagttcagcaggtaccccagcaggtgcagccggtgcagcacgtgtatcctgcccaggtgcagtacgtggaagggggagacgccgtctacaccaatggagccatacgaacagcctacacctacaaccccgagcctcagatgtacgcccccagcagcacggcttcttacttcgaggccccaggcggtgcccaggtgaccgtggcagcctcgtccccgccagcggtcccctcccacagcatggtgggcatcaccatggatgtcggggggagccccatcgtctccagcgcgggagcctatctcatccacggggggatggacagcaccagacactccctggcccacacctcccgctcatcgcccgccacgctccagtggctgttggataattatgaaacagcggaaggtgtgagtctccccagaagttctctttacaaccactaccttcggcactgccaggagcacaagctagacccagtgaacgccgcctccttcgggaaactgatccgttctgtgtttatggggctgagaacgcggcggctgggcaccaggggcaactcgaagtaccattactatgggattcgtctgaagccggactcaccactgaaccggctgcaggaggacacgcagtacatggccatgcggcagcagcccatgcaccagaagcccaggtaccggccagcccagaagacggacagcctcggggacagcggctcccacagcggcctgcacagcactccggaacagaccatggccgtgcagagccagcaccaccagcagtacatagatgtctcccacgtcttccccgagttcccagcgcccgacctgggcagcttcctgctgcaggacggcgtcacactgcacgacgtcaaggccctgcagctggtgtacagacggcactgcgaggcaactgtagatgtggtgatgaacctccagttccactacatcgagaagctgtggctctccttctggaactctaaggcctcctccagcgacggccccacctctcttcctgccagtgacgaagaccccgagggcgccgtcctgcccaaggacaagcttatctccctgtgtcagtgcgaccccatcctcaggtggatgaggagctgcgaccacatcctctaccaggcgctggtggagattctcatccccgacgtgctgaggccggtccccagtaccttgacacaggccatccgtaactttgccaagagcttggaaggctggttgacaaatgccatgagtgacttcccacaacaggtcatccagaccaaggtgggcgtcgtcagtgccttcgcccagacgctgcggcgctacacgtccctcaaccacctggcgcaggcggcccgggcggtgctgcagaacacgtcccagatcaaccagatgctcagcgacctcaaccgcgtggactttgccaacgtgcaggagcaggcctcgtgggtgtgccagtgcgaggagagtgtggtgcagcggctggagcaggatttcaagctgaccctgcagcagcagagctccctggaccagtgggccagctggctggacagtgtggtcacccaggtcctgaagcagcatgccggcagccccagcttccccaaggccgcccggcagttcttgctgaaatggtccttttacagctccatggtgatccgggacctgaccctgcgcagcgctgccagcttcggctccttccacctcatccgcctgctctacgacgagtacatgttctacctggtggagcaccgcgtcgcggaggccaccggagagacgccgatcgctgtgatgggagagttcaacgatctcgcctctctgtcgctgacgctgctcgacaaagatgacatgggcgatgagcagcgtggcagcgaggcgggcccagacgcccgcagcctgggtgagcccctggtaaagcgggagcgcagtgaccccaaccactccctgcagggcatctagcagccccggccggcgcctcctcgaggttccaaaagatgccgcctggtcactctgggaacctggatttcaccggctccaccaaattagtgcctcttagatgatgtgatgtttactttgactcaagcgggggctcccggggtcagtgttcaagaaggaaagcagttgttgaagctacagaagcccaggccagggctcccactggctgtagctgtgctctgggtccccaggtccctgcgcagccaccagggccccaccagaccatgggttccttattctggacaaaccctcctctgctggaaccctggactttggccccagtccctttaagagctg

SEQ ID NO: 25868 - DNA, 4376 bp, Homo sapiens
  source 1..4376: mol_type = unassigned DNA
acagttgccccggtgagggaaacggaggcgccatagccacggtagtcgtggcgaccaagcaacccggcaacgcgagtcaacaacaacaaccgcccggccgacccccacccccaccccccaggcccggcccggggaccccagcacgtcccgtccccttcccaacatcgactccgagacctccgaaaagcgtttccgcagacagaagtggggagaagcggaggaattaaaaaaaaaaaaaagccttatttattatcattttccccaccgttggcatggcaacacaggcgtatactgagctacaggcagccccgccaccatcccagccgccacaggccccgccacaagcccagccccagccgccaccgccaccacccccagcggcaccccagcccccgcagccacccaccgctgctgccacccctcagccccaatatgtcaccgagctgcagagcccccagccccaggcacagccaccgggtggccagaagcagtacgtgacggagctcccggctgtacccgcaccctcgcagccaaccggtgcacccaccccttcgcctgcaccccagcagtacatcgtggtcactgtctctgaaggtgccatgcgggccagcgagacagtgtcggaggccagccccggctccaccgccagccagaccggcgttcctactcaggtggttcagcaggtgcagggcacccagcagcggctgctggtccagacgagcgtgcaggccaagccaggccacgtgtcgcccctccagctgaccaacatccaagtgccccagcaggctcttcccacgcagcgtctggtggtgcagagcgcagccccaggcagcaaaggtggccaggtctccctgacggtccatggtacccagcaggtgcactcgcccccagagcagtcgccggtgcaggccaacagctcttccagcaagacagccggggcccccacgggcacagtgccacagcagctgcaggtccacggcgtccagcagagtgtccccgtcacccaagagagatctgtggtccaggccactccacaagcgcccaaacccggcccggtgcagccgctgaccgtgcagggcctccagccagtccacgtggctcaagaggtgcagcagctccagcaggtgcccgtcccacacgtgtactccagccaggtgcagtatgtggagggcggcgatgccagctacacggccagtgccatccgttccagcacctactcctatcccgagacgccgctgtacacgcagacggcaagcaccagctactacgaggccgcaggcacggccacccaggtcagcacccccgccacctcccaggcggtggccagcagtggctccatgcccatgtacgtgtccggcagccaggtcgtcgccagctccaccagcactggggctggggccagcaacagcagcggaggtggtggcagtggtggtggcggcggcggcgggggaggcggtggcgggggtggcagtggcagcaccggaggcggcggcagcggagcaggcacctacgtgatccaaggcggctacatgctgggcagtgccagccagtcttactctcacaccacccgtgcctcgccagccacggtccagtggctcctggacaactatgagacggctgagggcgtgagtctgccacggagcaccctctactgccactacttactgcactgccaggagcagaagctggagcccgtcaacgccgcctccttcggcaagctcatccgctccgtcttcatgggcctgcgaacccgccgtctgggcaccaggggcaactccaagtaccactactatggcctgcgcatcaaggccagctcacccctgctgcggctgatggaggaccagcagcacatggccatgcggggccagcccttctcgcagaagcagaggctcaagcccatccagaagatggaaggcatgaccaacggcgtggcggtggggcagcagccgagcacggggctgtcggacatcagcgcccaggtgcagcagtaccagcaatttttggatgcctctcggagcctccctgacttcacagagctcgacctccagggcaaggtgctgcctgagggcgtcgggcccggggacatcaaagccttccaggtcctgtaccgggaacactgtgaggccattgtcgacgtcatggtgaacctgcagttcaccctggtggagacgctgtggaagaccttctggaggtacaacctcagccagcccagtgaggcgccaccgctggctgtacatgacgaggccgagaagcgactgcccaaagccatcctggtgctcctctccaagttcgagcccgtgctccaatggaccaagcactgtgacaacgtgctgtaccagggcctggtggaaatcctcattcccgacgtgctgcggcccatccccagtgccttgacccaagcgatccggaactttgccaagagcctggagagctggctcacccacgccatggtcaacatccccgaggagatgctgcgggtgaaggtggccgcggctggcgccttcgcgcagacactgcggcgctacacgtcgctcaaccacctggcgcaggcggcgcgcgctgtgctgcagaacaccgcacagatcaaccagatgctgagcgacctcaaccgcgtggacttcgccaacgtgcaggagcaggcctcgtgggtgtgccgctgcgaggaccgcgtggtgcagcggctggagcaggacttcaaggtgacgctgcagcagcagaactcgctggagcagtgggcggcctggctggacggcgtggtgagccaggtgctcaagccctaccagggcagcgccggcttccccaaggccgccaagctcttcctcctcaagtggtccttctacagctccatggtgatccgggacctgaccctgcgcagcgccgccagcttcggttccttccacctcatccggctgctctacgacgagtacatgtactacctgatcgagcaccgcgtagcccaggccaagggcgagacccccatcgccgtcatgggcgagttcgccaatctggccacctccctgaaccccctggaccccgacaaagacgaggaggaagaagaggaggaggagagcgaggacgagctgccgcaggacatctcactggcggctggcggcgagtcacccgcgctgggcccggagaccctggagccgccggccaagctggcgcggactgacgcgcgcggcctcttcgtgcaggcgctgccctccagctaagcccttggcctccccgccccacccgcccccgccacccctccacgccagggtccctcaaagcttctgtggcttcgtggtcactgctccagcctcagccagggcagggagggggactccgagacagggaagaccggggccctcctcccttatggggccggcacaatcagtgggctgggcggagccgcagctgcaaactctgacacaaaagacgtgccttaaggaacccgccgcgtgcccaggtgccccgcggggcatccagctcggccccttggccgcccccctcccaggccccagcgtcttctccccagccccgtcctcccaccaccccagggggcaggcaggcaggccccctcccgtgcgaaactgttaacttattcagctcgctggctttgcacagcctgtcctgggcccagccctgagccccgggccggcgcaggtgggcgtcacctggggactccccactgtcagcagcagccccgggacaccctacccccagcaaccccactgcttccccttcttggtattaagtgcaattaaagccgtgggtgtcgcatcttctccagcgctgggccctcccttgcccccaagctcaagaagggggcactgcccggcccggctgtgaggagggcggcagggggcacggcctccagcttccaaagagcagcgagccgcggagccggggagtgcccacagaccccagcccccgcgcccccgccctccgccgctggtttgtaatggaaccttttctgtgcccctatcttcccggagaccacgcttctcctccgtgccgtgcgacccccaccccatgactattgtgcgattcgtgagcgccgcccgagcggagttggtaacttgttgggtttttttccaaccatcatggccttatctgttccagttttctcagtgttttcagcctgtgagatagatgtttatggcaagaaaaaggaaaaaaaaatggaaatctgacctattgtataaaaatcactattttgtgtgctccgcgtgctatagcttttggggcggccctgcccagtccccgtgcccacggggctccctctcccggtggtgaaagtgtccacacgtgtggtagtctagtgtgccgagctgttttctacctttttgtagtctttcttaaaacaataaattccgctgtgatatttgcct

SEQ ID NO: 25869 - DNA, 4112 bp, Homo sapiens
  source 1..4112: mol_type = unassigned DNA
gcgagcgtgggcgggccgttaggaaggtggggcgcggagcctggtaaccgttgccggtaacaacgccccgccccgtcgggcgggcgggctgcgcgaggctggctggcggcgggagccggaggaggagcggccgccgccgccaccgccgccgccatagagactgtagccgtggagactgttacttaccaacggggaccaacacgcagcagccgctgccgccgccgcgggagccgctgcccgaactcccggcccgaactccagacctgagcatgcagaattccgagggtggagcggattcgccagcgtccgtggctctgcgtccctcggcggcagccccgcctgtgccagcctccccgcagagggtgttggtccaggcagccagctccaatcccaaaggggcccagatgcagccgatctccctccccagagttcagcaggtaccccagcaggtgcagccggtgcagcacgtgtatcctgcccaggtgcagtacgtggaagggggagacgccgtctacaccaatggagccatacgaacagcctacacctacaaccccgagcctcagatgtacgcccccagcagcacggcttcttacttcgaggccccaggcggtgcccaggtgaccgtggcagcctcgtccccgccagcggtcccctcccacagcatggtgggcatcaccatggatgtcggggggagccccatcgtctccagcgcgggagcctatctcatccacggggggatggacagcaccagacactccctggcccacacctcccgctcatcgcccgccacgcttgaaatggcgattgaaaacctccaaaaaagcgaaggaatcacatcacacaaaagcggtttactcaacagccatctccagtggctgttggataattatgaaacagcggaaggtgtgagtctccccagaagttctctttacaaccactaccttcggcactgccaggagcacaagctagacccagtgaacgccgcctccttcgggaaactgatccgttctgtgtttatggggctgagaacgcggcggctgggcaccaggggcaactcgaagtaccattactatgggattcgtctgaagccggactcaccactgaaccggctgcaggaggacacgcagtacatggccatgcggcagcagcccatgcaccagaagcccaggtaccggccagcccagaagacggacagcctcggggacagcggctcccacagcggcctgcacagcactccggaacagaccatggccgtgcagagccagcaccaccagcagtacatagatgtctcccacgtcttccccgagttcccagcgcccgacctgggcagcttcctgctgcaggacggcgtcacactgcacgacgtcaaggccctgcagctggtgtacagacggcactgcgaggcaactgtagatgtggtgatgaacctccagttccactacatcgagaagctgtggctctccttctggaactctaaggcctcctccagcgacggccccacctctcttcctgccagtgacgaagaccccgagggcgccgtcctgcccaaggacaagcttatctccctgtgtcagtgcgaccccatcctcaggtggatgaggagctgcgaccacatcctctaccaggcgctggtggagattctcatccccgacgtgctgaggccggtccccagtaccttgacacaggccatccgtaactttgccaagagcttggaaggctggttgacaaatgccatgagtgacttcccacaacaggtcatccagaccaaggtgggcgtcgtcagtgccttcgcccagacgctgcggcgctacacgtccctcaaccacctggcgcaggcggcccgggcggtgctgcagaacacgtcccagatcaaccagatgctcagcgacctcaaccgcgtggactttgccaacgtgcaggagcaggcctcgtgggtgtgccagtgcgaggagagtgtggtgcagcggctggagcaggatttcaagctgaccctgcagcagcagagctccctggaccagtgggccagctggctggacagtgtggtcacccaggtcctgaagcagcatgccggcagccccagcttccccaaggccgcccggcagttcttgctgaaatggtccttttacagctccatggtgatccgggacctgaccctgcgcagcgctgccagcttcggctccttccacctcatccgcctgctctacgacgagtacatgttctacctggtggagcaccgcgtcgcggaggccaccggagagacgccgatcgctgtgatgggagagttcaacgatctcgcctctctgtcgctgacgctgctcgacaaagatgacatgggcgatgagcagcgtggcagcgaggcgggcccagacgcccgcagcctgggtgagcccctggtaaagcgggagcgcagtgaccccaaccactccctgcagggcatctagcagccccggccggcgcctcctcgaggttccaaaagatgccgcctggtcactctgggaacctggatttcaccggctccaccaaattagtgcctcttagatgatgtgatgtttactttgactcaagcgggggctcccggggtcagtgttcaagaaggaaagcagttgttgaagctacagaagcccaggccagggctcccactggctgtagctgtgctctgggtccccaggtccctgcgcagccaccagggccccaccagaccatgggttccttattctggacaaaccctcctctgctggaaccctggactttggccccagtccctttaagagctgaaagggctgtgctgagagcactggcctctgcactcaactggaaccaattttcaccatgattttaaaaattaaaaaaacctggcagagcccgactagaaagggacggcctctcccctcctacctgccaccgctggggaggcacagagctcgccagcgtccctggagtcccctcaggaatggaaagtggagtgcccttgtctggtagcaccatgtgggagggacccagctgggcgcagcgccctgtggccttttagatccagacctccctgccggatgccccgaggcgggaggccggctgtgctgcaggaacccatctccagatgccaaaggacttgaggggcagctgacaatcgctgtgtcccggcagatccgcagctcgaaaaagaacaagccacagaaacgggctcgctcgtgccaggacacagcagtgtctttcaaaaaatcaaaaccagaagttttatcagcagcaggaaggatgtgggactctgtccaagttcaccgtcaccatcaagccactggctgtggaaggagtttgtccaacagggtcagtgtcacagccacaacttcagaaagcagccatcccgcgtgtcgtccaaacagcagtgcctgcgtcccgctccacggagtcttccagaacacctccctctgaactaatcccggagcaccccacccccagcgagtcccacctggacctcttcaaagtcaaaactcttctctcgggacaaacaaatattcgggactttcgaagccctgaacttgagacaccaagtttgtctccatggaaacacgtagccgctgcagttggacagctgcgtgctggagttctgtccccaaaccaactgcagagaagaaagacgagcctcggcccaggacgcgatttctaacgaaatgcaatagttttctctttttggaaaaatgtttataccaatagttttgtgcgctaattgttattagaacgtttcttatgaatgtgtacattgcagtatattcagtcccaaatgttttgttctcattcacacagaaggtactaatgtcagctcacgtggcctttaaaaacctacttccccgcccgcaggagctcagagcatcgctgggcctgcgccagagtgaggggtgcaggaagacaaagacgcgtgctcactttagaaacgaaaagctgggaataatcacactgtttgtctggtcgtatagcccaaaccttagttgaaatcagacagaaagaatgtctttaaaatatacatctcctctccttggagacactgaagctcacagttaacggattgtaatgcccggcttttcctcactcctggtaaccaatacaagctggtttctgcctta

SEQ ID NO: 25870 - DNA, 4037 bp, Homo sapiens
  source 1..4037: mol_type = unassigned DNA
gcgagcgtgggcgggccgttaggaaggtggggcgcggagcctggtaaccgttgccggtaacaacgccccgccccgtcgggcgggcgggctgcgcgaggctggctggcggcgggagccggaggaggagcggccgccgccgccaccgccgccgccatagagactgtagccgtggagactgttacttaccaacggggaccaacacgcagcagccgctgccgccgccgcgggagccgctgcccgaactcccggcccgaactccagacctgagcatgcagaattccgagggtggagcggattcgccagcgtccgtggctctgcgtccctcggcggcagccccgcctgtgccagcctccccgcagagggtgttggtccaggcagccagctccaatcccaaaggggcccagatgcagccgatctccctccccagagttcagcaggtaccccagcaggtgcagccggtgcagcacgtgtatcctgcccaggtgcagtacgtggaagggggagacgccgtctacaccaatggagccatacgaacagcctacacctacaaccccgagcctcagatgtacgcccccagcagcacggcttcttacttcgaggccccaggcggtgcccaggtgaccgtggcagcctcgtccccgccagcggtcccctcccacagcatggtgggcatcaccatggatgtcggggggagccccatcgtctccagcgcgggagcctatctcatccacggggggatggacagcaccagacactccctggcccacacctcccgctcatcgcccgccacgctccagtggctgttggataattatgaaacagcggaaggtgtgagtctccccagaagttctctttacaaccactaccttcggcactgccaggagcacaagctagacccagtgaacgccgcctccttcgggaaactgatccgttctgtgtttatggggctgagaacgcggcggctgggcaccaggggcaactcgaagtaccattactatgggattcgtctgaagccggactcaccactgaaccggctgcaggaggacacgcagtacatggccatgcggcagcagcccatgcaccagaagcccaggtaccggccagcccagaagacggacagcctcggggacagcggctcccacagcggcctgcacagcactccggaacagaccatggccgtgcagagccagcaccaccagcagtacatagatgtctcccacgtcttccccgagttcccagcgcccgacctgggcagcttcctgctgcaggacggcgtcacactgcacgacgtcaaggccctgcagctggtgtacagacggcactgcgaggcaactgtagatgtggtgatgaacctccagttccactacatcgagaagctgtggctctccttctggaactctaaggcctcctccagcgacggccccacctctcttcctgccagtgacgaagaccccgagggcgccgtcctgcccaaggacaagcttatctccctgtgtcagtgcgaccccatcctcaggtggatgaggagctgcgaccacatcctctaccaggcgctggtggagattctcatccccgacgtgctgaggccggtccccagtaccttgacacaggccatccgtaactttgccaagagcttggaaggctggttgacaaatgccatgagtgacttcccacaacaggtcatccagaccaaggtgggcgtcgtcagtgccttcgcccagacgctgcggcgctacacgtccctcaaccacctggcgcaggcggcccgggcggtgctgcagaacacgtcccagatcaaccagatgctcagcgacctcaaccgcgtggactttgccaacgtgcaggagcaggcctcgtgggtgtgccagtgcgaggagagtgtggtgcagcggctggagcaggatttcaagctgaccctgcagcagcagagctccctggaccagtgggccagctggctggacagtgtggtcacccaggtcctgaagcagcatgccggcagccccagcttccccaaggccgcccggcagttcttgctgaaatggtccttttacagctccatggtgatccgggacctgaccctgcgcagcgctgccagcttcggctccttccacctcatccgcctgctctacgacgagtacatgttctacctggtggagcaccgcgtcgcggaggccaccggagagacgccgatcgctgtgatgggagagttcaacgatctcgcctctctgtcgctgacgctgctcgacaaagatgacatgggcgatgagcagcgtggcagcgaggcgggcccagacgcccgcagcctgggtgagcccctggtaaagcgggagcgcagtgaccccaaccactccctgcagggcatctagcagccccggccggcgcctcctcgaggttccaaaagatgccgcctggtcactctgggaacctggatttcaccggctccaccaaattagtgcctcttagatgatgtgatgtttactttgactcaagcgggggctcccggggtcagtgttcaagaaggaaagcagttgttgaagctacagaagcccaggccagggctcccactggctgtagctgtgctctgggtccccaggtccctgcgcagccaccagggccccaccagaccatgggttccttattctggacaaaccctcctctgctggaaccctggactttggccccagtccctttaagagctgaaagggctgtgctgagagcactggcctctgcactcaactggaaccaattttcaccatgattttaaaaattaaaaaaacctggcagagcccgactagaaagggacggcctctcccctcctacctgccaccgctggggaggcacagagctcgccagcgtccctggagtcccctcaggaatggaaagtggagtgcccttgtctggtagcaccatgtgggagggacccagctgggcgcagcgccctgtggccttttagatccagacctccctgccggatgccccgaggcgggaggccggctgtgctgcaggaacccatctccagatgccaaaggacttgaggggcagctgacaatcgctgtgtcccggcagatccgcagctcgaaaaagaacaagccacagaaacgggctcgctcgtgccaggacacagcagtgtctttcaaaaaatcaaaaccagaagttttatcagcagcaggaaggatgtgggactctgtccaagttcaccgtcaccatcaagccactggctgtggaaggagtttgtccaacagggtcagtgtcacagccacaacttcagaaagcagccatcccgcgtgtcgtccaaacagcagtgcctgcgtcccgctccacggagtcttccagaacacctccctctgaactaatcccggagcaccccacccccagcgagtcccacctggacctcttcaaagtcaaaactcttctctcgggacaaacaaatattcgggactttcgaagccctgaacttgagacaccaagtttgtctccatggaaacacgtagccgctgcagttggacagctgcgtgctggagttctgtccccaaaccaactgcagagaagaaagacgagcctcggcccaggacgcgatttctaacgaaatgcaatagttttctctttttggaaaaatgtttataccaatagttttgtgcgctaattgttattagaacgtttcttatgaatgtgtacattgcagtatattcagtcccaaatgttttgttctcattcacacagaaggtactaatgtcagctcacgtggcctttaaaaacctacttccccgcccgcaggagctcagagcatcgctgggcctgcgccagagtgaggggtgcaggaagacaaagacgcgtgctcactttagaaacgaaaagctgggaataatcacactgtttgtctggtcgtatagcccaaaccttagttgaaatcagacagaaagaatgtctttaaaatatacatctcctctccttggagacactgaagctcacagttaacggattgtaatgcccggcttttcctcactcctggtaaccaatacaagctggtttctgcctta

SEQ ID NO: 25871 - DNA, 3576 bp, Homo sapiens
  source 1..3576: mol_type = unassigned DNA
ccaggaccttggggctgggctggagtgaaggtggctacgagttttccagatttaggagacttcagaaaggtggggcagatagaatggagatggcaaagatctctttgggcatatatgggcctggcgaagtaatggaataatttctaattttcggagaaggcaagtgccctcatgccgggatggcagaagatgagcctgatgctaagagccccaagactgggggaagggcccccccaggtggtgctgaggctggggaacctaccacccttcttcagaggctccgaggtaccatttccaaggccgtgcagaacaaagtagaggggatcctgcaagatgtacagaaattttctgacaatgacaagctgtatctctaccttcagctcccctcaggacccaccactggagacaaaagctcagagccaagtacactgagcaatgaggagtacatgtatgcctataggtggatccgcaaccacctggaagagcacactgacacctgtctgccaaagcaaagtgtttatgatgcctatcggaagtactgtgagagtcttgcctgttgccgcccactcagcacagccaactttggcaagatcatcagagagatcttccctgacatcaaagctcgaaggcttggtggccggggccagtccaaatattgctacagtggcataaggaggaagaccttggtgtctatgccacccctgcctggacttgacctaaagggttctgagagtccagaaatgggcccagaagtaaccccagcacctcgagatgaactggtggaggcagcgtgtgccctgacctgtgactgggcagagcggatcctgaaacggtccttcagttccatcgttgaggtcgcccgcttcctgctacagcagcatctcatctctgcccgatctgcacatgcccatgtgcttaaggccatggggctcgctgaagaggacgaacatgcacctcgggaacggtcatctaaaccaaagaatggtttagagaacccagagggtggagcccacaagaagccagagagactggcccagcctcctaaggatctggaagcccgaactggggccggtcctctcgcacgtggagagcggaagaagagtgtagttgagagctcggccccaggagccaataacctgcaggttaatgccctagtggctcggctgcctctgctccttccccgggcccctcgctcactaattccgccaatcccagtctctccacctattctggcccccaggctttcttcaggtgccctgaaagtggctacactgcctctgtctagtagggccggggcacccccagcagctgtgcccatcattaacatgatcttaccaactgttcctgctttgcctggacctggacctgggcctgggcgagctccacctgggggactcactcagccccggggcacagagaacagagaggtaggcataggtggtgaccaaggaccacatgacaagggtgtcaagaggacagctgaagtacctgtgagtgaggccagtgggcaggctccaccagctaaagcagcaaagcaggatatagaggatacagcaagtgatgccaaaaggaaacgggggcgccctcgaaaaaagtcaggtggaagtggggaaaggaattctacccctctcaagtcagcagctgccatggaatctgcccagtcctcaaggttaccatgggagacatggggctcaggaggggaaggcaactcagctggaggggcagagaggccagggccaatgggagaggctgaaaagggggcagtacttgcccagggtcagggagatggtactgtttccaaaggaggaaggggccccggttcccagcataccaaagaagcagaagataaaattcccttggtcccctcaaaagtgagtgtcatcaagggcagcagaagccaaaaggaggcttttcctttggcaaagggagaggtagacactgcaccacagggtaataaagacttaaaggagcatgtgcttcaaagttccttatcccaggagcataaagacccaaaagcaacacccccatgatacaggtctgtggggaagagtgtttatatccctacgttaactttgcctagtagaggcccttctttgcacttgcttctcatttggctattcttttcctaaggaagtccattctcctctgtacagacagctgagtcacccagtctacttagtacctggttgctgcctctgaccttttcagcttgataccctgggctttagtgtaaccaataaatctgtagtgaccttacctgtattccctgtgctatcctgtgggaaggtaggaatgggctaagtatgatgaatatataggttagggatcttttggttttaaatcacagaaaacctaattcaaactggcttaaaataaaaaggatttattggttcatgtaactagaaagtccataggtagtgctggctccaggtgaagacttgacccagtagttcagtatgtctctaaataccggactgacttttttctcactgttgcatcttctgtaggaccatttaagtctgggccacttaatggctgccagcattcctaagattacacttttccccatttatgtccaatcagaaaaagaaggcatctttgtaccagaaatctcagcaaaagccctaatattcacactgattaggcctgggtcacatgtccaccctgaccaatcactgtggccaggaggatgatacatgctaatttgcttattctatatcatggacaacacctttggggaaaagggtgggggtcagcctccccaaaatcacatggattccccaagtggaaactaggagcagggagttgcttgggtggccgctaacaccaggctactcttattttagcttgctaagttgagatcagctagacctgctttcttttctcctcagtcttgcatttccctcaatacaagctgtagcctctttcctcgtttctagtctcagaaggaaggagagggaagccattctcctctagggactcttcagtctcatttagatgatagtccctttttttctacctccatattagagatggagctccttccttttcctgtttcttaatttttgtcttctcattcctgcttccctctcaccctattgccagttccaccaactagagtgaaagacttcctagccatttcattaaatctattctgtatccaccaggtggcagcatcttgtcatacgtgtcaggacttaggactgcggggtttaggttagatgtcacggaaaaagctagttctgtggtcaggcggcaccaatgagaaaggaatgcagaccctccagatgtatccttgggaaaagcagtaaaccaactaatatttattgaagacctactttgtcctctacatagggtagcttctgtcagggaatcttggttcttcccaagaaacactgattttctttcagggagacttcatgtgttcatttatttccaccacagcagattttaagaaattataatatgtaatatttgatatctataaagagtatatctaacgtgaataaattatgaagcatactaatgagtacctatgacccataacacatatacattaaaacattttaaatacca

SEQ ID NO: 25872 - DNA, 2459 bp, Homo sapiens
  source 1..2459: mol_type = unassigned DNA
cgtgtatctaggcagatcgcggctgttacaaccattcagaaaaaggaaaataaagcaacgcacgagccggctgggccaggaccttggggctgggctggagtgaaggtggctacgagttttccagatttaggagacttcagaaaggtggggcagatagaatggagatggcaaagatctctttgggcatatatgggcctggcgaagtaatggaataatttctaattttcggagaaggcaaccctcatgccgggatggcagaagatgagcctgatgctaagagccccaagactgggggaagggcccccccaggtggtgctgaggctggggaacctaccacccttcttcagaggctccgaggtaccatttccaaggccgtgcagaacaaagtagaggggatcctgcaagatgtacagaaattttctgacaatgacaagctgtatctctaccttcagctcccctcaggacccaccactggagacaaaagctcagagccaagtacactgagcaatgaggagtacatgtatgcctataggtggatccgcaaccacctggaagagcacactgacacctgtctgccaaagcaaagtgtttatgatgcctatcggaagtactgtgagagtcttgcctgttgccgcccactcagcacagccaactttggcaagatcatcagagagatcttccctgacatcaaagctcgaaggcttggtggccggggccagtccaaatattgctacagtggcataaggaggaagaccttggtgtctatgccacccctgcctggacttgacctaaagggttctgagagtccagaaatgggcccagaagtaaccccagcacctcgagatgaactggtggaggcagcgtgtgccctgacctgtgactgggcagagcggatcctgaaacggtccttcagttccatcgttgaggtcgcccgcttcctgctacagcagcatctcatctctgcccgatctgcacatgcccatgtgcttaaggccatggggctcgctgaagaggacgaacatgcacctcgggaacggtcatctaaaccaaagaatggtttagagaacccagagggtggagcccacaagaagccagagagactggcccagcctcctaaggatctggaagcccgaactggggccggtcctctcgcacgtggagagcggaagaagagtgtagttgagagctcggccccaggagccaataacctgcaggttaatgccctagtggctcggctgcctctgctccttccccgggcccctcgctcactaattccgccaatcccagtctctccacctattctggcccccaggctttcttcaggtgccctgaaagtggctacactgcctctgtctagtagggccggggcacccccagcagctgtgcccatcattaacatgatcttaccaactgttcctgctttgcctggacctggacctgggcctgggcgagctccacctgggggactcactcagccccggggcacagagaacagagaggtaggcataggtggtgaccaaggaccacatgacaagggtgtcaagaggacagctgaagtacctgtgagtgaggccagtgggcaggctccaccagctaaagcagcaaagcaggatatagaggatacagcaagtgatgccaaaaggaaacgggggcgccctcgaaaaaagtcaggtggaagtggggaaaggaattctacccctctcaagtcagcagctgccatggaatctgcccagtcctcaaggttaccatgggagacatggggctcaggaggggaaggcaactcagctggaggggcagagaggccagggccaatgggagaggctgaaaagggggcagtacttgcccagggtcagggagatggtactgtttccaaaggaggaaggggccccggttcccagcataccaaagaagcagaagataaaattcccttggtcccctcaaaagtgagtgtcatcaagggcagcagaagccaaaaggaggcttttcctttggcaaagggagaggtagacactgcaccacagggtaataaagacttaaaggagcatgtgcttcaaagttccttatcccaggagcataaagacccaaaagcaacacccccatgatacaggtctgtggggaagagtgtttatatccctacgttaactttgcctagtagaggcccttctttgcacttgcttctcatttggctattcttttcctaaggaagtccattctcctctgtacagacagctgagtcacccagtctacttagtacctggttgctgcctctgaccttttcagcttgataccctgggctttagtgtaaccaataaatctgtagtgaccttacctgtattccctgtgctatcctgtgggaaggtaggaatgggctaagtatgatgaatatataggttagggatcttttggttttaaatcacagaaaacctaattcaaactggcttaaaataaaaaggatttat

SEQ ID NO: 25873 - DNA, 2056 bp, Homo sapiens
  source 1..2056: mol_type = unassigned DNA
ttttttttccaagcctagaagggcagaatatgttcgtatcctttctgacctcccaggcatatgcaatgttttccagatttaggagacttcagaaaggtggggcagatagaatggagatggcaaagatctctttgggcatatatgggcctggcgaagtaatggaataatttctaattttcggagaaggcaagtggtgagaaaaagaccaccggggaaattcggaggctttgtttctgtttctctgcctttctggccctcatgccgggatggcagaagatgagcctgatgctaagagccccaagactgggggaagggcccccccaggtggtgctgaggctggggaacctaccacccttcttcagaggctccgaggtaccatttccaaggccgtgcagaacaaagtagaggggatcctgcaagatgtacagaaattttctgacaatgacaagctgtatctctaccttcagctcccctcaggacccaccactggagacaaaagctcagagccaagtacactgagcaatgaggagtacatgtatgcctataggtggatccgcaaccacctggaagagcacactgacacctgtctgccaaagcaaagtgtttatgatgcctatcggaagtactgtgagagtcttgcctgttgccgcccactcagcacagccaactttggcaagatcatcagagagatcttccctgacatcaaagctcgaaggcttggtggccggggccagtccaaatattgctacagtggcataaggaggaagaccttggtgtctatgccacccctgcctggacttgacctaaagggttctgagagtccagaaatgggcccagaagtaaccccagcacctcgagatgaactggtggaggcagcgtgtgccctgacctgtgactgggcagagcggatcctgaaacggtccttcagttccatcgttgaggtcgcccgcttcctgctacagcagcatctcatctctgcccgatctgcacatgcccatgtgcttaaggccatggggctcgctgaagaggacgaacatgcacctcgggaacggtcatctaaaccaaagaatggtttagagaacccagagggtggagcccacaagaagccagagagactggcccagcctcctaaggatctggaagcccgaactggggccggtcctctcgcacgtggagagcggaagaagagtgtagttgagagctcggccccaggagccaataacctgcaggttaatgccctagtggctcggctgcctctgctccttccccgggcccctcgctcactaattccgccaatcccagtctctccacctattctggcccccaggctttcttcaggtgccctgaaagtggctacactgcctctgtctagtagggccggggcacccccagcagctgtgcccatcattaacatgatcttaccaactgttcctgctttgcctggacctggacctgggcctgggcgagctccacctgggggactcactcagccccggggcacagagaacagagaggtaggcataggtggtgaccaaggaccacatgacaagggtgtcaagaggacagctgaagtacctgtgagtgaggccagtgggcaggctccaccagctaaagcagcaaagcaggatatagaggatacagcaagtgatgccaaaaggaaacgggggcgccctcgaaaaaagtcaggtggaagtggggaaaggaattctacccctctcaagtcagcagctgccatggaatctgcccagtcctcaaggttaccatgggagacatggggctcaggaggggaaggcaactcagctggaggggcagagaggccagggccaatgggagaggctgaaaagggggcagtacttgcccagggtcagggagatggtactgtttccaaaggaggaaggggccccggttcccagcataccaaagaagcagaagataaaattcccttggtcccctcaaaagtgagtgtcatcaagggcagcagaagccaaaaggaggcttttcctttggcaaagggagaggtagacactgcaccacagggtaataaagacttaaagga

SEQ ID NO: 25874 - DNA, 562 bp, Homo sapiens
  source 1..562: mol_type = unassigned DNA
agtgaaggtggctacgaggtagtttctctttctcccttacctttattgttgcttgtgttggaaggcgactgttcagagttttccagatttaggagacttcagaaaggtggggcagatagaatggagatggcaaagatctctttgggcatatatgggcctggcgaagtaatggaataatttctaattttcggagaagccctcatgccgggatggcagaagatgagcctgatgctaagagccccaagactgggggaagggcccccccaggtggtgctgaggctggggaacctaccacccttcttcagaggctccgaggtaccatttccaaggccgtgcagaacaaagtagaggggatcctgcaagatgtacagaaattttctgacaatgacaagctgtatctctaccttcagctcccctcaggacccaccactggagacaaaagctcagagccaagtacactgagcaatgaggagtacatgtatgcctataggtggatccgcaaccacctggaagagcacactgacacctgtctgccaaagcaaagtgtttatgatgcctatcg

SEQ ID NO: 25875 - DNA, 902 bp, Homo sapiens
  source 1..902: mol_type = unassigned DNA
agcgcatgagttccgctaccccgccccacccccgctccactttgcagaaaccggggattgaatggagggggaagggaaggagttttccagatttaggagacttcagaaaggtggggcagatagaatggagatggcaaagatctctttgggcatatatgggcctggcgaagtaatggaataatttctaattttcggagaagccctcatgccgggatggcagaagatgagcctgatgctaagagccccaagactgggggaagggcccccccaggtggtgctgaggctggggaacctaccacccttcttcagaggctccgaggtaccatttccaaggccgtgcagaacaaagtagaggggatcctgcaagatgtacagaaattttctgacaatgacaagctgtatctctaccttcagctcccctcaggacccaccactggagacaaaagctcagagccaagtacactgagcaatgaggagtacatgtatgcctataggtggatccgcaaccacctggaagagcacactgacacctgtctgccaaagcaaagtgtttatgatgcctatcggaagtactgtgagagtcttgcctgttgccgcccactcagcacagccaactttggcaagatcatcagagagatcttccctgacatcaaagctcgaaggcttggtggccggggccagtccaaatattgctacagtggcataaggaggaagaccttggtgtctatgccacccctgcctggacttgacctaaagggttctgagagtccagaaatgggcccagaagtaaccccagcacctcgagatgaactggtggaggcagcgtgtgccctgacctgtgactgggcagagcggatcctgaaacggtccttcagttccatcgttgaggtcgcccgcttcct

SEQ ID NO: 25876 - DNA, 585 bp, Homo sapiens
  source 1..585: mol_type = unassigned DNA
agtgaaggtggctacgaggtagtttctctttctcccttacctttattgttgcttgtgttggaaggcgactgttcagagttttccagatttaggagacttcagaaaggtggggcagatagaatggagatggcaaagatctctttgggcatatatgggcctggcgaagtaatggaataatttctaattttcggagaaggcaagtgccctcatgccgggatggcagaagatgagcctgatgctaagagccccaagactgggggaagggcccccccaggtggtgctgaggctggggaacctaccacccttcttcagaggctccgaggtaccatttccaaggccgtgcagaacaaagtagaggggatcctgcaagatgtacagaaattttctgacaatgacaagctgtatctctaccttcagctcccctcaggacccaccactggagacaaaagctcagagccaagtacactgagcaatgaggagtacatgtatgcctataggtggatccgcaaccacctggaagagcacactgacacctgtctgccaaagcaaagtgtttatgatgcctatcggaagtactgtgagagt

SEQ ID NO: 25877 - DNA, 545 bp, Homo sapiens
  source 1..545: mol_type = unassigned DNA
agcagcgggggaagtcgtggcgagattaagtaatgagaacttgggcccagttttttttccaagcctagaagggcagaatatgttcgtatcctttctgacctcccaggcatatgcaatgttttccagatttaggagacttcagaaaggtggggcagatagaatggagatggcaaagatctctttgggcatatatgggcctggcgaagtaatggaataatttctaattttcggagaaggcaagtgccctcatgccgggatggcagaagatgagcctgatgctaagagccccaagactgggggaagggcccccccaggtggtgctgaggctggggaacctaccacccttcttcagaggctccgaggtaccatttccaaggccgtgcagaacaaagtagaggggatcctgcaagatgtacagaaattttctgacaatgacaagctgtatctctaccttcagctcccctcaggacccaccactggagacaaaagctcagagccaagtacactgagcaatgaggagtacatgtatgcctataggtggatcc

SEQ ID NO: 25878 - DNA, 597 bp, Homo sapiens
  source 1..597: mol_type = unassigned DNA
ttcagaaaaaggaaaataaagcaacgcacgagccggctgggccaggaccttggggctgggctggagtgaaggtggctacgagttttccagatttaggagacttcagaaaggtggggcagatagaatggagatggcaaagatctctttgggcatatatgggcctggcgaagtaatggaataatttctaattttcggagaaggcaagtggtgagaaaaagaccaccggggaaattcggaggctttgtttctgtttctctgcctttctggccctcatgccgggatggcagaagatgagcctgatgctaagagccccaagactgggggaagggcccccccaggtggtgctgaggctggggaacctaccacccttcttcagaggctccgaggtaccatttccaaggccgtgcagaacaaagtagaggggatcctgcaagatgtacagaaattttctgacaatgacaagctgtatctctaccttcagctcccctcaggacccaccactggagacaaaagctcagagccaagtacactgagcaatgaggagtacatgtatgcctataggtggatccgcaaccacctggaagagcacactgacac

SEQ ID NO: 25879 - DNA, 903 bp, Homo sapiens
  source 1..903: mol_type = unassigned DNA
aaccggggattgaatggagggggaagggaaggaggtgggggcgcgcctcaggatgggctgttgtgggagatgacgtaggggccggcgacgtggggagggggagcagcgggggaagtcgtggcgagattaagtaatgagaacttgggcccagttttttttccaagcctagaagggcagaatatgttcgtatcctttctgacctcccaggcatatgcaatgttttccagatttaggagacttcagaaaggtggggcagatagaatggagatggcaaagatctctttgggcatatatgggcctggcgaagtaatggaataatttctaattttcggagaagccctcatgccgggatggcagaagatgagcctgatgctaagagccccaagactgggggaagggcccccccaggtggtgctgaggctggggaacctaccacccttcttcagaggctccgaggtaccatttccaaggccgtgcagaacaaagtagaggggatcctgcaagatgtacagaaattttctgacaatgacaagctgtatctctaccttcagctcccctcaggacccaccactggagacaaaagctcagagccaagtacactgagcaatgaggagtacatgtatgcctataggtggatccgcaaccacctggaagagcacactgacacctgtctgccaaagcaaagtgtttatgatgcctatcggaagtactgtgagagtcttgcctgttgccgcccactcagcacagccaactttggcaagatcatcagagagatcttccctgacatcaaagctcgaaggcttggtggccggggccagtccaaatattgctacagtggcataaggaggaagaccttggtgtctatgccacccctgcctggacttgacctaaagggttctgaga

SEQ ID NO: 25880 - DNA, 2100 bp, Homo sapiens
  source 1..2100: mol_type = unassigned DNA
attcagaaaaaggaaaataaagcaacgcacgagccggctgggccaggaccttggggctgggctggagtgaaggtggctacgagttttccagatttaggagacttcagaaaggtggggcagatagaatggagatggcaaagatctctttgggcatatatgggcctggcgaagtaatggaataatttctaattttcggagaagccctcatgccgggatggcagaagatgagcctgatgctaagagccccaagactgggggaagggcccccccaggtggtgctgaggctggggaacctaccacccttcttcagaggctccgaggtaccatttccaaggccgtgcagaacaaagtagaggggatcctgcaagatgtacagaaattttctgacaatgacaagctgtatctctaccttcagctcccctcaggacccaccactggagacaaaaggaagtactgtgagagtcttgcctgttgccgcccactcagcacagccaactttggcaagatcatcagagagatcttccctgacatcaaagctcgaaggcttggtggccggggccagtccaaatattgctacagtggcataaggaggaagaccttggtgtctatgccacccctgcctggacttgacctaaagggttctgagagtccagaaatgggcccagaagtaaccccagcacctcgagatgaactggtggaggcagcgtgtgccctgacctgtgactgggcagagcggatcctgaaacggtccttcagttccatcgttgaggtcgcccgcttcctgctacagcagcatctcatctctgcccgatctgcacatgcccatgtgcttaaggccatggggctcgctgaagaggacgaacatgcacctcgggaacggtcatctaaaccaaagaatggtttagagaacccagagggtggagcccacaagaagccagagagactggcccagcctcctaaggatctggaagcccgaactggggccggtcctctcgcacgtggagagcggaagaagagtgtagttgagagctcggccccaggagccaataacctgcaggttaatgccctagtggctcggctgcctctgctccttccccgggcccctcgctcactaattccgccaatcccagtctctccacctattctggcccccaggctttcttcaggtgccctgaaagtggctacactgcctctgtctagtagggccggggcacccccagcagctgtgcccatcattaacatgatcttaccaactgttcctgctttgcctggacctggacctgggcctgggcgagctccacctgggggactcactcagccccggggcacagagaacagagaggtaggcataggtggtgaccaaggaccacatgacaagggtgtcaagaggacagctgaagtacctgtgagtgaggccagtgggcaggctccaccagctaaagcagcaaagcaggatatagaggatacagcaagtgatgccaaaaggaaacgggggcgccctcgaaaaaagtcaggtggaagtggggaaaggaattctacccctctcaagtcagcagctgccatggaatctgcccagtcctcaaggttaccatgggagacatggggctcaggaggggaaggcaactcagctggaggggcagagaggccagggccaatgggagaggctgaaaagggggcagtacttgcccagggtcagggagatggtactgtttccaaaggaggaaggggccccggttcccagcataccaaagaagcagaagataaaattcccttggtcccctcaaaagtgagtgtcatcaagggcagcagaagccaaaaggaggcttttcctttggcaaagggagaggtagacactgcaccacagggtaataaagacttaaaggagcatgtgcttcaaagttccttatcccaggagcataaagacccaaaagcaacacccccatgatacaggtctgtggggaagagtgtttatatccctacgttaactttgcctagtagaggcccttctttgcacttgcttctcatttggctattcttttcctaaggaagtccattctcctctgtacagacagctgagtcacccagtctacttagtacctg

SEQ ID NO: 25881 - DNA, 2355 bp, Homo sapiens
  source 1..2355: mol_type = unassigned DNA
gcagcagtgaccaatgacagagcaggccgcccgtgtatctaggcagatcgcggctgttacaaccattcagaaaaaggaaaataaagcaacgcacgagccggctgggccaggaccttggggctgggctggagtgaaggtggctacgagttttccagatttaggagacttcagaaaggtggggcagatagaatggagatggcaaagatctctttgggcatatatgggcctggcgaagtaatggaataatttctaattttcggagaagccctcatgccgggatggcagaagatgagcctgatgctaagagccccaagactgggggaagggcccccccaggtggtgctgaggctggggaacctaccacccttcttcagaggctccgaggtaccatttccaaggccgtgcagaacaaagtagaggggatcctgcaagatgtacagaaattttctgacaatgacaagctgtatctctaccttcagctcccctcaggacccaccactggagacaaaagctcagagccaagtacactgagcaatgaggagtacatgtatgcctataggtggatccgcaaccacctggaagagcacactgacacctgtctgccaaagcaaagtgtttatgatgcctatcggaagtactgtgagagtcttgcctgttgccgcccactcagcacagccaactttggcaagatcatcagagagatcttccctgacatcaaagctcgaaggcttggtggccggggccagtccaaatattgctacagtggcataaggaggaagaccttggtgtctatgccacccctgcctggacttgacctaaagggttctgagagtccagaaatgggcccagaagtaaccccagcacctcgagatgaactggtggaggcagcgtgtgccctgacctgtgactgggcagagcggatcctgaaacggtccttcagttccatcgttgaggtcgcccgcttcctgctacagcagcatctcatctctgcccgatctgcacatgcccatgtgcttaaggccatggggctcgctgaagaggacgaacatgcacctcgggaacggtcatctaaaccaaagaatggtttagagaacccagagggtggagcccacaagaagccagagagactggcccagcctcctaaggatctggaagcccgaactggggccggtcctctcgcacgtggagagcggaagaagagtgtagttgagagctcggccccaggagccaataacctgcaggttaatgccctagtggctcggctgcctctgctccttccccgggcccctcgctcactaattccgccaatcccagtctctccacctattctggcccccaggctttcttcaggtgccctgaaagtggctacactgcctctgtctagtagggccggggcacccccagcagctgtgcccatcattaacatgatcttaccaactgttcctgctttgcctggacctggacctgggcctgggcgagctccacctgggggactcactcagccccggggcacagagaacagagaggtaggcataggtggtgaccaaggaccacatgacaagggtgtcaagaggacagctgaagtacctgtgagtgaggccagtgggcaggctccaccagctaaagcagcaaagcaggatatagaggatacagcaagtgatgccaaaaggaaacgggggcgccctcgaaaaaagtcaggtggaagtggggaaaggaattctacccctctcaagtcagcagctgccatggaatctgcccagtcctcaaggttaccatgggagacatggggctcaggaggggaaggcaactcagctggaggggcagagaggccagggccaatgggagaggctgaaaagggggcagtacttgcccagggtcagggagatggtactgtttccaaaggaggaaggggccccggttcccagcataccaaagaagcagaagataaaattcccttggtcccctcaaaagtgagtgtcatcaagggcagcagaagccaaaaggaggcttttcctttggcaaagggagaggtagacactgcaccacagggtaataaagacttaaaggagcatgtgcttcaaagttccttatcccaggagcataaagacccaaaagcaacacccccatgatacaggtctgtggggaagagtgtttatatccctacgttaactttgcctagtagaggcccttctttgcacttgcttctcatttggctattcttttcctaaggaagtccattctcctctgtacagacagctgagtcacccagtctacttagtacctggttgctgcctctgaccttttcagcttgataccctgggctttagtgtaaccaataaatctgtagtgacctta

SEQ ID NO: 25882 - DNA, 537 bp, Homo sapiens
  source 1..537: mol_type = unassigned DNA
ttttccagatttaggagacttcagaaagccctcatgccgggatggcagaagatgagcctgatgctaagagccccaagactgggggaagggcccccccaggtggtgctgaggctggggaacctaccacccttcttcagaggctccgaggtaccatttccaaggccgtgcagaacaaagtagaggggatcctgcaagatgtacagaaattttctgacaatgacaagctgtatctctaccttcagctcccctcaggacccaccactggagacaaaagctcagagccaagtacactgagcaatgaggagtacatgtatgcctataggtggatccgcaaccacctggaagagcacactgacacctgtctgccaaagcaaagtgtttatgatgcctatcggaagtactgtgagagtcttgcctgttgccgcccactcagcacagccaactttggcaagatcatcagagagatcttccctgacatcaaagctcgaaggcttggtggccggggccagtccaaatattgctacagtggcataagga

SEQ ID NO: 25883 - DNA, 3460 bp, Homo sapiens
  source 1..3460: mol_type = unassigned DNA
tccggcggccaggaggatggccaaggtcccggagctggaagacaccttcctgcaggcgcagcctgcgccccaactgtccccggggatccaggaagactgctgtgtgcagctcctgggcaagggcttgctagtctatccggaagaaacagtgtacctggcggccgaagggcagcccgggggcgagcagggcggcggggagaaaggcgaagacccggagctgccgggggcagtgaaatcagaaatgcacttaaacaatggtaacttttcctctgaagaagaggacgccgacaaccacgacagcaaaaccaaagcagcggatcaatacctgtctcagaagaaaaccatcacgcagattgtgaaggataaaaagaagcagacacagctcacgctgcagtggcttgaagagaattacattgtatgtgaaggagtttgcttaccacggtgcattctttatgcacactacttagatttctgtaggaaagagaaattagagccagcctgtgcggccacctttggaaagacaattcgccagaagtttcccctcctaacaacaaggcggcttggaacaagaggccattcaaagtatcattactatgggattggcatcaaagagagcagtgcatattaccactccgtttattctggaaagggcttgacaaggttttctggaagcaagctaaagaatgagggtggcttcactcgtaaatattcgcttagctcaaaaactggaacacttcttccagaattccccagcgctcaacaccttgtataccaaggatgcatttctaaggacaaggttgatacgctcataatgatgtacaaaactcactgccagtgtatcctggacaatgcaattaatggaaactttgaagagatccagcattttttattacacttttggcaaggaatgcctgaccatctccttcccctgctcgaaaatcctgttatcattgatattttctgtgtttgtgactcaattctttataaggttcttacagatgtactcattcctgcaacaatgcaagaaatgcctgaaagcttattagcagacataagaaattttgctaaaaattgggaacagtgggttgtttcatccttggaaaacttgccagaagctctaactgacaagaaaatacctattgtgcgaagatttgtatcttctctgaaacgacaaacatctttcttacatcttgcccagattgccagaccagctctctttgaccagcatgtcgttaattctatggtgtctgatattgaaagggttgatttgaacagcattggctctcaagcccttcttaccatttcaggcagcacagacactgaatctggtatctacactgaacatgactctatcactgtgttccaagaactgaaggatctccttaagaagaatgccactgtggaggcttttattgaatggttggatactgtggtagaacagagagttattaagaccagcaaacaaaatggaaggtcattaaagaagagagctcaagactttctgttaaagtggagtttttttggtgctcgagtaatgcataatctcaccttgaacaatgcatccagttttggttcttttcatttgattcgaatgcttctcgatgaatacattctcctggccatggagacccagtttaataatgacaaagagcaggagttacagaatttattggacaagtatatgaagaattcagatgcgagtaaagctgctttcactgcttctccgagttcatgctttctggccaaccgtaataaagggagcatggtttccagcgacgctgtgaagaatgaaagccacgtggagacaacctatctccctctgccatccagtcaacctggaggcctaggccctgctctgcaccagttccctgctgggaacacagacaacatgccgctcacaggtcaaatggagctttcacagattgctggtcatctgatgacaccacccatttctccagccatggcaagccgaggaagtgtcattaaccaaggaccaatggcagggaggcccccaagtgtgggcccagtactgtcagctccatcacactgctccacatacccagagcccatttatcccactctccctcaagccaatcatgacttttatagcaccagctctaactaccagactgtgtttagggcacagccccactccacatcaggactctatcctcatcacaccgagcatggtcgatgcatggcttggactgaacagcagctttcaagagacttcttcagtggcagctgtgcggggtctccatataactcccggccaccgtctagctatggcccatccctgcaagcccaggattcacacaatatgcagtttttaaatacaggaagcttcaatttcttgagcaacacaggagctgccagctgccaaggagcaacactgcctcctaattcaccaaatggatactatggaagcaacataaactacccagagtctcacaggctcggatcaatggtgaatcagcacgtttctgtcatcagcagcattcgttcactgcccccctacagtgacatccacgatccacttaacattttagatgacagtggtagaaaacagaccagctcgttttacacagacacatcatctccagttgcatgtcgaactccagtcctagcttccagtttgcaaaccccaattccttcttcctcatcccaatgtatgtatggaacttccaaccagtatccagctcaagaaaccctggactcccatggaacaagcagtagagaaatggtgtcctctttaccacctatcaacactgtgttcatgggaacagcagctggaggcacttaaaccaccaatgtgggagggggtgctaaaactttaaaaaaaatctctactgtgcaaatatcattattcactcagacttccataagagtaaataaaaatgaatatgcagtggctgacattgttttaaagtcactggtactatggacaactccatagtgaatggagatacttgcagagcttgtcatgcacactaagagtttaaaatgtgagctcattattaatcatagtttcaaaattatcaaataaaaccagtgaagatctgaagatgcaaacatttcaactatgaagatttacatttcactttctaatttattaaacatctgtgtgcctttttatctttggtttcttttaaaaagtatatttaatgcctttacaatacctttaatttattaggatctcagaatcattgtttactatcccttatttgacaaaaagtcaaatgtgtatgttctacctccaacggaaatgtttacaaggtcaagacttaattcaattcagacaagaccaaagttgcttgacttcaattcctgtgcattagtgtgatgatttctgtcacatagcagcattccgattctatgtaactgaatggagatgataagtgctttcccctctttatttaaaaaagattaaaaggaataaaagaaataatgtatggaaata

SEQ ID NO: 25884 - DNA, 4122 bp, Homo sapiens
  source 1..4122: mol_type = unassigned DNA
atggcagaggaacaacaacagccgccaccacagcagcctgatgcccatcagcagcttccccccagcgcccccaactcgggggtggccctgccagcccttgtgcccgggctgccagggacagaggccagcgcgctgcaacacaagatcaagaactccatctgcaaaactgtacaatctaaagtggactgcattttgcaagaagttgagaagtttacagacctagagaaactctacctctaccttcagctgccttctggtctcagcaatggagagaaaagtgatcagaatgccatgtcatctagtcgggcacaacaaatgcatgccttttcctggattcggaataccctagaggaacatccggagacttcactgcccaaacaggaagtctatgatgagtacaagagctattgtgacaatcttggttaccatccattaagtgctgctgattttggaaagatcatgaaaaacgtctttccaaacatgaaggcacgtcgtttgggcacaagaggcaaatctaaatattgctacagtggactaagaaaaaaagcttttgttcatatgccaacactgcccaaccttgactttcacaaaactggagatgggttggaaggagctgaaccttctgggcagcttcaaaatattgatgaagaagttatctcttctgcttgccgtcttgtgtgtgagtgggcccagaaagtgttaagccaaccatttgacaccgtcttggaattagcccgcttccttgtaaaaagtcactatataggcaccaagtcaatggcagctctaactgtaatggcagcagcaccagcaggaatgaaaggaattacccagccttctgcttttatacctacagctgaaagtaattcctttcagcctcaggtgaagactttgccatctccaattgatgctaaacagcagttgcaacggaaaatccagaagaagcagcaagaacagaaactacaatcccctttgccaggagaatctgcagcaaaaaagtcagaaagtgctacaagcaatggagtgactaatcttcctaatggaaatccttcaatcctttctcctcaacctattggtatcgttgtggcagctgtccctagtcccattccggtccagcggactaggcaattggtaacttcaccgagtccaatgagttcttctgacggcaaagttcttcccctcaatgtacaggtggtcactcagcacatgcagtctgtgaaacaggcaccaaagactccccagaacgttccagccagtcctggtggggatcgttctgcccggcaccgttaccctcagatcttacccaaaccagcgaacaccagtgcactcaccattcgctctccaactactgtcctctttactagtagtcccatcaaaactgctgttgtacccgcttcacacatgagttctctaaatgtggtgaaaatgacaacaatatccctcacacccagcaacagtaacacccctcttaaacattctgcctcagtcagcagtgctacaggaacaacagaagaatcaaggagtgttccacagatcaagaatggttctgtcgtgtcgcttcagtctcctgggtccaggagcagcagtgcggggggaacatctgctgtggaagtcaaagtggaacccgaaacatcatcagatgagcatcctgtacagtgccaagagaactctgatgaggctaaagctccccagacacctagtgcccttttggggcagaaaagtaatacagacggagcactgcagaaaccttcaaatgaaggtgtcattgaaataaaagcaactaaggtctgtgaccagaggaccaaatgtaaaagtcgctgtaatgaaatgctgccaggcacgtcaacaggcaataatcaaagcactatcactctatcagttgcttctcagaacttaactttcaccagcagcagctcaccacctaatggtgactcaatcaataaagaccctaaattatgcactaaaagcccaagaaaacgactgtcttctacattgcaggagacccaggtgcctcctgtaaagaaaccaattgtggaacagctttcagcagctaccatagaagggcagaaacaaggcagtgttaagaaggaccaaaaggttccacattcagggaaaacagaaggttcaacagcaggtgctcagattcctagcaaggtatcagtaaatgtcagttcacacataggagcaaatcaacccttgaattcctctgcccttgttatcagtgattcagctttggaacagcaaacaaccccatcatcatctccagatataaaagtaaaacttgaaggaagtgtctttctcttggacagtgattcaaagtcagttggcagctttaatccaaatggatggcaacaaatcactaaagattctgagtttatatctgccagttgtgaacaacagcaagatatcagtgttatgacaattcctgagcactctgatatcaatgacttagagaaatctgtttgggaattagaaggaatgccacaggacacatatagccagcagctacatagccagatacaggaatcttctttaaatcaaatacaagcacattcttcagatcagttacctctgcaatctgaactgaaggagtttgagccttctgtttcccagacaaatgaaagctactttccttttgatgatgaacttacacaagatagtattgtggaagagctggtgcttatggagcagcaaatgtcaatgaacaattctcattcttacggcaactgtttgggaatgacccttcagagtcagtcagtaactccaggagctccaatgtcatctcacacttccagcacccacttctatcatccaatccacagcaatggcactccaatccacacacccacacccacacccacacccactcctactccaaccccaaccccaaccccgacatctgaaatgattgctggatctcagagtctgtcacgggagagcccttgctccaggctagcccagactacacctgtggatagtgctttaggaagtagccgacatacacccattggtactccacattctaactgcagcagtagtgtcccccccagccctgttgaatgcaggaatccgtttgcattcactccaataagctccagtatggcatatcatgacgccagcattgtctcaagtagtcctgtgaaaccgatgcaaagacccatggccacacaccctgacaaaaccaagcttgaatggatgaataatgggtatagtggggttggtaattcatcagtttctggccatggtattctcccaagctatcaggaactagtggaagaccgtttcaggaaacctcatgcttttgctgtgcctggacagtcttatcagtctcaatccagacatcatgacactaattttggtcgtttgactcctgtctctcctgtgcagcatcaaggtgccactgtaaataacaccaacaaacaggagggttttgcagtccctgcccctcttgataataaaggaactaattcatctgccagcagcaacttcagatgccggagtgtgagccctgctgttcatcgccaacgtaatcttagtggaagcaccctctatccagtatctaatatcccacgatctaatgtgaccccctttggaagtccagttaccccagaagttcatgttttcacaaatgttcacacagacgcatgtgccaacaacatagctcaaagaagccaatcagttccattgacagtcatgatgcagacagccttcccaaacgctcttcagaagcaagcaaacagtaaaaaaataaccaatgttttgttgagtaaacttgattccgacaatgatgatgcagtgagaggtttgggaatgaacaacctgccctctaattatacagcccggatgaatctcactcagattttggaaccttccactgtttttcctagtgccaacccacaaaatatgatcgattccagcacttctgtttatgagttccaaacaccatcttacctcaccaaaagtaatagcaccggtcagatcaatttttctcctggagataatcaagcacaatcagaaattggagagcaacaattagatttcaatagcactgttaaagacctgttgagtggagacagcttgcaaaccaaccagcagctgaaataccctgatgtattaggagaatga

SEQ ID NO: 25885 - DNA, 4137 bp, Homo sapiens
  source 1..4137: mol_type = unassigned DNA
atggcagaggaacaacaacagccgccaccacagcagcctgatgcccatcagcagcttccccccagcgcccccaactcgggggtggccctgccagcccttgtgcccgggctgccagggacagaggccagcgcgctgcaacacaagatcaagaactccatctgcaaaactgtacaatctaaagtggactgcattttgcaagaagttgagaagtttacagacctagagaaactctacctctaccttcagctgccttctggtctcagcaatggagagaaaagtgatcagaatgccatgtcatctagtcgggcacaacaaatgcatgccttttcctggattcggaataccctagaggaacatccggagacttcactgcccaaacaggaagtctatgatgagtacaagagctattgtgacaatcttggttaccatccattaagtgctgctgattttggaaagatcatgaaaaacgtctttccaaacatgaaggcacgtcgtttgggcacaagaggcaaatctaaatattgctacagtggactaagaaaaaaagcttttgttcatatgccaacactgcccaaccttgactttcacaaaactggagatgggttggaaggagctgaaccttctgggcagcttcaaaatattgatgaagaagttatctcttctgcttgccgtcttgtgtgtgagtgggcccagaaagtgttaagccaaccatttgacaccgtcttggaattagcccgcttccttgtaaaaagtcactatataggcaccaagtcaatggcagctctaactgtaatggcagcagcaccagcaggaatgaaaggaattacccagccttctgcttttatacctacagctgaaagtaattcctttcagcctcaggtgaagactttgccatctccaattgatgctaaacagcagttgcaacggaaaatccagaagaagcagcaagaacagaaactacaatcccctttgccaggagaatctgcagcaaaaaagtcagaaagtgctacaagcaatggagtgactaatcttcctaatggaaatccttcaatcctttctcctcaacctattggtatcgttgtggcagctgtccctagtcccattccggtccagcggactaggcaattggtaacttcaccgagtccaatgagttcttctgacggcaaagttcttcccctcaatgtacaggtggtcactcagcacatgcagtctgtgaaacaggcaccaaagactccccagaacgttccagccagtcctggtggggatcgttctgcccggcaccgttaccctcagatcttacccaaaccagcgaacaccagtgcactcaccattcgctctccaactactgtcctctttactagtagtcccatcaaaactgctgttgtacccgcttcacacatgagttctctaaatgtggtgaaaatgacaacaatatccctcacacccagcaacagtaacacccctcttaaacattctgcctcagtcagcagtgctacaggaacaacagaagaatcaaggagtgttccacagatcaagaatggttctgtcgtgtcgcttcagtctcctgggtccaggagcagcagtgcggggggaacatctgctgtggaagtcaaagtggaacccgaaacatcatcagatgagcatcctgtacagtgccaagagaactctgatgaggctaaagctccccagacacctagtgcccttttggggcagaaaagtaatacagacggagcactgcagaaaccttcaaatgaaggtgtcattgaaataaaagcaactaaggtctgtgaccagaggaccaaatgtaaaagtcgctgtaatgaaatgctgccaggcacgtcaacaggcaataatcaaagcactatcactctatcagttgcttctcagaacttaactttcaccagcagcagctcaccacctaatggtgactcaatcaataaagaccctaaattatgcactaaaagcccaagaaaacgactgtcttctacattgcaggagacccaggtgcctcctgtaaagaaaccaattgtggaacagctttcagcagctaccatagaagggcagaaacaaggcagtgttaagaaggaccaaaaggttccacattcagggaaaacagaaggttcaacagcaggtgctcagattcctagcaaggtatcagtaaatgtcagttcacacataggagcaaatcaacccttgaattcctctgcccttgttatcagtgattcagctttggaacagcaaacaaccccatcatcatctccagatataaaagtaaaacttgaaggaagtgtctttctcttggacagtgattcaaagtcagttggcagctttaatccaaatggatggcaacaaatcactaaagattctgagtttatatctgccagttgtgaacaacagcaagatatcagtgttatgacaattcctgagcactctgatatcaatgacttagagaaatctgtttgggaattagaaggaatgccacaggacacatatagccagcagctacatagccagatacaggaatcttctttaaatcaaatacaagcacattcttcagatcagttacctctgcaatctgaactgaaggagtttgagccttctgtttcccagacaaatgaaagctactttccttttgatgatgaacttacacaagatagtattgtggaagagctggtgcttatggagcagcaaatgtcaatgaacaattctcattcttacggcaactgtttgggaatgacccttcagagtcagtcagtaactccaggagctccaatgtcatctcacacttccagcacccacttctatcatccaatccacagcaatggcactccaatccacacacccacacccacacccacacccactcctactccaaccccaaccccaaccccgacatctgaaatgattgctggatctcagagtctgtcacgggagagcccttgctccaggctagcccagactacacctgtggatagtgctttaggaagtagccgacatacacccattggtactccacattctaactgcagcagtagtgtcccccccagccctgttgaatgcaggaatccgtttgcattcactccaataagctccagtatggcatatcatgacgccagcattgtctcaagtagtcctgtgaaaccgatgcaaagacccatggccacacaccctgacaaaaccaagcttgaatggatgaataatgggtatagtggggttggtaattcatcagtttctggccatggtattctcccaagctatcaggaactagtggaagaccgtttcaggaaacctcatgcttttgctgtgcctggacagtcttatcagtctcaatccagacatcatgacactaattttggtcgtttgactcctgtctctcctgtgcagcatcaaggtgccactgtaaataacaccaacaaacaggagggttttgcagtccctgcccctcttgataataaaggaactaattcatctgccagcagcaacttcagatgccggagtgtgagccctgctgttcatcgccaacgtaatcttagtggaagcaccctctatccagtatctaatatcccacgatctaatgtgaccccctttggaagtccagttaccccagaagttcatgttttcacaaatgttcacacagacgcatgtgccaacaacatagctcaaagaagccaatcagttccattgacagtcatgatgcagacagccttcccaaacgctcttcagaagcaagcaaacagtaaaaaaataaccaatgttttgttgagtaaacttgattccgacaatgatgatgcagtgagaggtttgggaatgaacaacctgccctctaattatacagcccggatgaatctcactcagattttggaaccttccactgtttttcctagtgccaacccacaaaatatgatcgattccagcacttctgtttatgagttccaaacaccatcttacctcaccaaaagtaatagcaccggtcagatcaatttttctcctggagataatcaagcacaatcagaaattggagagcaacaattagatttcaatagcactgttaaagacctgttgagtggagacagcttgcaaaccaaccagcagctgtgttcttgtccttcctctctgctggctggaatgcaaatgtga

SEQ ID NO: 25886 - DNA, 7194 bp, Homo sapiens
  source 1..7194: mol_type = unassigned DNA
atggcagaggaacaacaacagccgccaccacagcagcctgatgcccatcagcagcttccccccagcgcccccaactcgggggtggccctgccagcccttgtgcccgggctgccagggacagaggccagcgcgctgcaacacaagatcaagaactccatctgcaaaactgtacaatctaaagtggactgcattttgcaagaagttgagaagtttacagacctagagaaactctacctctaccttcagctgccttctggtctcagcaatggagagaaaagtgatcagaatgccatgtcatctagtcgggcacaacaaatgcatgccttttcctggattcggaataccctagaggaacatccggagacttcactgcccaaacaggaagtctatgatgagtacaagagctattgtgacaatcttggttaccatccattaagtgctgctgattttggaaagatcatgaaaaacgtctttccaaacatgaaggcacgtcgtttgggcacaagaggcaaatctaaatattgctacagtggactaagaaaaaaagcttttgttcatatgccaacactgcccaaccttgactttcacaaaactggagatgggttggaaggagctgaaccttctgggcagcttcaaaatattgatgaagaagttatctcttctgcttgccgtcttgtgtgtgagtgggcccagaaagtgttaagccaaccatttgacaccgtcttggaattagcccgcttccttgtaaaaagtcactatataggcaccaagtcaatggcagctctaactgtaatggcagcagcaccagcaggaatgaaaggaattacccagccttctgcttttatacctacagctgaaagtaattcctttcagcctcaggtgaagactttgccatctccaattgatgctaaacagcagttgcaacggaaaatccagaagaagcagcaagaacagaaactacaatcccctttgccaggagaatctgcagcaaaaaagtcagaaagtgctacaagcaatggagtgactaatcttcctaatggaaatccttcaatcctttctcctcaacctattggtatcgttgtggcagctgtccctagtcccattccggtccagcggactaggcaattggtaacttcaccgagtccaatgagttcttctgacggcaaagttcttcccctcaatgtacaggtggtcactcagcacatgcagtctgtgaaacaggcaccaaagactccccagaacgttccagccagtcctggtggggatcgttctgcccggcaccgttaccctcagatcttacccaaaccagcgaacaccagtgcactcaccattcgctctccaactactgtcctctttactagtagtcccatcaaaactgctgttgtacccgcttcacacatgagttctctaaatgtggtgaaaatgacaacaatatccctcacacccagcaacagtaacacccctcttaaacattctgcctcagtcagcagtgctacaggaacaacagaagaatcaaggagtgttccacagatcaagaatggttctgtcgtgtcgcttcagtctcctgggtccaggagcagcagtgcggggggaacatctgctgtggaagtcaaagtggaacccgaaacatcatcagatgagcatcctgtacagtgccaagagaactctgatgaggctaaagctccccagacacctagtgcccttttggggcagaaaagtaatacagacggagcactgcagaaaccttcaaatgaaggtgtcattgaaataaaagcaactaaggtctgtgaccagaggaccaaatgtaaaagtcgctgtaatgaaatgctgccaggcacgtcaacaggcaataatcaaagcactatcactctatcagttgcttctcagaacttaactttcaccagcagcagctcaccacctaatggtgactcaatcaataaagaccctaaattatgcactaaaagcccaagaaaacgactgtcttctacattgcaggagacccaggtgcctcctgtaaagaaaccaattgtggaacagctttcagcagctaccatagaagggcagaaacaaggcagtgttaagaaggaccaaaaggttccacattcagggaaaacagaaggttcaacagcaggtgctcagattcctagcaaggtatcagtaaatgtcagttcacacataggagcaaatcaacccttgaattcctctgcccttgttatcagtgattcagctttggaacagcaaacaaccccatcatcatctccagatataaaagtaaaacttgaaggaagtgtctttctcttggacagtgattcaaagtcagttggcagctttaatccaaatggatggcaacaaatcactaaagattctgagtttatatctgccagttgtgaacaacagcaagatatcagtgttatgacaattcctgagcactctgatatcaatgacttagagaaatctgtttgggaattagaaggaatgccacaggacacatatagccagcagctacatagccagatacaggaatcttctttaaatcaaatacaagcacattcttcagatcagttacctctgcaatctgaactgaaggagtttgagccttctgtttcccagacaaatgaaagctactttccttttgatgatgaacttacacaagatagtattgtggaagagctggtgcttatggagcagcaaatgtcaatgaacaattctcattcttacggcaactgtttgggaatgacccttcagagtcagtcagtaactccaggagctccaatgtcatctcacacttccagcacccacttctatcatccaatccacagcaatggcactccaatccacacacccacacccacacccacacccactcctactccaaccccaaccccaaccccgacatctgaaatgattgctggatctcagagtctgtcacgggagagcccttgctccaggctagcccagactacacctgtggatagtgctttaggaagtagccgacatacacccattggtactccacattctaactgcagcagtagtgtcccccccagccctgttgaatgcaggaatccgtttgcattcactccaataagctccagtatggcatatcatgacgccagcattgtctcaagtagtcctgtgaaaccgatgcaaagacccatggccacacaccctgacaaaaccaagcttgaatggatgaataatgggtatagtggggttggtaattcatcagtttctggccatggtattctcccaagctatcaggaactagtggaagaccgtttcaggaaacctcatgcttttgctgtgcctggacagtcttatcagtctcaatccagacatcatgacactaattttggtcgtttgactcctgtctctcctgtgcagcatcaaggtgccactgtaaataacaccaacaaacaggagggttttgcagtccctgcccctcttgataataaaggaactaattcatctgccagcagcaacttcagatgccggagtgtgagccctgctgttcatcgccaacgtaatcttagtggaagcaccctctatccagtatctaatatcccacgatctaatgtgaccccctttggaagtccagttaccccagaagttcatgttttcacaaatgttcacacagacgcatgtgccaacaacatagctcaaagaagccaatcagttccattgacagtcatgatgcagacagccttcccaaacgctcttcagaagcaagcaaacagtaaaaaaataaccaatgttttgttgagtaaacttgattccgacaatgatgatgcagtgagaggtttgggaatgaacaacctgccctctaattatacagcccggatgaatctcactcagattttggaaccttccactgtttttcctagtgccaacccacaaaatatgatcgattccagcacttctgtttatgagttccaaacaccatcttacctcaccaaaagtaatagcaccggtcagatcaatttttctcctggagataatcaagcacaatcagaaattggagagcaacaattagatttcaatagcactgttaaagacctgttgagtggagacagcttgcaaaccaaccagcagctggtaggtcagggagcatctgatctcactaatactgcatctgatttctctagcgatatcaggttgtcttctgagctctcaggcagcatcaatgatttgaacactttagacccaaatctactgtttgatccaggtcgtcagcagggacaagatgatgaagctacactggaagaattaaagaatgacccattatttcaacaaatttgcagtgaatccatgaattctatgacttcatcaggttttgaatggatagaaagcaaggaccatcctactgttgaaatgttgggttaaattgtgttttataacatgtagcacactgtatctaaagacatatgtattgtatttgtcttaatggaagtgcctcccgcagcagaaatactattaattgtgacattttaaaagcgtttgctgcagaagtggtttcttcagtaggaaatggttagacttgcctcagttcttaacaagtgtctaaagacagtaggctgtagaagaacaagtattaggttttaaattttataatgtgccccatttattcacattgattgactatccagctgttacaagagcagtcgatctttattttgtgtaagttagtttcatttcatcagatgatctgcacagaactcagaataaaccatcaattttaggtataggctgttttgttgttggcattatcttttagatataaaatcatagctagggtgaactgtagacaagaaagtcttccttgaaacagggataatattcaggttattataaatatttaggcttgaagcatagagctactgtagggtgaaaaatctctgtaggactttctggggcttcagtaccatttacacccacgatgaagggcttaaatagaaaataatggaaaattaaatattactttaaggaaagcaaagctgcactaaaatttttaagggaaaaaaaacaagtagccatttatatttgtgaccttgcattaatatttaaatgttgattttaatatggagctagcacacatagatgcgcaggcacgcacacacaaaacaagcaaatgtaactccaggcatttgtaatttaatataataaatacaagcatgttagaaaaatgctttatgtcttattatttgttaagttaggggaatgagaaggaaaacaaaagcattctcttagtttcatcacaatggctgcatgtacatattgagattctaactgagatttactttgaaatttttcattaaaatattccacaataatcagtttttttcctcttcaattgagtgactgactccctcactcctcctgaatatagtaatgtagtttgatcataggatccctttgaaaaacaggaaggaggataacataaaaaacaacaaaaaacatttcaccacctaaggtctgaagccacaaatctttatatctctgatgaaacaaaggggatatcaatagtacttgaagaagaagagcattttattacttgcttaatttatttattgtgataaccacaattgcaaaagaagaactcaggatttgttttaaaatgtttctctctatggctcccattttgttttgtgaataattatttatgagttgcatgttgacacaaacctactcactggttgaaagctccatttaagtgagtttcaagatcactttcaaagagatttttaaattgccattgtttttaaagctaacataaaaccatttgctatgctaccttgaacctagctaagctttcctttaccttagtaagccaatcagaagactacaatcaatgaatatttagcaaatgtgctgaagggtttaataaggttttgttgttcaataaatttgcaaggtagggtattaacatattttgataaataaatggtgctagagttggcgcagaggtttatatattgatatgtcttagttattggcatttgtgtgtgtttgctgttatcttgatttcatgatttgttaggtatttttttcttgatgctagttatttcttcactgtacattgagacacagcactactgcacaccaaagtatgcaatacccaaaggaaactgtgtgatttctcctgacaaatgatgggagcctttctttatgagatactctgaaaaggagattttgaggccattctaatcccttgtttacattattagcttcctactaatataaaaataatggaaatcttttttgataaaaatattaagactggaggatttttaaccccttgtacagtattgcagcaaactctttaaatttggttgaattcgtccagcaaactttctggggttcatatattgcactaaatttgttgaacctgtggtaggcacatctcttaggataaatgcaaccaatacagtccacagattaaactttttaaatgtgtttcattatgaaaagacaaaatgtcatcaaagtgacagataaaattgtcttatgtagcaatgtgcattgatctcaatgagatatttctattattctcttacatgagaatattacagcaggaagaattaagtttagtttgcttcaccatgttaatacatgatcacaaaatgtgcatgagtgttattgacttatcttgtacagtactaggattcctgtaaccactcttttttttcttcgctgtattgaaactggttcagtgttaaccaggcaagcatagttattcacaggttatttactttatgtttactaattctgcttagttattgttgaatatgttctgttccagattatttttattgttttgatgtttaaaacattttgcatactgtttatcataaaacttcatgaagtaaataattttgcatataattgcaataagcactgacttttgaactgaaaagaaggaaagtgtttttttgtgcagtgcttctgaggttcatataatagtcttgtactataatgtgctttactacacgataaatgacaaaaacaagccctgtttcatgtttcatttagtgcaaaaagtcagatttccccagtgttttgttgtctgttgtacctgctgaaactacagtagttgaatattgcggtagcatttcagttctctttttttattaaagtgctcaaaaattgttttttaaatgttttcaaaaacaattaaaaacattttatattaaactg

SEQ ID NO: 25887 - DNA, 7036 bp, Homo sapiens
  source 1..7036: mol_type = unassigned DNA
ttcttttagcaaaactgtacaatctaaagtggactgcattttgcaagaagttgagaagtttacagacctagagaaactctacctctaccttcagctgccttctggtctcagcaatggagagaaaagtgatcagaatgccatgtcatctagtcgggcacaacaaatgcatgccttttcctggattcggaataccctagaggaacatccggagacttcactgcccaaacaggaagtctatgatgagtacaagagctattgtgacaatcttggttaccatccattaagtgctgctgattttggaaagatcatgaaaaacgtctttccaaacatgaaggcacgtcgtttgggcacaagaggcaaatctaaatattgctacagtggactaagaaaaaaagcttttgttcatatgccaacactgcccaaccttgactttcacaaaactggagatgggttggaaggagctgaaccttctgggcagcttcaaaatattgatgaagaagttatctcttctgcttgccgtcttgtgtgtgagtgggcccagaaagtgttaagccaaccatttgacaccgtcttggaattagcccgcttccttgtaaaaagtcactatataggcaccaagtcaatggcagctctaactgtaatggcagcagcaccagcaggaatgaaaggaattacccagccttctgcttttatacctacagctgaaagtaattcctttcagcctcaggtgaagactttgccatctccaattgatgctaaacagcagttgcaacggaaaatccagaagaagcagcaagaacagaaactacaatcccctttgccaggagaatctgcagcaaaaaagtcagaaagtgctacaagcaatggagtgactaatcttcctaatggaaatccttcaatcctttctcctcaacctattggtatcgttgtggcagctgtccctagtcccattccggtccagcggactaggcaattggtaacttcaccgagtccaatgagttcttctgacggcaaagttcttcccctcaatgtacaggtggtcactcagcacatgcagtctgtgaaacaggcaccaaagactccccagaacgttccagccagtcctggtggggatcgttctgcccggcaccgttaccctcagatcttacccaaaccagcgaacaccagtgcactcaccattcgctctccaactactgtcctctttactagtagtcccatcaaaactgctgttgtacccgcttcacacatgagttctctaaatgtggtgaaaatgacaacaatatccctcacacccagcaacagtaacacccctcttaaacattctgcctcagtcagcagtgctacaggaacaacagaagaatcaaggagtgttccacagatcaagaatggttctgtcgtgtcgcttcagtctcctgggtccaggagcagcagtgcggggggaacatctgctgtggaagtcaaagtggaacccgaaacatcatcagatgagcatcctgtacagtgccaagagaactctgatgaggctaaagctccccagacacctagtgcccttttggggcagaaaagtaatacagacggagcactgcagaaaccttcaaatgaaggtgtcattgaaataaaagcaactaaggtctgtgaccagaggaccaaatgtaaaagtcgctgtaatgaaatgctgccaggcacgtcaacaggcaataatcaaagcactatcactctatcagttgcttctcagaacttaactttcaccagcagcagctcaccacctaatggtgactcaatcaataaagaccctaaattatgcactaaaagcccaagaaaacgactgtcttctacattgcaggagacccaggtgcctcctgtaaagaaaccaattgtggaacagctttcagcagctaccatagaagggcagaaacaaggcagtgttaagaaggaccaaaaggttccacattcagggaaaacagaaggttcaacagcaggtgctcagattcctagcaaggtatcagtaaatgtcagttcacacataggagcaaatcaacccttgaattcctctgcccttgttatcagtgattcagctttggaacagcaaacaaccccatcatcatctccagatataaaagtaaaacttgaaggaagtgtctttctcttggacagtgattcaaagtcagttggcagctttaatccaaatggatggcaacaaatcactaaagattctgagtttatatctgccagttgtgaacaacagcaagatatcagtgttatgacaattcctgagcactctgatatcaatgacttagagaaatctgtttgggaattagaaggaatgccacaggacacatatagccagcagctacatagccagatacaggaatcttctttaaatcaaatacaagcacattcttcagatcagttacctctgcaatctgaactgaaggagtttgagccttctgtttcccagacaaatgaaagctactttccttttgatgatgaacttacacaagatagtattgtggaagagctggtgcttatggagcagcaaatgtcaatgaacaattctcattcttacggcaactgtttgggaatgacccttcagagtcagtcagtaactccaggagctccaatgtcatctcacacttccagcacccacttctatcatccaatccacagcaatggcactccaatccacacacccacacccacacccacacccactcctactccaaccccaaccccaaccccgacatctgaaatgattgctggatctcagagtctgtcacgggagagcccttgctccaggctagcccagactacacctgtggatagtgctttaggaagtagccgacatacacccattggtactccacattctaactgcagcagtagtgtcccccccagccctgttgaatgcaggaatccgtttgcattcactccaataagctccagtatggcatatcatgacgccagcattgtctcaagtagtcctgtgaaaccgatgcaaagacccatggccacacaccctgacaaaaccaagcttgaatggatgaataatgggtatagtggggttggtaattcatcagtttctggccatggtattctcccaagctatcaggaactagtggaagaccgtttcaggaaacctcatgcttttgctgtgcctggacagtcttatcagtctcaatccagacatcatgacactaattttggtcgtttgactcctgtctctcctgtgcagcatcaaggtgccactgtaaataacaccaacaaacaggagggttttgcagtccctgcccctcttgataataaaggaactaattcatctgccagcagcaacttcagatgccggagtgtgagccctgctgttcatcgccaacgtaatcttagtggaagcaccctctatccagtatctaatatcccacgatctaatgtgaccccctttggaagtccagttaccccagaagttcatgttttcacaaatgttcacacagacgcatgtgccaacaacatagctcaaagaagccaatcagttccattgacagtcatgatgcagacagccttcccaaacgctcttcagaagcaagcaaacagtaaaaaaataaccaatgttttgttgagtaaacttgattccgacaatgatgatgcagtgagaggtttgggaatgaacaacctgccctctaattatacagcccggatgaatctcactcagattttggaaccttccactgtttttcctagtgccaacccacaaaatatgatcgattccagcacttctgtttatgagttccaaacaccatcttacctcaccaaaagtaatagcaccggtcagatcaatttttctcctggagataatcaagcacaatcagaaattggagagcaacaattagatttcaatagcactgttaaagacctgttgagtggagacagcttgcaaaccaaccagcagctggtaggtcagggagcatctgatctcactaatactgcatctgatttctctagcgatatcaggttgtcttctgagctctcaggcagcatcaatgatttgaacactttagacccaaatctactgtttgatccaggtcgtcagcagggacaagatgatgaagctacactggaagaattaaagaatgacccattatttcaacaaatttgcagtgaatccatgaattctatgacttcatcaggttttgaatggatagaaagcaaggaccatcctactgttgaaatgttgggttaaattgtgttttataacatgtagcacactgtatctaaagacatatgtattgtatttgtcttaatggaagtgcctcccgcagcagaaatactattaattgtgacattttaaaagcgtttgctgcagaagtggtttcttcagtaggaaatggttagacttgcctcagttcttaacaagtgtctaaagacagtaggctgtagaagaacaagtattaggttttaaattttataatgtgccccatttattcacattgattgactatccagctgttacaagagcagtcgatctttattttgtgtaagttagtttcatttcatcagatgatctgcacagaactcagaataaaccatcaattttaggtataggctgttttgttgttggcattatcttttagatataaaatcatagctagggtgaactgtagacaagaaagtcttccttgaaacagggataatattcaggttattataaatatttaggcttgaagcatagagctactgtagggtgaaaaatctctgtaggactttctggggcttcagtaccatttacacccacgatgaagggcttaaatagaaaataatggaaaattaaatattactttaaggaaagcaaagctgcactaaaatttttaagggaaaaaaaacaagtagccatttatatttgtgaccttgcattaatatttaaatgttgattttaatatggagctagcacacatagatgcgcaggcacgcacacacaaaacaagcaaatgtaactccaggcatttgtaatttaatataataaatacaagcatgttagaaaaatgctttatgtcttattatttgttaagttaggggaatgagaaggaaaacaaaagcattctcttagtttcatcacaatggctgcatgtacatattgagattctaactgagatttactttgaaatttttcattaaaatattccacaataatcagtttttttcctcttcaattgagtgactgactccctcactcctcctgaatatagtaatgtagtttgatcataggatccctttgaaaaacaggaaggaggataacataaaaaacaacaaaaaacatttcaccacctaaggtctgaagccacaaatctttatatctctgatgaaacaaaggggatatcaatagtacttgaagaagaagagcattttattacttgcttaatttatttattgtgataaccacaattgcaaaagaagaactcaggatttgttttaaaatgtttctctctatggctcccattttgttttgtgaataattatttatgagttgcatgttgacacaaacctactcactggttgaaagctccatttaagtgagtttcaagatcactttcaaagagatttttaaattgccattgtttttaaagctaacataaaaccatttgctatgctaccttgaacctagctaagctttcctttaccttagtaagccaatcagaagactacaatcaatgaatatttagcaaatgtgctgaagggtttaataaggttttgttgttcaataaatttgcaaggtagggtattaacatattttgataaataaatggtgctagagttggcgcagaggtttatatattgatatgtcttagttattggcatttgtgtgtgtttgctgttatcttgatttcatgatttgttaggtatttttttcttgatgctagttatttcttcactgtacattgagacacagcactactgcacaccaaagtatgcaatacccaaaggaaactgtgtgatttctcctgacaaatgatgggagcctttctttatgagatactctgaaaaggagattttgaggccattctaatcccttgtttacattattagcttcctactaatataaaaataatggaaatcttttttgataaaaatattaagactggaggatttttaaccccttgtacagtattgcagcaaactctttaaatttggttgaattcgtccagcaaactttctggggttcatatattgcactaaatttgttgaacctgtggtaggcacatctcttaggataaatgcaaccaatacagtccacagattaaactttttaaatgtgtttcattatgaaaagacaaaatgtcatcaaagtgacagataaaattgtcttatgtagcaatgtgcattgatctcaatgagatatttctattattctcttacatgagaatattacagcaggaagaattaagtttagtttgcttcaccatgttaatacatgatcacaaaatgtgcatgagtgttattgacttatcttgtacagtactaggattcctgtaaccactcttttttttcttcgctgtattgaaactggttcagtgttaaccaggcaagcatagttattcacaggttatttactttatgtttactaattctgcttagttattgttgaatatgttctgttccagattatttttattgttttgatgtttaaaacattttgcatactgtttatcataaaacttcatgaagtaaataattttgcatataattgcaataagcactgacttttgaactgaaaagaaggaaagtgtttttttgtgcagtgcttctgaggttcatataatagtcttgtactataatgtgctttactacacgataaatgacaaaaacaagccctgtttcatgtttcatttagtgcaaaaagtcagatttccccagtgttttgttgtctgttgtacctgctgaaactacagtagttgaatattgcggtagcatttcagttctctttttttattaaagtgctcaaaaattgttttttaaatgttttcaaaaacaattaaaaacattttatatt

SEQ ID NO: 25888 - DNA, 1389 bp, Homo sapiens
  source 1..1389: mol_type = unassigned DNA
tccccgctcctcagtctttgcggacaagaaaggggctgtgtgagacgcagggaaggaggcacacccgggggtggcgcagtgaggagggggcgcgacggccaggaggctggtggagcgacacccaggcaggagagggggaagaactctctccctttctgaacccccttttccttgagagacgagttgggggagtcctccacgcattacccactcgggccgcaaaaactcccttctttagccctctgcccccgcccttgcttataagcctttgagaccgcagaagggaccttgttgtggaacgggacggccaagaggaagccagatcgctgagggtccggtctccagtttgcctcctgctatatccattggaagagaaaagtttgtgacttgggcccccaagttttgagagaactgggctttcggcgcggggggacagaggaggctcgtggggagctttccccatggagcttacccagcctgcagaagacctcatccagacccagcagacccctgcctcagaacttggggaccctgaagaccccggagaggaggctgcagatggctcagacactgtggtcctcagtctctttccctgcacccctgagcctgtgaatcctgaaccggatgccagtgtttcctctccacaggcaggcagctccctgaagcactccaccactctcaccaaccggcagcgagggaacgaggtgtcagctctgccggccaccctagactccctgtccatccaccagctcgcagcacagggggagctggaccagctgaaggagcatttgcggaaaggtgacaacctcgtcaacaagccagacgagcgcggcttcacccccctcatctgggcctccgcctttggagagattgagaccgttcgcttcctgctggagtggggtgccgacccccacatcctggcaaaagagcgagagagcgccctgtcgctggccagcacaggcggctacacagacattgtggggctgctgctggagcgtgacgtggacatcaacatctatgattggaatggagggacgccactgctgtacgctgtgcgcgggaaccacgtgaaatgcgttgaggccttgctggcccgaggcgctgacctcaccaccgaagccgactctggctacaccccgatggaccttgccgtggccctgggataccggaaagtgcaacaggtgatcgagaaccacatcctcaagctcttccagagcaacctggtgcccgctgaccctgagtgaaggccgcctgccggggactcagacactcagggaacaaaatggtcagccagagctggggaaacccagaactgacttcaaaggcagcttctggacaggtggtgggaggggacccttcccaagaggaaccaataaaccttctgtgcag

SEQ ID NO: 25889 - DNA, 1369 bp, Homo sapiens
  source 1..1369: mol_type = unassigned DNA
ccggacgccgcacggctcctgttccggtgtcagagggcccgccctccccgctcctcagtctttgcggacaagaaaggggctgtgtgagacgcagggaaggaggcacacccgggggtggcgcagtgaggagggggcgcgacggccaggaggctggtggagcgacacccaggcaggagagggggaagaactctctccctttctgaacccccttttccttgagagacgagttgggggagtcctccacgcattacccactcgggccgcaaaaactcccttctttagccctctgcccccgcccttgcttataagcctttgagaccgcagaagggaccttgttgtggaacgggacggccaagaggaagccagatcgctgagggtccggtctccagtttgcctcctgctatatccattggaagagaaaagtttgtgacttgggcccccaagttttgagagaactgggctttcggcgcggggggacagaggaggctcgtggggagctttccccatggagcttacccagcctgcagaagacctcatccagacccagcagacccctgcctcagaacttggggaccctgaagaccccggagaggaggctgcagatggctcagacactgtggtcctcagtctctttccctgcacccctgagcctgtgaatcctgaaccggatgccagtgtttcctctccacagggcagctccctgaagcactccaccactctcaccaaccggcagcgagggaacgaggtgtcagctctgccggccaccctagactgtgacaacctcgtcaacaagccagacgagcgcggcttcacccccctcatctgggcctccgcctttggagagattgagaccgttcgcttcctgctggagtggggtgccgacccccacatcctggcaaaagagcgagagagcgccctgtcgctggccagcacaggcggctacacagacattgtggggctgctgctggagcgtgacgtggacatcaacatctatgattggaatggagggacgccactgctgtacgctgtgcgcgggaaccacgtgaaatgcgttgaggccttgctggcccgaggcgctgacctcaccaccgaagccgactctggctacaccccgatggaccttgccgtggccctgggataccggaaagtgcaacaggtgatcgagaaccacatcctcaagctcttccagagcaacctggtgcccgctgaccctgagtgaaggccgcctgccggggactcagacactcagggaacaaaatggtcagccagagctggggaaacccagaactgacttcaaaggcagcttctggacaggtggtgggaggggacccttcccaagaggaaccaataaaccttctgtgcagaatga

SEQ ID NO: 25890 - DNA, 796 bp, Homo sapiens
  source 1..796: mol_type = unassigned DNA
cagagggcccgccctccccgctcctcagtctttgcggacaagaaaggggctgtgtgagacgcagggaaggaggcacacccgggggtggcgcagtgaggagggggcgcgacggccaggaggctggtggagcgacacccaggcaggagagggggaagaactctctccctttctgaacccccttttccttgagagacgagttgggggagtcctccacgcattacccactcgggccgcaaaaactcccttctttagccctctgcccccgcccttgcttataagcctttgagaccgcagaagggaccttgttgtggaacgggacggccaaggtacgctgcccctttaagttccagacgccccgcgtacttcccctacttcttcttcttgagatagccccgcccatctacccgaagccggagccaattggctccctctggaaaaatctgtgggcagggtaaagaggaagccagatcgctgagggtccggtctccagtttgcctcctgctatatccattggaagagaaaagtttgtgacttgggcccccaagttttgagagaactgggctttcggcgcggggggacagaggaggctcgtggggagctttccccatggagcttacccagcctgcagaagacctcatccagacccagcagacccctgcctcagaacttggggaccctgaagaccccggagaggaggctgcagatggctcagacactgtggtcctcagtctctttccctgcacccctgagcctgtgaatcctgaaccggatgccagtgtttcctctccacaggcag

SEQ ID NO: 25891 - DNA, 1281 bp, Homo sapiens
  source 1..1281: mol_type = unassigned DNA
tccccgctcctcagtctttgcggacaagaaaggggctgtgtgagacgcagggaaggaggcacacccgggggtggcgcagtgaggagggggcgcgacggccaggaggctggtggagcgacacccaggcaggagagggggaagaactctctccctttctgaacccccttttccttgagagacgagttgggggagtcctccacgcattacccactcgggccgcaaaaactcccttctttagccctctgcccccgcccttgcttataagcctttgagaccgcagaagggaccttgttgtggaacgggacggccaagaggaagccagatcgctgagggtccggtctccagtttgcctcctgctatatccattggaagagaaaagtttgtgacttgggcccccaagttttgagagaactgggctttcggcgcggggggacagaggaggctcgtggggagctttccccatggagcttacccagcctgcagaagacctcatccagacccagcagacccctgcctcagaacttggggaccctgaagaccccggagaggaggctgcagatggctcagacactgtggtcctcagtctctttccctgcacccctgagcctgtgaatcctgaaccggatgccagtgtttcctctccacaggcaggcagctccctgaagcactccaccactctcaccaaccggcagcgagggaacgaggtgtcagctctgccggccaccctagactgtgacaacctcgtcaacaagccagacgagcgcggcttcacccccctcatctgggcctccgcctttggagagattgagaccgttcgcttcctgctggagtggggtgccgacccccacatcctggcaaaagagcgagagagcgccctgtcgctggccagcacaggcggctacacagacattgtggggctgctgctggagcgtgacgtggacatcaacatctatgattggaatggagggacgccactgctgtacgctgtgcgcgggaaccacgtgaaatgcgttgaggccttgctggcccgaggcgctgacctcaccaccgaagccgactctggctacaccccgatggaccttgccgtggccctgggataccggaaagtgcaacaggtgatcgagaaccacatcctcaagctcttccagagcaacctggtgcccgctgaccctgagtgaaggccgcctgccggggactcagacactcagggaacaaaatggtcagccagagctggggaaacccagaactgacttcaaaggcagcttctggacaggtggtggg

SEQ ID NO: 25892 - DNA, 2304 bp, Homo sapiens
  source 1..2304: mol_type = unassigned DNA
gcgcagtcggggcgccttcccggtataggcgccttttaccccagcgtgtcctgagtctttggttcgcgaagtgccgttaggccaagcaggtgctaaaagcccggggtcgtggaccccggccaggtcttagcagcatggaggcgcagggtgtagcggagggcgcggggccgggcgccgccagcggcgtgccccaccccgcggccctagccccggctgcggctcccaccttggcgccagcctcggtggcggccgcggcctctcaattcaccctgctagtgatgcaaccctgtgctgggcaggacgaggctgcggcccccgggggcagcgttggggcgggcaagcccgttaggtacctgtgcgaaggggccggggatggcgaagaggaggctggggaggacgaggcggacctgttagacacttcggaccctccggggggaggcgagagcgcggctagtttggaggatctagaggacgaggagactcactcggggggcgagggcagcagcgggggcgcccggaggcggggcagcggtgggggcagcatgagcaagacctgcacctacgaaggctgcagcgagaccacgagccaggtggccaagcagcgcaaaccgtggatgtgcaagaaacaccgcaacaagatgtacaaggacaagtataaaaagaagaagagcgaccaggccctgaactgcggtgggactgcctcgactggcagcgcgggaaacgtcaaactcgaggaaagtgcagataacatactctccattgttaaacaaagaacaggatcttttggggatcgtcctgcaagacctactcttttagaacaagtgttaaatcaaaaaagactgtcgttactaagaagtccagaagtagtgcaatttttacagaaacagcaacagctattaaatcagcaagttttggagcaaagacaacagcagtttccaggaacatcaatgtgagggaacttaccaagaacatctacatggttttttatcttattgtaatagatgagcatatttttttaccagacataaatggggtaataatctatgcctgtagaacataaacattttcctgtaaatgtatgtgtgcatttggggataagtaagtattgcactttgtgcatctaatctttcagattactgtgagtttgaagaagtcagcttatctttccaaataacatttaattataatgttttttaaaaaatatattcctcttcagtcattgttactgaaggtaatgaagcagttactttctgtggaagtcataaagttaatagatattaatcttgactcatctagctcagtggttctcatcaagggtcaatttgattgtcatagtgaccttgaaaaccactggcttttagtgagtggccaggaatgctaaatgttctgcagtgtcaggggtagtcccacatactaaagattgtctcacccgcagtgccaataacactcctaagaaatgttgatggctattttgtggtgctaacatgtagttggggcacctataattgggttctcttaataacctttctttgcagttaagactgaagctgtcaaagaggtaagcacattttatatagacgtaaggaaagtgattattgtttaatatctgtgaatttaggatgtgcatctcttttcagaggtgtgttagtaaaacctgacggattaactaagcacactgggatgtgtctcctacagttggcttctctctttgatgttacctgttagtgctgatctcttaaagcagacatttcttgtttgttgaatttgtgaacagtatagatctcagcccaccaatgccaagacaaaattatttttcttatacttattttttattaaacaaaatgaaaaagatccttttcaaaaaggtgatcctgaaaataaaactaacactccagtattttgtcattgtttttcgcaattgagctatctgaaaactgttattcctaagtaatgttcaaaaatgataagtaatctggatacctttttcttatactttctcctaggaaaactttaaaactttaaaaaggcaaacctaccaataggaataacaaattaaatgtcaagagagtatatccaatattaggatataaatgtatgtgtctcaagtttaactctacaaaaatttgttacttgttttttaaactctatatataaagttcgacttaatcatggctgttctaagaagtacttatggagagcaagaacgtttttgttcatttcttaatgtgtgtgtttttacttgcatatctgttcaaaacacttttaacaaaattaattcattaaagtccagttgttgacctttga

SEQ ID NO: 25893 - DNA, 1854 bp, Homo sapiens
  source 1..1854: mol_type = unassigned DNA
atgtcatcattaccaacttcagatgggtttaaccatcccgcccgttcttcaggacagagtcctgatgttggtaatcctatgagtcttgctcgctctgtctctgcttcagtctgccctatcaagcccagtgactcagatcgcattgaacctaaagctgtgaaggctttgaaggcttcagctgaattccagctaaactctgaaaagaaagaacatctttctttacaagatctttctgatcatgcttcctcagcagaccatgctccaacagaccagagtccagctatgcctatgcagaattcatccgaagaaataactgttgcaggtaatctggagaaatctgctgaaagaagcacccagggcctcaaatttcatctccatacaagacaggaagctagtttatctgtcacatctactaggatgcatgaaccacagatgtttctaggtgaaaaggattggcatccagaaaatcagaacctgagtcaagtgagtgaccctcagcagcacgaagaaccagggaatgaacagtatgaggttgcacaacaaaaagcttcacatgaccaagaatatctttgtaacataggggaccttgagcttcctgaagaaaggcaacagaatcaacacaaaattgttgatttggaagctacgatgaaaggaaatgggctcccacagaatgtggatcctccaagtgcgaagaaaagtattccatcttcagaatgcagtggctgctcaaattcagaaacatttatggaaatcgatacagctcaacagtccctagttactttgcttaattcaacaggcaggcagaatgccaatgtcaagaacattggtgcattggatctcactttagataatcccttgatggaagtagaaacatcaaaatgtaacccttcatctgaaattttgaatgattccatttccactcaggatttacagcccccagaaactaatgttgaaatacctggaacaaataaagaatatggccattactcctctccaagtctctgtggcagttgtcagccttctgtggagtcagcagaagaatcttgcccgtctataacggcagccttgaaagaacttcatgaacttttggttgttagcagtaaaccagcttcagaaaatacatctgaagaagtaatctgtcaatcagaaaccatagctgagggccaaaccagtattaaagacctttctgaaagatggacccaaaatgagcatcttacccagaatgaacagtgtccacaagtctcctttcatcaggccatatctgtatcagtggagacagaaaaattaacaggtacttcatctgacactggaagagaagctgtagaaaatgtaaacttcaggagtctaggtgatggcctgtcaaccgataaggaaggtgtccccaaatctagggaatccataaataagaaccgttctgtcactgtaacctcagctaaaacatccaatcagttacactgcaccttaggtgtagaaatttcacccaaacttttagcaggtgaggaggatgcactcaatcagacttctgagcaaactaagtctttgtcatccaatttcatattggttaaagacttaggtcagggcatacagaattcagtaacagacaggcctgaaaccagagaaaatgtctgtcctgatgcttcgaggccattacttgaatatgaaccacctaccagccatccatcatcaagtcctgccattcttccaccattgatttttcctgccacagatattgaccgcattctccgtgctggctttactttgcaggaagctcttggagctttgcatcgagttggtgggaatgcagaccttgcacttcttgttttgctcgcaaaaaacatcgtagttcctacatga

SEQ ID NO: 25894 - DNA, 983 bp, Homo sapiens
  source 1..983: mol_type = unassigned DNA
ggctcccccgcaggcggtagcgaaggcagcagcagcggtggcgacatgagcagcggggcggcgtccgggacagggcgggggcggccccggggcgggggacctgggcccggggaccccccgcccagcgagacacacaagctggtggtcgtgggcggcggcggcgtgggcaagagcgcgctgaccatccagttcatccagtcctacttcgtgtctgactacgaccccactattgaggactcctacacgaagatctgcagtgtggatggcatcccagcccggctggacatcctggacaccgcgggccaggaagagttcggggccatgagagagcagtacatgcgtgctggccacggcttcctgctggtgttcgccattaacgaccggcagagtttcaacgaggtgggcaagctcttcacgcagattctgcgggtcaaggaccgcgacgacttccccgttgtgttggtcgggaacaaggcagatctggagtcacagcgccaggtcccccgatcagaagcctctgccttcggcgcctcccaccacgtggcctactttgaggcctcggccaaactgcgtctcaacgtggacgaggcttttgagcagctggtgcgggctgtccggaaataccaggaacaagagctcccaccgagccctcccagtgcccccaggaagaagggcgggggctgcccctgcgtcctcctgtagcccaggcaagagagaagcaaccaccacaagctctcgggactagctgccttcgcaccttgctgtgtgacctgaggccctcactgagcctcaatttcctcatctgggtctcccaggacacatcacatacccacccttacttcctggcctcttctgggctactgccactgtgtgccttctgccaacgcctcctgtccccacctaagcctggtgggggtgaggggctccgggtcactgctgtatataactcccctcccccagaaaaataaatgtcactgccaacg

SEQ ID NO: 25895 - DNA, 1516 bp, Homo sapiens
  source 1..1516: mol_type = unassigned DNA
cagacggccatttgtggcggcgctggaggctgcgttcggcaggcgctgcggagacgcgtagaggagcgcgccccccggccgctgccgcccctggcccgtgccgtcaccccgcttctccgcgcctcgggcggtacccagccagtccccagcgccgcgctaccgcgctgaccggccctccagacgcctcccggtacccgggaccccagcccggccgctcgcccgcagcccgccggccgcacacgtccccggagccgggcctagggcgggcggcagcggcggctcggcgcagtcaggctgggctctgtagcgtccccatggccgcggccggctggcgggacggctccggccaggagaagtaccggctcgtggtggtcggcgggggcggcgtgggcaagtcggcgctcaccatccagttcatccagtcctattttgtaacggattatgatccaaccattgaagattcttacacaaagcagtgtgtgatagatgacagagcagcccggctagatattttggatacagcaggacaagaagagtttggagccatgagagaacagtatatgaggactggcgaaggcttcctgttggtcttttcagtcacagatagaggcagttttgaagaaatctataagtttcaaagacagattctcagagtaaaggatcgtgatgagttcccaatgattttaattggtaataaagcagatctggatcatcaaagacaggtaacacaggaagaaggacaacagttagcacggcagcttaaggtaacatacatggaggcatcagcaaagattaggatgaatgtagatcaagctttccatgaacttgtccgggttatcaggaaatttcaagagcaggaatgtcctccttcaccagaaccaacacggaaagaaaaagacaagaaaggctgccattgtgtcattttctagaatcccttcagttttagctaccaacggccaggaaaagccctcatcttctctttctctcctcagtttacatcttgttggtacctttctagccttagacaaatgatcaccatgttagccttagacgaagaagctggctagtcctttctgtgaagctaatacaatggtcatttccagacaaatttaaaggaaacactaaggctgcttcaaagattatctgattcctttaaaatatatgtctatatacacagacatgctctttttttaagtgcttacattttaatagagatgaatcagttttggaatctaagctgtttgccaagctgaagctacaggttgtgaaataatttttaacttttggaatcatactgcctactgttactctaaatagaaatatagggttttttttaatgtgaatttttgcctatctttaaacatttcaatgtcagcctttgttaaccttaaatacactgaattgaatctacaaaagtgaaccatctcagacctttactgatactacaacttttgttttctgatggccaaaataccaaatgcctgttgtatttatggattaaaaactgcttataaaa

SEQ ID NO: 25896 - DNA, 1884 bp, Homo sapiens
  source 1..1884: mol_type = unassigned DNA
gcagtcctattttgtaacggattatgatccaaccattgaagattcttacacaaagcagtgtgtgatagatgacagagcagcccggctagatattttggatacagcaggacaagaagagtttggagccatgagagaacagtatatgaggactggcgaaggcttcctgttggtcttttcagtcacagatagaggcagttttgaagaaatctataagtttcaaagacagattctcagagtaaaggatcgtgatgagttcccaatgattttaattggtaataaagcagatctggatcatcaaagacaggtaacacaggaagaaggacaacagttagcacggcagcttaaggtaacatacatggaggcatcagcaaagattaggatgaatgtagatcaagctttccatgaacttgtccgggttatcaggaaatttcaagagcaggaatgtcctccttcaccagaaccaacacggaaagaaaaagacaagaaaggctgccattgtgtcattttctagaatcccttcagttttagctaccaacggccaggaaaagccctcatcttctctttctctcctcagtttacatcttgttggtacctttctagccttagacaaatgatcaccatgttagccttagacgaagaagctggctagtcctttctgtgaagctaatacaatggtcatttccagacaaatttaaaggaaacactaaggctgcttcaaagattatctgattcctttaaaatatatgtctatatacacagacatgctctttttttaagtgcttacattttaatagagatgaatcagttttggaatctaagctgtttgccaagctgaagctacaggttgtgaaataatttttaacttttggaatcatactgcctactgttactctaaatagaaatatagggttttttttaatgtgaatttttgcctatctttaaacatttcaatgtcagcctttgttaaccttaaatacactgaattgaatctacaaaagtgaaccatctcagacctttactgatactacaacttttgttttctgatggccaaaataccaaatgcctgttgtatttatggattaaaaactgcttataaaaccctgtgttactactcctactcttggagatgataatattctatgtggtcaaatatttggactcatttaggacttagatatttcagtgtacttgattttttaatttaactctttttcacagccacgctaagggtaaaaaggaataatttccttctgtcttccttttcaagtatttctgggtaagggattcaaaaaactaaaactgtttttgtttgtaatataaaatatggaattgatctttccagggtcagagatgattaatgtttttgctatatacttttatacattattttcttatcaaactagttaacaagtatttttatatgtttgtaagcagatatgctttcatagcataccttgtgtatatgtaaagataagtatttaattctcactgttcacttttaactgacaaagaaaaacaagtggaaactacagaaactgtggtagaacttttacttgctggtctggtcttggttgtacccatctttggccagtcacataactactcaagaaaccttcccaatagagtacaacaggatgagactctgaaatcactttcagtattccctgctagatattgattgttatttcaagtattaagtgtaagcttttaatggataattagtataactgtggatggcatctgattttgtttttaattctgtggattgtgtttaagcaattcaatagtatgttcctgattttgagatgctaagtggtattgcacagttgtcactttatcaagtgtgtacaacagtcccatgaagtttatagagcatacccttgt

SEQ ID NO: 25897 - DNA, 970 bp, Homo sapiens
  source 1..970: mol_type = unassigned DNA
attgctctggccgaggccagagacctccgggagaggctgggccaccgagccgggctttactgctccgagggtccgggcgtggggctggagctggagccccgcgcgctgcttttccagccgcctgcggccgcgccttcaccgtcggggcgatagcggtggcaacttggccgcggctccgcgtggtctccgggcttccccgcgccgcctgagccggagctgcccgcttcaatcctattttgtaacggattatgatccaaccattgaagattcttacacaaagcagtgtgtgatagatgacagagcagcccggctagatattttggatacagcaggacaagaagagtttggagccatgagagaacagtatatgaggactggcgaaggcttcctgttggtcttttcagtcacagatagaggcagttttgaagaaatctataagtttcaaagacagattctcagagtaaaggatcgtgatgagttcccaatgattttaattggtaataaagcagatctggatcatcaaagacaggtaacacaggaagaaggacaacagttagcacggcagcttaaggtaacatacatggaggcatcagcaaagattaggatgaatgtagatcaagctttccatgaacttgtccgggttatcaggaaatttcaagagcaggaatgtcctccttcaccagaaccaacacggaaagaaaaagacaagaaaggctgccattgtgtcattttctagaatcccttcagttttagctaccaacggccaggaaaagccctcatcttctctttctctcctcagtttacatcttgttggtacctttctagccttagacaaatgatcaccatgttagccttagacgaagaagctggctagtcctttctgtgaagctaatacaatggtcatttccagacaaatttaaaggaaacactaaggctgcttcaaagattatctgattcctttaaaatatat

SEQ ID NO: 25898 - DNA, 1278 bp, Homo sapiens
  source 1..1278: mol_type = unassigned DNA
atctcagatgcatgcagctcctgctgggcggtttcattctctgccagccattcattcacattaaaagcaatggcccattaaggaaataagtggatgatgctcctccatcacccatgtcctattttgtaacggattatgatccaaccattgaagattcttacacaaagcagtgtgtgatagatgacagagcagcccggctagatattttggatacagcaggacaagaagagtttggagccatgagagaacagtatatgaggactggcgaaggcttcctgttggtcttttcagtcacagatagaggcagttttgaagaaatctataagtttcaaagacagattctcagagtaaaggatcgtgatgagttcccaatgattttaattggtaataaagcagatctggatcatcaaagacaggtaacacaggaagaaggacaacagttagcacggcagcttaaggtaacatacatggaggcatcagcaaagattaggatgaatgtagatcaagctttccatgaacttgtccgggttatcaggaaatttcaagagcaggaatgtcctccttcaccagaaccaacacggaaagaaaaagacaagaaaggctgccattgtgtcattttctagaatcccttcagttttagctaccaacggccaggaaaagccctcatcttctctttctctcctcagtttacatcttgttggtacctttctagccttagacaaatgatcaccatgttagccttagacgaagaagctggctagtcctttctgtgaagctaatacaatggtcatttccagacaaatttaaaggaaacactaaggctgcttcaaagattatctgattcctttaaaatatatgtctatatacacagacatgctctttttttaagtgcttacattttaatagagatgaatcagttttggaatctaagctgtttgccaagctgaagctacaggttgtgaaataatttttaacttttggaatcatactgcctactgttactctaaatagaaatatagggttttttttaatgtgaatttttgcctatctttaaacatttcaatgtcagcctttgttaaccttaaatacactgaattgaatctacaaaagtgaaccatctcagacctttactgatactacaacttttgttttctgatggccaaaataccaaatgcctgttgtatttatggattaaaaactgcttataaaaccctgtgttactactcctactcttggagatgataatattctatgtggtcaaatatttggactcattta

SEQ ID NO: 25899 - DNA, 497 bp, Homo sapiens
  source 1..497: mol_type = unassigned DNA
aatatttttgaactgtggttgactgtgggtaactgaaaccaaggaaagtgaaactggggataagcaaggtactgtagttttctttgatcagcacctgaaagatactgtgccacttcttctgatccccatggtttctgatgagaaatctgctgtttttctcctgtagtcctattttgtaacggattatgatccaaccattgaagattcttacacaaagcagtgtgtgatagatgacagagcagcccggctagatattttggatacagcaggacaagaagagtttggagccatgagagaacagtatatgaggactggcgaaggcttcctgttggtcttttcagtcacagatagaggcagttttgaagaaatctataagtttcaaagacagattctcagagtaaaggatcgtgatgagttcccaatgattttaattggtaataaagcagatctggatcatcaaagacaggtaacacaggaagaaggacaacagttagcac

SEQ ID NO: 25900 - DNA, 982 bp, Homo sapiens
  source 1..982: mol_type = unassigned DNA
attgctctggccgaggccagagacctccgggagaggctgggccaccgagccgggctttactgctccgagggtccgggcgtggggctggagctggagccccgcgcgctgcttttccagccgcctgcggccgcgccttcaccgtcggggcgatagcggtggcaacttggccgcggctccgcgtggtctccgggcttccccgcgccgcctgagccggagctgcccgcttcaagtactgtgtatttctttgttcctattttgtaacggattatgatccaaccattgaagattcttacacaaagcagtgtgtgatagatgacagagcagcccggctagatattttggatacagcaggacaagaagagtttggagccatgagagaacagtatatgaggactggcgaaggcttcctgttggtcttttcagtcacagatagaggcagttttgaagaaatctataagtttcaaagacagattctcagagtaaaggatcgtgatgagttcccaatgattttaattggtaataaagcagatctggatcatcaaagacaggtaacacaggaagaaggacaacagttagcacggcagcttaaggtaacatacatggaggcatcagcaaagattaggatgaatgtagatcaagctttccatgaacttgtccgggttatcaggaaatttcaagagcaggaatgtcctccttcaccagaaccaacacggaaagaaaaagacaagaaaggctgccattgtgtcattttctagaatcccttcagttttagctaccaacggccaggaaaagccctcatcttctctttctctcctcagtttacatcttgttggtacctttctagccttagacaaatgatcaccatgttagccttagacgaagaagctggctagtcctttctgtgaagctaatacaatggtcatttccagacaaatttaaaggaaacactaaggctgcttcaaagattatctgattcctttaa

SEQ ID NO: 25901 - DNA, 993 bp, Homo sapiens
  source 1..993: mol_type = unassigned DNA
gtggtattcaggtgatgaatgtggattccgttttgagttggagaaatttctttttgtcagtttggatttaattttaagaaataatgagtcctattttgtaacggattatgatccaaccattgaagattcttacacaaagcagtgtgtgatagatgacagagcagcccggctagatattttggatacagcaggacaagaagagtttggagccatgagagaacagtatatgaggactggcgaaggcttcctgttggtcttttcagtcacagatagaggcagttttgaagaaatctataagtttcaaagacagattctcagagtaaaggatcgtgatgagttcccaatgattttaattggtaataaagcagatctggatcatcaaagacaggtaacacaggaagaaggacaacagttagcacggcagcttaaggtaacatacatggaggcatcagcaaagattaggatgaatgtagatcaagctttccatgaacttgtccgggttatcaggaaatttcaagagcaggaatgtcctccttcaccagaaccaacacggaaagaaaaagacaagaaaggctgccattgtgtcattttctagaatcccttcagttttagctaccaacggccaggaaaagccctcatcttctctttctctcctcagtttacatcttgttggtacctttctagccttagacaaatgatcaccatgttagccttagacgaagaagctggctagtcctttctgtgaagctaatacaatggtcatttccagacaaatttaaaggaaacactaaggctgcttcaaagattatctgattcctttaaaatatatgtctatatacacagacatgctctttttttaagtgcttacattttaatagagatgaatcagttttggaatctaagctgtttgccaagctgaagctacaggttgtgaaataatttttaacttttggaatcatactgcctactgttactctaaatagaaatataggg

SEQ ID NO: 25902 - DNA, 2034 bp, Homo sapiens
  source 1..2034: mol_type = unassigned DNA
atctcagatgcatgcagctcctgctgggcggtttcattctctgccagccattcattcacattaaaagcaatggcccattaaggaaataagtggatgatgctcctccatcacccatgtcctattttgtaacggattatgatccaaccattgaagattcttacacaaagcagtgtgtgatagatgacagagcagcccggctagatattttggatacagcaggacaagaagagtttggagccatgagagaacagtatatgaggactggcgaaggcttcctgttggtcttttcagtcacagatagaggcagttttgaagaaatctataagtttcaaagacagattctcagagtaaaggatcgtgatgagttcccaatgattttaattggtaataaagcagatctggatcatcaaagacaggtaacacaggaagaaggacaacagttagcacggcagcttaaggtaacatacatggaggcatcagcaaagattaggatgaatgtagatcaagctttccatgaacttgtccgggttatcaggaaatttcaagagcaggaatgtcctccttcaccagaaccaacacggaaagaaaaagacaagaaaggctgccattgtgtcattttctagaatcccttcagttttagctaccaacggccaggaaaagccctcatcttctctttctctcctcagtttacatcttgttggtacctttctagccttagacaaatgatcaccatgttagccttagacgaagaagctggctagtcctttctgtgaagctaatacaatggtcatttccagacaaatttaaaggaaacactaaggctgcttcaaagattatctgattcctttaaaatatatgtctatatacacagacatgctctttttttaagtgcttacattttaatagagatgaatcagttttggaatctaagctgtttgccaagctgaagctacaggttgtgaaataatttttaacttttggaatcatactgcctactgttactctaaatagaaatatagggttttttttaatgtgaatttttgcctatctttaaacatttcaatgtcagcctttgttaaccttaaatacactgaattgaatctacaaaagtgaaccatctcagacctttactgatactacaacttttgttttctgatggccaaaataccaaatgcctgttgtatttatggattaaaaactgcttataaaaccctgtgttactactcctactcttggagatgataatattctatgtggtcaaatatttggactcatttaggacttagatatttcagtgtacttgattttttaatttaactctttttcacagccacgctaagggtaaaaaggaataatttccttctgtcttccttttcaagtatttctgggtaagggattcaaaaaactaaaactgtttttgtttgtaatataaaatatggaattgatctttccagggtcagagatgattaatgtttttgctatatacttttatacattattttcttatcaaactagttaacaagtatttttatatgtttgtaagcagatatgctttcatagcataccttgtgtatatgtaaagataagtatttaattctcactgttcacttttaactgacaaagaaaaacaagtggaaactacagaaactgtggtagaacttttacttgctggtctggtcttggttgtacccatctttggccagtcacataactactcaagaaaccttcccaatagagtacaacaggatgagactctgaaatcactttcagtattccctgctagatattgattgttatttcaagtattaagtgtaagcttttaatggataattagtataactgtggatggcatctgattttgtttttaattctgtggattgtgtttaagcaattcaatagtatgttcctgattttgagatgctaagtggtattgcacagttgtcactttatcaagtgtgtacaacagtcccatgaagtttatagagcatacccttgtatagcttcaggtgctagaattaaaattgatctgttatc

SEQ ID NO: 25903 - DNA, 2358 bp, Homo sapiens
  source 1..2358: mol_type = unassigned DNA
cagacggccatttgtggcggcgctggaggctgcgttcggcaggcgctgcggagacgcgtagaggagcgcgccccccggccgctgccgcccctggcccgtgccgtcaccccgcttctccgcgcctcgggcggtacccagccagtccccagcgccgcgctaccgcgctgaccggccctccagacgcctcccggtacccgggaccccagcccggccgctcgcccgcagcccgccggccgcacacgtccccggagccgggcctagggcgggcggcagcggcggctcggcgcagtcaggctgggctctgtagcgtccccatggccgcggccggctggcgggacggctccggccaggagaagtaccggctcgtggtggtcggcgggggcggcgtgggcaagtcggcgctcaccatccagttcatccagttttttcttttcttgcagtcctattttgtaacggattatgatccaaccattgaagattcttacacaaagcagtgtgtgatagatgacagagcagcccggctagatattttggatacagcaggacaagaagagtttggagccatgagagaacagtatatgaggactggcgaaggcttcctgttggtcttttcagtcacagatagaggcagttttgaagaaatctataagtttcaaagacagattctcagagtaaaggatcgtgatgagttcccaatgattttaattggtaataaagcagatctggatcatcaaagacaggtaacacaggaagaaggacaacagttagcacggcagcttaaggtaacatacatggaggcatcagcaaagattaggatgaatgtagatcaagctttccatgaacttgtccgggttatcaggaaatttcaagagcaggaatgtcctccttcaccagaaccaacacggaaagaaaaagacaagaaaggctgccattgtgtcattttctagaatcccttcagttttagctaccaacggccaggaaaagccctcatcttctctttctctcctcagtttacatcttgttggtacctttctagccttagacaaatgatcaccatgttagccttagacgaagaagctggctagtcctttctgtgaagctaatacaatggtcatttccagacaaatttaaaggaaacactaaggctgcttcaaagattatctgattcctttaaaatatatgtctatatacacagacatgctctttttttaagtgcttacattttaatagagatgaatcagttttggaatctaagctgtttgccaagctgaagctacaggttgtgaaataatttttaacttttggaatcatactgcctactgttactctaaatagaaatatagggttttttttaatgtgaatttttgcctatctttaaacatttcaatgtcagcctttgttaaccttaaatacactgaattgaatctacaaaagtgaaccatctcagacctttactgatactacaacttttgttttctgatggccaaaataccaaatgcctgttgtatttatggattaaaaactgcttataaaaccctgtgttactactcctactcttggagatgataatattctatgtggtcaaatatttggactcatttaggacttagatatttcagtgtacttgattttttaatttaactctttttcacagccacgctaagggtaaaaaggaataatttccttctgtcttccttttcaagtatttctgggtaagggattcaaaaaactaaaactgtttttgtttgtaatataaaatatggaattgatctttccagggtcagagatgattaatgtttttgctatatacttttatacattattttcttatcaaactagttaacaagtatttttatatgtttgtaagcagatatgctttcatagcataccttgtgtatatgtaaagataagtatttaattctcactgttcacttttaactgacaaagaaaaacaagtggaaactacagaaactgtggtagaacttttacttgctggtctggtcttggttgtacccatctttggccagtcacataactactcaagaaaccttcccaatagagtacaacaggatgagactctgaaatcactttcagtattccctgctagatattgattgttatttcaagtattaagtgtaagcttttaatggataattagtataactgtggatggcatctgattttgtttttaattctgtggattgtgtttaagcaattcaatagtatgttcctgattttgagatgctaagtggtattgcacagttgtcactttatcaagtgtgtacaacagtcccatgaagtttatagagcatacccttgtatagcttcaggtgctagaattaaaattgatctgttatc

SEQ ID NO: 25904 - DNA, 1068 bp, Homo sapiens
  source 1..1068: mol_type = unassigned DNA
ggttgagccgggtagggaaagcagcctaaagcccgggacaggcacacaggcccaggtgtgtaggccacagcagccgcagtcctgaaaggctgcaacacccagacctccaggagagaccaggcccaggatgcctcgcctgttcttgttccacctgctagaattctgtttactactgaaccaattttccagagcagtcgcggccaaatggaaggacgatgttattaaattatgcggccgcgaattagttcgcgcgcagattgccatttgcggcatgagcacctggagcaaaaggtctctgagccaggaagatgctcctcagacacctagaccagtggcaggtgattttattcaaacagtctcactgggaatctcaccggacggagggaaagcactgagaacaggaagctgcttcacccgagagttccttggtgccctttccaaattgtaccatccttcatcaacaaagatacagaaactataattatcatgttggaattcattgctaatttgccaccggagctgaaggcagccctatctgagaggcaaccatcattaccagagctacagcagtatgtacctgcattaaaggattccaatcttagctttgaagaatttaagaaacttattcgcaataggcaaagtgaagccgcagacagcaatccttcagaattaaaatacttaggcttggatactcattctcaaaaaaagagacgaccctacgtggcactgtttgagaaatgttgcctaattggttgtaccaaaaggtctcttgctaaatattgctgagatgaagctaattgtgcacatcttgtctaattttcacacatagtcttgatgacatttcactgatgcttctgtcaggtcccactaattattagaatataagaaatctttattaatgtttagatttttcatttggtgtgtaagaaaatattctttgtatgattgtagtttctgtaaatgacactttctatgctgaagtctttttgtctttttattaacagtataattgtgttgattctttttaatgctgttaacttaaaattacaataaaacctttgccacttt

SEQ ID NO: 25905 - DNA, 967 bp, Homo sapiens
  source 1..967: mol_type = unassigned DNA
ggttgagccgggtagggaaagcagcctaaagcccgggacaggcacacaggcccaggtgtgtaggccacagcagccgcagtcctgaaaggctgcaacacccagacctccaggagagaccaggcccaggatgcctcgcctgttcttgttccacctgctagaattctgtttactactgaaccaattttccagagcagtcgcggccaaatggaaggacgatgttattaaattatgcggccgcgaattagttcgcgcgcagattgccatttgcggcatgagcacctggagcaaaaggtctctgagccaggaagatgctcctcagacacctagaccagtggcagaaattgtaccatccttcatcaacaaagatacagaaactataattatcatgttggaattcattgctaatttgccaccggagctgaaggcagccctatctgagaggcaaccatcattaccagagctacagcagtatgtacctgcattaaaggattccaatcttagctttgaagaatttaagaaacttattcgcaataggcaaagtgaagccgcagacagcaatccttcagaattaaaatacttaggcttggatactcattctcaaaaaaagagacgaccctacgtggcactgtttgagaaatgttgcctaattggttgtaccaaaaggtctcttgctaaatattgctgagatgaagctaattgtgcacatcttgtctaattttcacacatagtcttgatgacatttcactgatgcttctgtcaggtcccactaattattagaatataagaaatctttattaatgtttagatttttcatttggtgtgtaagaaaatattctttgtatgattgtagtttctgtaaatgacactttctatgctgaagtctttttgtctttttattaacagtataattgtgttgattctttttaatgctgttaacttaaaattacaataaaacctttgccacttt

SEQ ID NO: 25906 - DNA, 580 bp, Homo sapiens
  source 1..580: mol_type = unassigned DNA
gccaagaggcagcagagacactggcccactctcacgttcaaagcatctccgtccagcatggccaggtacatgctgctgctgctcctggcggtatgggtgctgaccggggagctgtggccgggagctgaggcccgggcagcgccttacggggtcaggctttgcggccgagaattcatccgagcagtcatcttcacctgcgggggctcccggtggagacgatcagacatcctggcccacgaggctatgggagataccttcccggatgcagatgctgatgaagacagtctggcaggcgagctggatgaggccatggggtccagcgagtggctggccctgaccaagtcaccccaggccttttacagggggcgacccagctggcaaggaacccctggggttcttcggggcagccgagatgtcctggctggcctttccagcagctgctgcaagtgggggtgtagcaaaagtgaaatcagtagcctttgctagtttgagggctgggcagccgtgggcaccaggaccaatgccccagtcctgccatccactcaactagtgtctggctgggcacctgtctttcgagcct

SEQ ID NO: 25907 - DNA, 3535 bp, Homo sapiens
  source 1..3535: mol_type = unassigned DNA
agagcggcgagcccctccgcggctcggggtgagtcgggcgcggggcgcagaccgcgctctgacgtcgggggcggagcggccgtgacgcgcgggggcgggtctgcgcaccttcccggcccagccggcgattcattcaaaaggcgcgcaggctgcgcggctgtccgggcgctcgccgagccgggccgcggcgccgagtcgaacggggagccgagctggagctgccgcggcgcagccaggccggcgaccaccaggggcctgaggatgaagccaagtctgctgtgccggcccctgtcctgcttccttatgctgctgccctggcctctcgccaccctgacatcaacaaccctttggcagtgcccacctggggaggagcccgacctggacccagggcagggcacattatgcaggccctgccccccaggcaccttctcagctgcatggggctccagcccatgccagccccatgcccgttgcagcctttggaggaggctggaggcccaggtgggcatggcaactcgagatacactctgtggagactgctggcctgggtggtttgggccttggggggttccccgcgttccatgtcaaccatgttcctgggcacctctgggtactcatggctgtgatgagtgggggcggcgggcccgacgtggcgtggaggtggcagcaggggccagcagcggtggtgagacacggcagcctgggaacggcacccgggcaggtggcccagaggagacagccgcccagtacgcggtcatcgccatcgtccctgtcttctgcctcatggggctgttgggcatcctggtgtgcaacctcctcaagcggaagggctaccactgcacggcgcacaaggaggtcgggcccggccctggaggtggaggcagtggaatcaaccctgcctaccggactgaggatgccaatgaggacaccattggggtcctggtgcgcttgatcacagagaagaaagagaatgctgcggccctggaggagctgctgaaagagtaccacagcaaacagctggtgcagacgagccacaggcctgtgtccaagctgccgccagcgcccccgaacgtgccacacatctgcccgcaccgccaccatctccacaccgtgcagggcctggcctcgctctctggcccctgctgctcccgctgtagccagaagaagtggcccgaggtgctgctgtcccctgaggctgtagccgccactactcctgttcccagccttctgcctaacccgaccagggttcccaaggccggggccaaggcagggcgtcagggcgagatcaccatcttgtctgtgggcaggttccgcgtggctcgaattcctgagcagcggacaagttcaatggtgtctgaggtgaagaccatcacggaggctgggccctcgtggggtgatctccctgactccccacagcctggcctcccccctgagcagcaggccctgctaggaagtggcggaagccgtacaaagtggctgaagcccccagcagagaacaaggccgaggagaaccgctatgtggtccggctaagtgagagcaacctggtcatctgaggggcggtctagtctaaggacactgcggccctgccctgggaggttccgaaggcttcctggaggaggtggagctgcagctgggactgtgaggaccgagaagcaatggcccagcagacgagacagcaaagaccaaggcctggaggtgggagcgtctgccccagtgaggaggcaggtggccggcgggcactgtgtacaggagcaggctgagccccgcccctggccctgctgccatgttgctcccctgaaggatgccccgacccccgtgcctgccctggctggatcctaggagcccacgggattctctgtatcatcagaggctgggcttggcagaggggaggggcctgtgcccgtcacccctggccccattccttggtaattagccacacccttgcctctgtacagggccctagagcagatgtgcgtccccctcctcttccagcaggtctataaagggaaggggtagcagaaagtcctgggctaggagagtgagtccctgggttctaatcttgggcacatctgtggccatcgctgggtccatttttctgactgtgaagtaaggagagacgtctcagtacccagggcctcttcagctctttgtaggttctgggctgggttgtgggggactggggagctgggctctaccatccctcccattagtagctttatccagccccgtttttgctgcttccagggcctctgccttcaaggcccccatggggctgtccatccatggctctgcctacggaaggggcttaatgcatgtgcctgcccctcccccagctgtttttaatgaaactgaaaaaatagacttgatcccggcaggactgtgatacagagccctagcctgcccagccagccccaagatctcaggagctttagggagaagacttggtggggctggagcacaccttgggcctcagtggtttctgtgtccctgtggtgccagtgcttctgggcagtgcaggcggctgccaggcccagccctgacttccactctggctcagcaacctggttatttatgtggggccgtgcaggcatgggcccactgcctgtccatcctgtttctcttatttattgaaactcaccattgccctatccttgtgtctccacccccttccatgtgttgaataataaaaggtgggaaagtgctgtcacgaggagctccttttctctgtgcccttcccagcttatccgcctgttccacttgtacctgtccagccctgccctgtgttgggcaccgtgacaggctgccctcccctcacagttcctgcacctcagcagccagggaagcagggcccagaggagacccatcaactcatctggttctcaccaaagcccctagctagaggcagggctgtcccacagaaatagtgtgagccacatatgtgactttaaattttctgacagtcacatttcaaaaagtaaaaagaagcaggtgaacttaatttttttttaacccagtctatccaaaatattttcatttcaatataaaatcagtataaaaagtgtgaatgagctgtttttgcttttgctttgaaatctggagtgtatcttacacatcttgattggaactcaaatatttcaagggctccatagccacgtggccagcagctaccacactggtcagcgcagcacctgaggaaatgcactgtgtggagcccgggaggtaattgggggtgaggaagatgtgcgggccagggaatgtgttccacagagagggacagcatgtgcaaaggctgagcaccaacacatagtggtcacctgggccttatgcccagggagcctccaaagcattcagctcctgcttggccagtgtggagaggaaaggagccacaggagcgggtgctacacccggcaagacagagcgtctccatctaaaattcctagggcaagcttccaacccggcccaagggccgcatgtggcccaggatatggctttgaatggggcctaacacaaattcataaactttcttaaaacatt

SEQ ID NO: 25908 - DNA, 2669 bp, Homo sapiens
  source 1..2669: mol_type = unassigned DNA
cgcgtcctgtcccggcgccttccgcgcaccggccaccgccagtctccgagccccgtgacctgcaggtcctccggccgcgactccgggccggccctgcgtggtggctgtcggggggcgcgcggggaagcagcggaacttgcggtgtgaggggccggcggggcccggagcggtccccggcccgggaaacttggaccgagaccaggccggcgaccaccaggggcctgaggatgaagccaagtctgctgtgccggcccctgtcctgcttccttatgctgctgccctggcctctcgccaccctgacatcaacaaccctttggcagtgcccacctggggaggagcccgacctggacccagggcagggcacattatgcaggccctgccccccaggcaccttctcagctgcatggggctccagcccatgccagccccatgcccgttgcagcctttggaggaggctggaggcccaggtgggcatggcaactcgagatacactctgtggagactgctggcctgggtggtttgggccttggggggttccccgcgttccatgtcaaccatgttcctgggcacctctgggtactcatggctgtgatgagtgggggcggcgggcccgacgtggcgtggaggtggcagcaggggccagcagcggtggtgagacacggcagcctgggaacggcacccgggcaggtggcccagaggagacagccgcccagtacgcggtcatcgccatcgtccctgtcttctgcctcatggggctgttgggcatcctggtgtgcaacctcctcaagcggaagggctaccactgcacggcgcacaaggaggtcgggcccggccctggaggtggaggcagtggaatcaaccctgcctaccggactgaggatgccaatgaggacaccattggggtcctggtgcgcttgatcacagagaagaaagagaatgctgcggccctggaggagctgctgaaagagtaccacagcaaacagctggtgcagacgagccacaggcctgtgtccaagctgccgccagcgcccccgaacgtgccacacatctgcccgcaccgccaccatctccacaccgtgcagggcctggcctcgctctctggcccctgctgctcccgctgtagccagaagaagtggcccgaggtgctgctgtcccctgaggctgtagccgccactactcctgttcccagccttctgcctaacccgaccagggttcccaaggccggggccaaggcagggcgtcagggcgagatcaccatcttgtctgtgggcaggttccgcgtggctcgaattcctgagcagcggacaagttcaatggtgtctgaggtgaagaccatcacggaggctgggccctcgtggggtgatctccctgactccccacagcctggcctcccccctgagcagcaggccctgctaggaagtggcggaagccgtacaaagtggctgaagcccccagcagagaacaaggccgaggagaaccgctatgtggtccggctaagtgagagcaacctggtcatctgaggggcggtctagtctaaggacactgcggccctgccctgggaggttccgaaggcttcctggaggaggtggagctgcagctgggactgtgaggaccgagaagcaatggcccagcagacgagacagcaaagaccaaggcctggaggtgggagcgtctgccccagtgaggaggcaggtggccggcgggcactgtgtacaggagcaggctgagccccgcccctggccctgctgccatgttgctcccctgaaggatgccccgacccccgtgcctgccctggctggatcctaggagcccacgggattctctgtatcatcagaggctgggcttggcagaggggaggggcctgtgcccgtcacccctggccccattccttggtaattagccacacccttgcctctgtacagggccctagagcagatgtgcgtccccctcctcttccagcaggtctataaagggaaggggtagcagaaagtcctgggctaggagagtgagtccctgggttctaatcttgggcacatctgtggccatcgctgggtccatttttctgactgtgaagtaaggagagacgtctcagtacccagggcctcttcagctctttgtaggttctgggctgggttgtgggggactggggagctgggctctaccatccctcccattagtagctttatccagccccgtttttgctgcttccagggcctctgccttcaaggcccccatggggctgtccatccatggctctgcctacggaaggggcttaatgcatgtgcctgcccctcccccagctgtttttaatgaaactgaaaaaatagacttgatcccggcaggactgtgatacagagccctagcctgcccagccagccccaagatctcaggagctttagggagaagacttggtggggctggagcacaccttgggcctcagtggtttctgtgtccctgtggtgccagtgcttctgggcagtgcaggcggctgccaggcccagccctgacttccactctggctcagcaacctggttatttatgtggggccgtgcaggcatgggcccactgcctgtccatcctgtttctcttatttattgaaactcaccattgccctatccttgtgtctccacccccttccatgtgttgaataataaaaggtgggaaagtgc

SEQ ID NO: 25909 - DNA, 2395 bp, Homo sapiens
  source 1..2395: mol_type = unassigned DNA
atgcacccgggctgttgggtgcaggaagcactggtgttgaatcatgaaggtgatatgggcttctctgagcctggatcccacatttgcagggctctgggaggcttgtcacctaaatgcacatgctcagggcccttaagaaggccagggttgccctctgctggcagatcatggtttagctcaggagtgcggcttcccccttccccaggatcagggcccttctcttccccaggaatcaaccctgcctaccggactgaggatgccaatgaggacaccattggggtcctggtgcgcttgatcacagagaagaaagagaatgctgcggccctggaggagctgctgaaagagtaccacagcaaacagctggtgcagacgagccacaggcctgtgtccaagctgccgccagcgcccccgaacgtgccacacatctgcccgcaccgccaccatctccacaccgtgcagggcctggcctcgctctctggcccctgctgctcccgctgtagccagaagaagtggcccgaggtgctgctgtcccctgaggctgtagccgccactactcctgttcccagccttctgcctaacccgaccagggttcccaaggccggggccaaggcagggcgtcagggcgagatcaccatcttgtctgtgggcaggttccgcgtggctcgaattcctgagcagcggacaagttcaatggtgtctgaggtgaagaccatcacggaggctgggccctcgtggggtgatctccctgactccccacagcctggcctcccccctgagcagcaggccctgctaggaagtggcggaagccgtacaaagtggctgaagcccccagcagagaacaaggccgaggagaaccgctatgtggtccggctaagtgagagcaacctggtcatctgaggggcggtctagtctaaggacactgcggccctgccctgggaggttccgaaggcttcctggaggaggtggagctgcagctgggactgtgaggaccgagaagcaatggcccagcagacgagacagcaaagaccaaggcctggaggtgggagcgtctgccccagtgaggaggcaggtggccggcgggcactgtgtacaggagcaggctgagccccgcccctggccctgctgccatgttgctcccctgaaggatgccccgacccccgtgcctgccctggctggatcctaggagcccacgggattctctgtatcatcagaggctgggcttggcagaggggaggggcctgtgcccgtcacccctggccccattccttggtaattagccacacccttgcctctgtacagggccctagagcagatgtgcgtccccctcctcttccagcaggtctataaagggaaggggtagcagaaagtcctgggctaggagagtgagtccctgggttctaatcttgggcacatctgtggccatcgctgggtccatttttctgactgtgaagtaaggagagacgtctcagtacccagggcctcttcagctctttgtaggttctgggctgggttgtgggggactggggagctgggctctaccatccctcccattagtagctttatccagccccgtttttgctgcttccagggcctctgccttcaaggcccccatggggctgtccatccatggctctgcctacggaaggggcttaatgcatgtgcctgcccctcccccagctgtttttaatgaaactgaaaaaatagacttgatcccggcaggactgtgatacagagccctagcctgcccagccagccccaagatctcaggagctttagggagaagacttggtggggctggagcacaccttgggcctcagtggtttctgtgtccctgtggtgccagtgcttctgggcagtgcaggcggctgccaggcccagccctgacttccactctggctcagcaacctggttatttatgtggggccgtgcaggcatgggcccactgcctgtccatcctgtttctcttatttattgaaactcaccattgccctatccttgtgtctccacccccttccatgtgttgaataataaaaggtgggaaagtgctgtcacgaggagctccttttctctgtgcccttcccagcttatccgcctgttccacttgtacctgtccagccctgccctgtgttgggcaccgtgacaggctgccctcccctcacagttcctgcacctcagcagccagggaagcagggcccagaggagacccatcaactcatctggttctcaccaaagcccctagctagaggcagggctgtcccacagaaatagtgtgagccacatatgtgactttaaattttctgacagtcacatttcaaaaagtaaaaagaagcaggtgaacttaatttttttttaacccagtctatccaaaatattttcatttcaatataaaatcagt

SEQ ID NO: 25910 - DNA, 586 bp, Homo sapiens
  source 1..586: mol_type = unassigned DNA
aaaggcgcgcaggctgcgcggctgtccgggcgctcgccgagccgggccgcggcgccgagtcgaacggggagccgagctggagctgccgcggcgcagccagattcccaccagggcgaacccagcaccgcctgtataccagactctgtgccaggcactgaacgtaaataaaagccttaccacagccctctgcaggcaggccacagagccagtgcaagacagagcagagcaggactgcaccccatactttgtatccccaggccggcgaccaccaggggcctgaggatgaagccaagtctgctgtgccggcccctgtcctgcttccttatgctgctgccctggcctctcgccaccctgacatcaacaaccctttggcagtgcccacctggggaggagcccgacctggacccagggcagggcacattatgcaggccctgccccccaggcaccttctcagctgcatggggctccagcccatgccagccccatgcccgttgcagcctttggaggaggctggaggcccaggtgggcatggcaactcgagatacactctgtggagactgctggcctgggtggtttgggccttggg

SEQ ID NO: 25911 - DNA, 11550 bp, Homo sapiens
  source 1..11550: mol_type = unassigned DNA
ttgttttcattccccctgtcacacgaggcagtggcaagcccgaaggggaggagagaagggggcggaaagagggcggaaagtgaaaggcgccgagggccgctctgtctcccgtctgactcggttctcgactgctccgggccgccgatgtattgtgggatcgcggagccgtccctgagacgctgggatccgcagaggagcccacttgagagcgcctcctgtcgtctgtaaggttgccttgccatccctcggcaccacaacttcccccgcccccccatcgcctcctcctccatcctccagttcaaaatggcgacggcggcggcagcggcggcggtgatggctcctccgggctgcccgggttcgtgccccaacttcgccgtagtctgctccttcttggagcgctacgggccgctgctagacctgcctgagttgccgttccctgagctggagcgggtgctgcaggcgccgccgccggacgtcggcaacggagaagtaccaaaagaattggtggagctccatttgaagctgatgaggaaaattggcaaatctgttactgcagacagatgggaaaaatatttgatcaagatatgccaagagtttaacagtacctgggcatgggagatggagaagaagggctatcttgaaatgagtgttgaatgcaaactagcactcttaaagtacctctgtgagtgtcagtttgatgacaatctcaaattcaagaatattattaatgaggaggatgccgatactatgcgtctccagccaattggtcgagacaaagatggcctcatgtactggtaccaattggatcaagatcacaatgtcagaatgtacatagaagaacaagatgatcaagatggctcttcatggaaatgcattgtcagaaatcgaaacgagttggctgagactcttgcactcctgaaagcacaaattgatcctgtactattgaaaaactctagccaacaagacaactcttctcgggaaagtcccagcttagaggatgaggagactaaaaaagaggaagaaacacctaaacaagaggaacagaaagaaagtgaaaagatgaaaagtgaggagcagcctatggatttagaaaaccgttctacagccaatgttctagaagagactactgtgaaaaaagaaaaagaagatgaaaaggaacttgtgaaactgccagtcatagtgaagctagaaaaacctttgccagaaaatgaagaaaaaaagattatcaaagaagaaagtgattccttcaaggaaaatgtcaaacccattaaagttgaggtgaaggaatgtagagcagatcctaaagataccaaaagtagcatggagaagccagtggcacaggagcctgaaaggatcgaatttggtggcaatattaaatcttctcacgaaattactgagaaatctactgaagaaactgagaaacttaaaaatgaccagcaggccaagataccactaaaaaaacgagaaattaaactgagtgatgattttgacagtccagtcaagggacctttgtgtaaatcagttactccaacaaaagagtttttgaaagatgaaataaaacaagaggaagagacttgtaaaaggatctctacaatcactgctttgggtcatgaagggaaacagctggtaaatggagaagttagtgatgaaagggtagctccaaattttaagacagaaccaatagagacaaagttttatgagacaaaggaagagagctatagcccctctaaggacagaaatatcatcacggagggaaatggaacagagtccttaaattctgtcataacaagtatgaaaacaggtgagcttgagaaagaaacagcccctttgaggaaagatgcagatagttcaatatcagtcttagagatccatagtcaaaaagcacaaatagaggaacccgatcctccagaaatggaaacttctcttgattcttctgagatggcaaaagatctctcttcaaaaactgctttatcttccaccgagtcgtgtaccatgaaaggtgaagagaagtctcccaaaactaagaaggataagcgcccaccaatcctagaatgtcttgaaaagttagagaagtccaaaaagacttttcttgataaggacgcacaaagattgagtccaataccagaagaagttccaaagagtactctagagtcagaaaagcctggctctcctgaggcagctgaaacttctccaccatctaatatcattgaccactgtgagaaactagcctcagaaaaagaagtggtagaatgccagagtacaagtactgttggtggccagtctgtgaaaaaagtagacctagaaaccctaaaagaggattctgagttcacaaaggtagaaatggataatctggacaatgcccagacctctggcatagaggagccttctgagacaaagggttctatgcaaaaaagcaaattcaaatataagttggttcctgaagaagaaaccactgcctcagaaaatacagagataacctctgaaaggcagaaagagggcatcaaattaacaatcaggatatcaagtcggaaaaagaagcccgattctccccccaaagttctagaaccagaaaacaagcaagagaagacagaaaaggaagaggagaaaacaaatgtgggtcgtactttaagaagatctccaagaatatctagacccactgcaaaagtggctgagatcagagatcagaaagctgataaaaaaagaggggaaggagaagatgaggtggaagaagagtcaacagctttgcaaaaaactgacaaaaaggaaattttgaaaaaatcagagaaagatacaaattctaaagtaagcaaggtaaaacccaaaggcaaagttcgatggactggttctcggacacgtggcagatggaaatattccagcaatgatgaaagtgaagggtctggcagtgaaaaatcatctgcagcttcagaagaggaggaagaaaaggaaagtgaagaagccatcctagcagatgatgatgaaccatgcaaaaaatgtggccttccaaaccatcctgagctaattcttctgtgtgactcttgcgatagtggataccatactgcctgccttcgccctcctctgatgatcatcccagatggagaatggttctgcccaccttgccaacataaactgctctgtgaaaaattagaggaacagttgcaggatttggatgttgccttaaagaagaaagagcgtgccgaacgaagaaaagaacgcttggtgtatgttggtatcagtattgaaaacatcattcctccacaagagccagacttttctgaagatcaagaagaaaagaaaaaagattcaaaaaaatccaaagcaaacttgcttgaaaggaggtcaacaagaacaaggaaatgtataagctacagatttgatgagtttgatgaagcaattgatgaagctattgaagatgacatcaaagaagccgatggaggaggagttggccgaggaaaagatatctccaccatcacaggtcatcgtgggaaagacatctctactattttggatgaagaaagaaaagaaaataaacgaccccagagggcagctgctgctcgaaggaagaaacgccggcgattaaatgatctggacagtgatagcaacctggatgaagaagagagcgaggatgaattcaagatcagtgatggatctcaagatgagtttgttgtgtctgatgaaaacccagatgaaagtgaagaagatccgccatctaatgatgacagtgacactgacttttgtagccgtagactgaggcgacacccctctcggccaatgaggcagagcaggcgtttgcgaagaaagaccccaaagaaaaaatattccgatgatgatgaagaggaggaatctgaggagaatagtagagactctgaaagtgacttcagtgatgattttagtgatgattttgtagaaactcggcgaaggcggtcaaggagaaatcagaaaagacaaattaactacaaagaagactcagaaagtgacggttcccagaagagtttgcgacgtggtaaagaaataaggcgagtacacaagcgaagactttccagctcagagagtgaagagagctatttgtccaagaactctgaagatgatgagctagctaaagaatcaaagcggtcagttcgaaagcggggccgaagcacagacgagtattcagaagcagatgaggaggaggaggaagaggaaggcaaaccatcccgcaaacggctacaccggattgagacggatgaggaggagagttgtgacaatgctcatggagatgcaaatcagcctgcccgtgacagccagcctagggtcctgccctcagaacaagagagcaccaagaagccctaccggatagaaagtgatgaggaagaggactttgaaaatgtaggcaaagtggggagcccattggactatagcttagtggacttaccttcaaccaatggacagagccctggcaaagccattgagaacttgattggcaagcctactgagaagtctcagacccccaaggacaacagcacagccagtgcaagcctagcctccaatgggacaagtggtgggcaggaggcaggagcaccagaagaggaggaagatgagcttttgagagtgactgaccttgttgattatgtctgtaacagtgaacagttataagactttttttccatttttgtgctaatttattccacggtagctctcacaccagcgggccagttattaaaagctgtttaatttttcctagaaaactccactacagaatgacttttagaagaaaaatttcaacaaatcctgaagtctttctgtgaagtgaccagttctgaactttgaagataaataattgctgtaaattccttttgattttctttttccaggttcatggtccttggtaatttcattcatggaaaaaaatcttattataataacaacaaagatttgtatatttttgactttatatttcctgagctctcctgactttgtgaaaaagggtggatgaaaatgcattccgaatctgtgagggcccaaaacagaatttaggggtgggtgaaagcacttgtgctttagctttttcatattaaatatatattatatttaaacattcatggcatagatgatgatttacagacaatttaaaagttcaagtctgtactgttacagtttgagaattgtagataacatcatacataagtcatttagtaacagcctttgtgaaatgaacttgtttactattggagataaccacacttaataaagaagagacagtgaaagtaccatcataattaacctaaatttttgttatagcagagtttcttgtttaaaaaaaaataaaatcatctgaaaagcatttgtacagtaaaatgtataatgaagctttgccaaccagactgtgctagcaacaaatttttttaaataagctttatgcagtggtaataaggtggcctcaaatatattgtgtctgatggagagttattagtgaaatgaatgtggtctttcttaaggcctgggtggactgtaaactttgccaatagtataactcttgtcttctggccacttgatgtttaaatatctgaaatatcattttgaaaaaaatacatctatatataacatacatgaagagatgctaagctgacagtgatattttagcacatttgaagactgggaagagattttcaggtgaattttaactggtctattcttgcccttagtatctacttcaaattgaagtctacaaacaaagcagttcctttgggaggtttttagtttgagttttagcgtgtgtgtgtgtttgtgtgtgtgcgtgtgcgtgtgtgtgtgtgttggaatttcctatctgcctggatatattagcagagtttgaatgtagttttggcctttggccattagacttctattaaaattcattaatagtcatacaaccaacatagagttgaatgagaactgccgatgtaattaataggcatgacatccatttcaaacatctcaacactttaaagaaaagccctttgtttcaagaaaaaagggtttgtaactaactaaatacctaacatgtaattgacactaaaatatgaactttgtcttatttagtttctgttatagctgtaaaatttcaggcagagccataacattgtacagagtgtagcacttgtgattaaacctagcctgttaaatcctgaaaccttcaaccattacttctgtgaatactttagccctgggatttgggtttttctgttccggtgttgtgtctgttgccggcaatggacacaccatatctgctgctggcccaaggaacgtcattaatttttctttccaaattaagtattatgtgctagtcagtgtatagtaaagcacttctcttttttattactaaaaagctggcattagatttgcattataaatacctctctaggaactttatactccttttccttcttcaacaggtattgcccttaaatcttatcttttggccttgaaagtttatagctattgtttttcagttgttcgttgttttgttttgtttcactttagttctgtagtacctgcccattaatatttttgctttgattctagcaatgtgtatgtatctgtataaaaaataaaataatgaaagcaacctaaaaataggatgcaccaatagcatgtggttccaagtaagttgtgatttttattttgagacagtgttccactggaagggagggaagggcttacattcacagacagtaaagcagggctgtgtaaggagctacatttacttaacagtctcctttccagctaggtttgttttatttatttgcaagtcagctaagaattaaccttttaaaccatctaaaacaggcaagcaatataaagatttctactagtgcaaggtaagtggtttgaatatacaagtgccctttcctgccacccagtctcactaccgttttagtcctgcagctgggtaaagccactattgtgtggaaactctcccatgtgccctgtctctacctctggacacaccagctccttcttccacctattctattcctcagttaagccaagtgatcagaagtagtattaaatgggtagataattttaacaggatgcctaatgtgaaataaggagttatttttactcttctactatagaaagcctaaggtaattcttaccatctcaaagactgagtattccatttaggtttggagaccacttgtgctgtgctgcctgatatttaccaaacttgaataagtgttcgtcaacttgatagtgaatgtaccccttctcaccttatattttgattaaatcaattaactataggtcatctaccaagaatgtaatccaagcggttgataaaacattattaggcagatagattattgattattaaattttgagcagtgcaaaaacggttttgctgcttggagttcagattcagtccctcaaagagtttatgatcactgaaatacactctgaaggtattctgaagaagttaaaaaattttagaaaacgaaatgttctgtatacaaagacaatacagtcactacgaactgcagaaagtataggaaagcagtaattgatgtagagtttagacagtcttggatcttttttagagcactaaccatggatttagactcaaaatagctgctacataatagagccctttaataatttaaaccccccttgttgaaatacaagttggactcccagtgtcaaactctagactgtagctaatgtattaaagggagatgtagattaatattcagtatatttagtttgcaatttctgaaaaggtttgaaaactagtcagcttttcacacagcagaagctttgaactgaaatatgtgtgaaaaggacgcagactgaaaacgttttggttttgtacatcagtgctgatgaaattagtgtaaaacattttccatcattggcacattactgcaaaatgatggcagagatattttcaagaatgtacatcaagttatatttccttgacatccttttttcaattggtcaaggttacagattcagaggataaagggtagtttcatttagaataaattcatgtctactggcaatctatatataaaagtgacctgcccaagaaccaaaaactttaaatgctaatgaagcttttgaaaaataatttttaaacaaattaattttaaaagggtgttacacgtacccagtttttactttttagttgatgaaacccatcctataatatacatttgagcaaagtacacatattaagaaaaacatggacatttacttgtttaatagtcaaaatgatgaggaaatgttagctgtttttaagtgggactggtggggtgtcctttgtcacaaggaatgcttttttagcttgtttgtgggcataagagatgttaaccctttgctgattctaccacacaactgtaaagaacctaatgaatctacaagtttaatattcagaaaaagctaggaactccgctctttaccagtacagtggaacaggcccgttattcaaggtgatgcctcacagctatagaacaactattcaaagacccagagttaaatggtacatgtgtatatgtgtgtgtgtgtgtgcacacgcacacacttcagataagtatcagaaaaaataaaaatgaatccatcattaacttgaaagaaataagatggctgcattgcaacagatacaaatattatgaacatcatttaattacagaaaatctagacaacagtttctcctgatgtttgacattctcaaaatatattcctcattctcgaagaagcagagaatgccaaggctgcatatctgctgtaatctacctagccctcttctgcttaatatgatccattattgaatcttctcagattaaaatccattcctatatcatctacctttcccaaagtgtgtgcctgtaaacctaccttggaagtggcaagttaactgatttttttgtgtcatttttataccaatccttaaggtcaaagccttttgctatcaatgtatttaaactgagttgctatatgttcactaatttgttttcaaaatgttttgctccaacttaaattatcttttaacatcttttgagtgccaagaattgctaagtaactgtaatatgttgaagagagtaattgccaagcaagcagtcataagccaaaatgtaatgagcttagtatataaccactttagagtatacactcaccactttttgtattcattcatgcaaaccctcctggaagtcgattagaagaggatccaatttgtggaccttttttcctccttttggacacctgagcacaattttttttttcctttcatatttataccactttggaaaattcagtaaacccaattctggcacatcataatggtttcagttagtgaagatgtttattttaataactttaaaatatgactatcctatacataagttatataagagggcataacaatagatgagtagaaatttataaaatttcttggatattttgaatgagaaaaaaacatttttaaaggaattttgttttttccttttttggccaaaccggtacaagttagaaagtgtgctaaggactgaatacttgcctcgtgctttttgccactggatgatgtaagttaagaatggaattgttaatcctaagtatatattttcttgactttcatcagtttctaaagaaatctaatttaagtgttttgcggttttgtttgatctgtatttattgagttctggtcatagaccagcagcttgcacgtcatgctcatgaacagccagaacatagttattggggaacttcatggctcaaaaccttctgaatcatttaacttattttgtatgttgcaaaaaaaaaaaaaaagtttattttgcttgagagtcacctttttttaaaaaaaataactgtacagcttttaagggatgggaggtgggaaaataccctaaaataggatgtagattttttacaattgtgtttatgctagatcatctacaggtgcattatgtaattaaacctaaaattgtttaaaaatttgtgccatgtctttttcattctcctgccctttagcagaattggtgcatgtcaactgctatgtggacaagccttgaaattagagtaacaagccctgtctccaaagctttaaggtcactgcatgaaaattgcacacacacacacacacacacacacatctagcttatattagtaaatggattttcaggatcagaacagctacagtagcccagatttggctgttaacagcatattcttacagcacatgatttttgtgatgcctaactagggtattctcaatgttagtctggtgttctattctctttcaaagtagcttcttgagatggtatctgttgtagcttgcccaaacctgccatgaggttgtgtgtacactttgaaagggtatgtcctatgctaagatggtggtagagcagggcttgattttaatctattcatataaaagaaggaaaaaactagaattggtctatttggttattcagtggacttaattccacaggaatagttgtctgctgaagcgtggcagcaagagaagtcaaattcaagtttcagttccttccttattcactaagtattttgaaatcttgtagaacttctgattctagcacagtcttttacatggcacattttaccatggtatattcacagcttcgtttaaatgtcagtactttttcccatctgataattttgccattctaatttctcacctttgtagtacaagtgtattcttgaaaataattaaattcatctaagtgtgtcataatttcaatcaaagctatattcatgtgttgccagcgtcagttttttgctatcctcattcagaagggaagcctgcagatcatgagtttccatatgaagaatacaaattccacataaaaatttataaatggtatctttagaattttgatttaaagtaatagctggaattcagggactgatcagaatgcctcttgaattttccaacatgcttatatgaaatgctttattttcctatgcgttaaaaaaaatattcctggaataggttctcagaatgttttatttggtttctaggagatgagatttaaagcagaagctccaagattggcataaaactaactcttgaggtaatcaggaccatgctgttagtcaaatagaagctggagtgctctctgtcacataatgtactgcatgtgtgtgggggtgggggggcagggaagatcagaaaactggaaatgtaattctgataacacgcaaagtaaattgtgcattaaaagtatgggaattcttggtagcttaaagcttcaggggttaacttcagtgtatgaacacctagtgtgttagaattgcagtgcatagttgtttaaatacaatattccttgtaagtgacaaccaaaatatgttgtggctggtgccagtatttttgttaatgaaatgttcagtgtctcactacagtctgatcagaactcttggtgttataagccaggcctaaagccattttatagctattggcctaattgtgtaactttttctttcaaaatgttttattataatacttctgtcatttctttcacttaatatgtcaattgtcataataaaaatttaaatttgaattatttagcatga

SEQ ID NO: 25912 - DNA, 5040 bp, Homo sapiens
  source 1..5040: mol_type = unassigned DNA
gatccgcagaggagcccacttgagagcgcctcctgtcgtctgtaaggttgccttgccatccctcggcaccacaacttcccccgcccccccatcgcctcctcctccatcctccagttcaaaatggcgacggcggcggcagcggcggcggtgatggctcctccgggctgcccgggttcgtgccccaacttcgccgtagtctgctccttcttggagcgctacgggccgctgctagacctgcctgagttgccgttccctgagctggagcgggtgctgcaggcgccgccgccggacgtcggcaacggagaagtaccaaaagaattggtggagctccatttgaagctgatgaggaaaattggcaaatctgttactgcagacagatgggaaaaatatttgatcaagtacctctgtgagtgtcagtttgatgacaatctcaaattcaagaatattattaatgaggaggatgccgatactatgcgtctccagccaattggtcgagacaaagatggcctcatgtactggtaccaattggatcaagatcacaatgtcagaatgtacatagaagaacaagatgatcaagatggctcttcatggaaatgcattgtcagaaatcgaaacgagttggctgagactcttgcactcctgaaagcacaaattgatcctgtactattgaaaaactctagccaacaagacaactcttctcgggaaagtcccagcttagaggatgaggagactaaaaaagaggaagaaacacctaaacaagaggaacagaaagaaagtgaaaagatgaaaagtgaggagcagcctatggatttagaaaaccgttctacagccaatgttctagaagagactactgtgaaaaaagaaaaagaagatgaaaaggaacttgtgaaactgccagtcatagtgaagctagaaaaacctttgccagaaaatgaagaaaaaaagattatcaaagaagaaagtgattccttcaaggaaaatgtcaaacccattaaagttgaggtgaaggaatgtagagcagatcctaaagataccaaaagtagcatggagaagccagtggcacaggagcctgaaaggatcgaatttggtggcaatattaaatcttctcacgaaattactgagaaatctactgaagaaactgagaaacttaaaaatgaccagcaggccaagataccactaaaaaaacgagaaattaaactgagtgatgattttgacagtccagtcaagggacctttgtgtaaatcagttactccaacaaaagagtttttgaaagatgaaataaaacaagaggaagagacttgtaaaaggatctctacaatcactgctttgggtcatgaagggaaacagctggtaaatggagaagttagtgatgaaagggtagctccaaattttaagacagaaccaatagagacaaagttttatgagacaaaggaagagagctatagcccctctaaggacagaaatatcatcacggagggaaatggaacagagtccttaaattctgtcataacaagtatgaaaacaggtgagcttgagaaagaaacagcccctttgaggaaagatgcagatagttcaatatcagtcttagagatccatagtcaaaaagcacaaatagaggaacccgatcctccagaaatggaaacttctcttgattcttctgagatggcaaaagatctctcttcaaaaactgctttatcttccaccgagtcgtgtaccatgaaaggtgaagagaagtctcccaaaactaagaaggataagcgcccaccaatcctagaatgtcttgaaaagttagagaagtccaaaaagacttttcttgataaggacgcacaaagattgagtccaataccagaagaagttccaaagagtactctagagtcagaaaagcctggctctcctgaggcagctgaaacttctccaccatctaatatcattgaccactgtgagaaactagcctcagaaaaagaagtggtagaatgccagagtacaagtactgttggtggccagtctgtgaaaaaagtagacctagaaaccctaaaagaggattctgagttcacaaaggtagaaatggataatctggacaatgcccagacctctggcatagaggagccttctgagacaaagggttctatgcaaaaaagcaaattcaaatataagttggttcctgaagaagaaaccactgcctcagaaaatacagagataacctctgaaaggcagaaagagggcatcaaattaacaatcaggatatcaagtcggaaaaagaagcccgattctccccccaaagttctagaaccagaaaacaagcaagagaagacagaaaaggaagaggagaaaacaaatgtgggtcgtactttaagaagatctccaagaatatctagacccactgcaaaagtggctgagatcagagatcagaaagctgataaaaaaagaggggaaggagaagatgaggtggaagaagagtcaacagctttgcaaaaaactgacaaaaaggaaattttgaaaaaatcagagaaagatacaaattctaaagtaagcaaggtaaaacccaaaggcaaagttcgatggactggttctcggacacgtggcagatggaaatattccagcaatgatgaaagtgaagggtctggcagtgaaaaatcatctgcagcttcagaagaggaggaagaaaaggaaagtgaagaagccatcctagcagatgatgatgaaccatgcaaaaaatgtggccttccaaaccatcctgagctaattcttctgtgtgactcttgcgatagtggataccatactgcctgccttcgccctcctctgatgatcatcccagatggagaatggttctgcccaccttgccaacataaactgctctgtgaaaaattagaggaacagttgcaggatttggatgttgccttaaagaagaaagagcgtgccgaacgaagaaaagaacgcttggtgtatgttggtatcagtattgaaaacatcattcctccacaagagccagacttttctgaagatcaagaagaaaagaaaaaagattcaaaaaaatccaaagcaaacttgcttgaaaggaggtcaacaagaacaaggaaatgtataagctacagatttgatgagtttgatgaagcaattgatgaagctattgaagatgacatcaaagaagccgatggaggaggagttggccgaggaaaagatatctccaccatcacaggtcatcgtgggaaagacatctctactattttggatgaagaaagaaaagaaaataaacgaccccagagggcagctgctgctcgaaggaagaaacgccggcgattaaatgatctggacagtgatagcaacctggatgaagaagagagcgaggatgaattcaagatcagtgatggatctcaagatgagtttgttgtgtctgatgaaaacccagatgaaagtgaagaagatccgccatctaatgatgacagtgacactgacttttgtagccgtagactgaggcgacacccctctcggccaatgaggcagagcaggcgtttgcgaagaaagaccccaaagaaaaaatattccgatgatgatgaagaggaggaatctgaggagaatagtagagactctgaaagtgacttcagtgatgattttagtgatgattttgtagaaactcggcgaaggcggtcaaggagaaatcagaaaagacaaattaactacaaagaagactcagaaagtgacggttcccagaagagtttgcgacgtggtaaagaaataaggcgagtacacaagcgaagactttccagctcagagagtgaagagagctatttgtccaagaactctgaagatgatgagctagctaaagaatcaaagcggtcagttcgaaagcggggccgaagcacagacgagtattcagaagcagatgaggaggaggaggaagaggaaggcaaaccatcccgcaaacggctacaccggattgagacggatgaggaggagagttgtgacaatgctcatggagatgcaaatcagcctgcccgtgacagccagcctagggtcctgccctcagaacaagagagcaccaagaagccctaccggatagaaagtgatgaggaagaggactttgaaaatgtaggcaaagtggggagcccattggactatagcttagtggacttaccttcaaccaatggacagagccctggcaaagccattgagaacttgattggcaagcctactgagaagtctcagacccccaaggacaacagcacagccagtgcaagcctagcctccaatgggacaagtggtgggcaggaggcaggagcaccagaagaggaggaagatgagcttttgagagtgactgaccttgttgattatgtctgtaacagtgaacagttataagactttttttccatttttgtgctaatttattccacggtagctctcacaccagcgggccagttattaaaagctgtttaatttttcctagaaaactccactacagaatgacttttagaagaaaaatttcaacaaatcctgaagtctttctgtgaagtgaccagttctgaactttgaagataaataattgctgtaaattccttttgattttctttttccaggttcatggtccttggtaatttcattcatggaaaaaaatcttattataataacaacaaagatttgtatatttttgactttatatttcctgagctctcctgactttgtgaaaaagggtggatgaaaatgcattccgaatctgtgagggcccaaaacagaatttaggggtgggtgaaagcacttgtgctttagctttttcatattaaatatatattatatttaaacattcatggcatagatgatgatttacagacaatttaaaagttcaagtctgtactgttacagtttgagaattgtagataacatcatacataagtcatttagtaacagcctttgtgaaatgaacttgtttactattggagataaccacacttaataaagaagagacagtgaaagtaccatcataattaacctaaatttttgttatagcagagtttcttgtttaaaaaaaaataaaatcatctgaaaagc

SEQ ID NO: 25913 - DNA, 5318 bp, Homo sapiens
  source 1..5318: mol_type = unassigned DNA
ctggtttatcaacttgacgagaatcatttcaaaattttaggaaaaaaatttatgtctcagtaaaactttgtttagaattaggtttttcagtagcaaggataaggtgaagggattaaaaatgtacgtaaaattagtagtcaatgaattctggaatgcagtctgtataatcctattcagagattatgctatttactgaatatagctttggttgtgtttaaatctgcactagtattaggtgctccttaaaagttgaaaatatatagccaataaggtataaagaagaattgacagataaatctaaacagtttctttgtatagtactaacttctgaaatgttcagtggtggcatttgataaagtaagttgtaatatgatcacattgaggaatgttatataattattaaactcaatttttataaaaggcatcattttataaaagtatcataagaaagtgccaatgtttcaatgaataaattgaggcaacatgataccaacttagtgaaaaatatacaagaccagaaggaagtaacctaaaatattactagtgattgcctctgggtaataggatatgggctttttgtctttctatatttttcattttcccactgccgtgttcctggtacctcagtgaaatgaagtgctcagttcttttaacagttgtcagtttttaaaacaaatatagtcttctggaaatgttttaggtagcattttcaattttatgtttttaagccatctcttgaatttgaataaattatttgaactgcataaatatttgcaatccattgagaacaccaaaacaaaaagtaaaaagcagaaacctaaatttttctaaattttttttaatatctagaagttgtatctcaaagtttttgtaattttcttcattgtcagattttattttttactgtcaaatatccaatgacagaggccacctcttttaaaatagaaactttaaatggaaatatacattatactaagtcttatattttatagccttgaaagtttctattcatgtaattaagctttttctgatttttagaggaacagaaagaaagtgaaaagatgaaaagtgaggagcagcctatggatttagaaaaccgttctacagccaatgttctagaagagactactgtgaaaaaagaaaaagaagatgaaaaggaacttgtgaaactgccagtcatagtgaagctagaaaaacctttgccagaaaatgaagaaaaaaagattatcaaagaagaaagtgattccttcaaggaaaatgtcaaacccattaaagttgaggtgaaggaatgtagagcagatcctaaagataccaaaagtagcatggagaagccagtggcacaggagcctgaaaggatcgaatttggtggcaatattaaatcttctcacgaaattactgagaaatctactgaagaaactgagaaacttaaaaatgaccagcaggccaagataccactaaaaaaacgagaaattaaactgagtgatgattttgacagtccagtcaagggacctttgtgtaaatcagttactccaacaaaagagtttttgaaagatgaaataaaacaagaggaagagacttgtaaaaggatctctacaatcactgctttgggtcatgaagggaaacagctggtaaatggagaagttagtgatgaaagggtagctccaaattttaagacagaaccaatagagacaaagttttatgagacaaaggaagagagctatagcccctctaaggacagaaatatcatcacggagggaaatggaacagagtccttaaattctgtcataacaagtatgaaaacaggtgagcttgagaaagaaacagcccctttgaggaaagatgcagatagttcaatatcagtcttagagatccatagtcaaaaagcacaaatagaggaacccgatcctccagaaatggaaacttctcttgattcttctgagatggcaaaagatctctcttcaaaaactgctttatcttccaccgagtcgtgtaccatgaaaggtgaagagaagtctcccaaaactaagaaggataagcgcccaccaatcctagaatgtcttgaaaagttagagaagtccaaaaagacttttcttgataaggacgcacaaagattgagtccaataccagaagaagttccaaagagtactctagagtcagaaaagcctggctctcctgaggcagctgaaacttctccaccatctaatatcattgaccactgtgagaaactagcctcagaaaaagaagtggtagaatgccagagtacaagtactgttggtggccagtctgtgaaaaaagtagacctagaaaccctaaaagaggattctgagttcacaaaggtagaaatggataatctggacaatgcccagacctctggcatagaggagccttctgagacaaagggttctatgcaaaaaagcaaattcaaatataagttggttcctgaagaagaaaccactgcctcagaaaatacagagataacctctgaaaggcagaaagagggcatcaaattaacaatcaggatatcaagtcggaaaaagaagcccgattctccccccaaagttctagaaccagaaaacaagcaagagaagacagaaaaggaagaggagaaaacaaatgtgggtcgtactttaagaagatctccaagaatatctagacccactgcaaaagtggctgagatcagagatcagaaagctgataaaaaaagaggggaaggagaagatgaggtggaagaagagtcaacagctttgcaaaaaactgacaaaaaggaaattttgaaaaaatcagagaaagatacaaattctaaagtaagcaaggtaaaacccaaaggcaaagttcgatggactggttctcggacacgtggcagatggaaatattccagcaatgatgaaagtgaagggtctggcagtgaaaaatcatctgcagcttcagaagaggaggaagaaaaggaaagtgaagaagccatcctagcagatgatgatgaaccatgcaaaaaatgtggccttccaaaccatcctgagctaattcttctgtgtgactcttgcgatagtggataccatactgcctgccttcgccctcctctgatgatcatcccagatggagaatggttctgcccaccttgccaacataaactgctctgtgaaaaattagaggaacagttgcaggatttggatgttgccttaaagaagaaagagcgtgccgaacgaagaaaagaacgcttggtgtatgttggtatcagtattgaaaacatcattcctccacaagagccagacttttctgaagatcaagaagaaaagaaaaaagattcaaaaaaatccaaagcaaacttgcttgaaaggaggtcaacaagaacaaggaaatgtataagctacagatttgatgagtttgatgaagcaattgatgaagctattgaagatgacatcaaagaagccgatggaggaggagttggccgaggaaaagatatctccaccatcacaggtcatcgtgggaaagacatctctactattttggatgaagaaagaaaagaaaataaacgaccccagagggcagctgctgctcgaaggaagaaacgccggcgattaaatgatctggacagtgatagcaacctggatgaagaagagagcgaggatgaattcaagatcagtgatggatctcaagatgagtttgttgtgtctgatgaaaacccagatgaaagtgaagaagatccgccatctaatgatgacagtgacactgacttttgtagccgtagactgaggcgacacccctctcggccaatgaggcagagcaggcgtttgcgaagaaagaccccaaagaaaaaatattccgatgatgatgaagaggaggaatctgaggagaatagtagagactctgaaagtgacttcagtgatgattttagtgatgattttgtagaaactcggcgaaggcggtcaaggagaaatcagaaaagacaaattaactacaaagaagactcagaaagtgacggttcccagaagagtttgcgacgtggtaaagaaataaggcgagtacacaagcgaagactttccagctcagagagtgaagagagctatttgtccaagaactctgaagatgatgagctagctaaagaatcaaagcggtcagttcgaaagcggggccgaagcacagacgagtattcagaagcagatgaggaggaggaggaagaggaaggcaaaccatcccgcaaacggctacaccggattgagacggatgaggaggagagttgtgacaatgctcatggagatgcaaatcagcctgcccgtgacagccagcctagggtcctgccctcagaacaagagagcaccaagaagccctaccggatagaaagtgatgaggaagaggactttgaaaatgtaggcaaagtggggagcccattggactatagcttagtggacttaccttcaaccaatggacagagccctggcaaagccattgagaacttgattggcaagcctactgagaagtctcagacccccaaggacaacagcacagccagtgcaagcctagcctccaatgggacaagtggtgggcaggaggcaggagcaccagaagaggaggaagatgagcttttgagagtgactgaccttgttgattatgtctgtaacagtgaacagttataagactttttttccatttttgtgctaatttattccacggtagctctcacaccagcgggccagttattaaaagctgtttaatttttcctagaaaactccactacagaatgacttttagaagaaaaatttcaacaaatcctgaagtctttctgtgaagtgaccagttctgaactttgaagataaataattgctgtaaattccttttgattttctttttccaggttcatggtccttggtaatttcattcatggaaaaaaatcttattataataacaacaaagatttgtatatttttgactttatatttcctgagctctcctgactttgtgaaaaagggtggatgaaaatgcattccgaatctgtgagggcccaaaacagaatttaggggtgggtgaaagcacttgtgctttagctttttcatattaaatatatattatatttaaacattcatggcatagatgatgatttacagacaatttaaaagttcaagtctgtactgttacagtttgagaattgtagataacatcatacataagtcatttagtaacagcctttgtgaaatgaacttgtttactattggagataaccacacttaataaagaagagacagtgaaagtaccatcataattaacctaaatttttgttatagcagagtttcttgtttaaaaaaaaataaaatcatctgaaaagc

SEQ ID NO: 25914 - DNA, 2409 bp, Homo sapiens
  source 1..2409: mol_type = unassigned DNA
gagactcttgcactcctgaaagcacaaattgatcctgtactattgaaaaactctagccaacaagacaactcttctcgggaaagtcccagcttagaggatgaggagactaaaaaagaggaagaaacacctaaacaagaggaacagaaagaaagtgaaaagatgaaaagtgaggagcagcctatggatttagaaaaccgttctacagccaatgttctagaagagactactgtgaaaaaagaaaaagaagatgaaaaggaacttgtgaaactgccagtcatagtgaagctagaaaaacctttgccagaaaatgaagaaaaaaagattatcaaagaagaaagtgattccttcaaggaaaatgtcaaacccattaaagttgaggtgaaggaatgtagagcagatcctaaagataccaaaagtagcatggagaagccagtggcacaggagcctgaaaggatcgaatttggtggcaatattaaatcttctcacgaaattactgagaaatctactgaagaaactgagaaacttaaaaatgaccagcaggccaagataccactaaaaaaacgagaaattaaactgagtgatgattttgacagtccagtcaagggacctttgtgtaaatcagttactccaacaaaagagtttttgaaagatgaaataaaacaagaggaagagacttgtaaaaggatctctacaatcactgctttgggtcatgaagggaaacagctggtaaatggagaagttagtgatgaaagggtagctccaaattttaagacagaaccaatagagacaaagttttatgagacaaaggaagagagctatagcccctctaaggacagaaatatcatcacggagggaaatggaacagagtccttaaattctgtcataacaagtatgaaaacaggtgagcttgagaaagaaacagcccctttgaggaaagatgcagatagttcaatatcagtcttagagatccatagtcaaaaagcacaaatagaggaacccgatcctccagaaatggaaacttctcttgattcttctgagatggcaaaagatctctcttcaaaaactgctttatcttccaccgagtcgtgtaccatgaaaggtgaagagaagtctcccaaaactaagaaggataagcgcccaccaatcctagaatgtcttgaaaagttagagaagtccaaaaagacttttcttgataaggacgcacaaagattgagtccaataccagaagaagttccaaagagtactctagagtcagaaaagcctggctctcctgaggcagctgaaacttctccaccatctaatatcattgaccactgtgagaaactagcctcagaaaaagaagtggtagaatgccagagtacaagtactgttggtggccagtctgtgaaaaaagtagacctagaaaccctaaaagaggattctgagttcacaaaggtagaaatggataatctggacaatgcccagacctctggcatagaggagccttctgagacaaagggttctatgcaaaaaagcaaattcaaatataagttggttcctgaagaagaaaccactgcctcagaaaatacagagataacctctgaaaggcagaaagagggcatcaaattaacaatcaggatatcaagtcggaaaaagaagcccgattctccccccaaagttctagaaccagaaaacaagcaagagaagacagaaaaggaagaggagaaaacaaatgtgggtcgtactttaagaagatctccaagaatatctagacccactgcaaaagtggctgagatcagagatcagaaagctgataaaaaaagaggggaaggagaagatgaggtggaagaagagtcaacagctttgcaaaaaactgacaaaaaggaaattttgaaaaaatcagagaaagatacaaattctaaagtaagcaaggtaaaacccaaaggcaaagttcgatggactggttctcggacacgtggcagatggaaatattccagcaatgatgaaagtgaagggtctggcagtgaaaaatcatctgcagcttcagaagaggaggaagaaaaggaaagtgaagaagccatcctagcagatgatgatgaaccatgcaaaaaatgtggccttccaaaccatcctgagctaattcttctgtgtgactcttgcgatagtggataccatactgcctgccttcgccctcctctgatgatcatcccagatggagaatggttctgcccaccttgccaacataaactgctctgtgaaaaattagaggaacagttgcaggatttggatgttgccttaaagaagaaagagcgtgccgaacgaagaaaagaacgcttggtgtatgttggtatcagtattgaaaacatcattcctccacaagagccagacttttctgaagatcaagaagaaaagaaaaaagattcaaaaaaa

SEQ ID NO: 25915 - DNA, 2107 bp, Homo sapiens
  source 1..2107: mol_type = unassigned DNA
gcgacggcggcggcagcggcggcggtgatggctcctccgggctgcccgggttcgtgccccaacttcgccgtagtctgctccttcttggagcgctacgggccgctgctagacctgcctgagttgccgttccctgagctggagcgggtgctgcaggcgccgccgccggacgtcggcaacggagaagtaccaaaagaattggtggagctccatttgaagctgatgaggaaaattggcaaatctgttactgcagacagatgggaaaaatatttgatcaagatatgccaagagtttaacagtacctgggcatgggagatggagaagaagggctatcttgaaatgagtgttgaatgcaaactagcactcttaaagtacctctgtgagtgtcagtttgatgacaatctcaaattcaagaatattattaatgaggaggatgccgatactatgcgtctccagccaattggtcgagacaaagatggcctcatgtactggtaccaattggatcaagatcacaatgtcagaatgtacatagaagaacaagatgatcaagatggctcttcatggaaatgcattgtcagaaatcgaaacgagttggctgagactcttgcactcctgaaagcacaaattgatcctgtactattgaaaaactctagccaacaagacaactcttctcgggaaagtcccagcttagaggatgaggagactaaaaaagaggaagaaacacctaaacaagaggaacagaaagaaagtgaaaagatgaaaagtgaggagcagcctatggatttagaaaaccgttctacagccaatgttctagaagagactactgtgaaaaaagaaaaagaagatgaaaaggaacttgtgaaactgccagtcatagtgaagctagaaaaacctttgccagaaaatgaagaaaaaaagattatcaaagaagaaagtgattccttcaaggaaaatgtcaaacccattaaagttgaggtgaaggaatgtagagcagatcctaaagataccaaaagtagcatggagaagccagtggcacaggagcctgaaaggatcgaatttggtggcaatattaaatcttctcacgaaattactgagaaatctactgaagaaactgagaaacttaaaaatgaccagcaggccaagataccactaaaaaaacgagaaattaaactgagtgatgattttgacagtccagtcaagggacctttgtgtaaatcagttactccaacaaaagagtttttgaaagatgaaataaaacaagaggaagagacttgtaaaaggatctctacaatcactgctttgggtcatgaagggaaacagctggtaaatggagaagttagtgatgaaagggtagctccaaattttaagacagaaccaatagagacaaagttttatgagacaaaggaagagagctatagcccctctaaggacagaaatatcatcacggagggaaatggaacagagtccttaaattctgtcataacaagtatgaaaacaggtgagcttgagaaagaaacagcccctttgaggaaagatgcagatagttcaatatcagtcttagagatccatagtcaaaaagcacaaatagaggaacccgatcctccagaaatggaaacttctcttgattcttctgagatggcaaaagatctctcttcaaaaactgctttatcttccaccgagtcgtgtaccatgaaaggtgaagagaagtctcccaaaactaagaaggataagcgcccaccaatcctagaatgtcttgaaaagttagagaagtccaaaaagacttttcttgataaggacgcacaaagattgagtccaataccagaagaagttccaaagagtactctagagtcagaaaagcctggctctcctgaggcagctgaaacttctccaccatctaatatcattgaccactgtgagaaactagcctcagaaaaagaagtggtagaatgccagagtacaagtactgttggtggccagtctgtgaaaaaagtagacctagaaaccctaaaagaggattctgagttcacaaaggtagaaatggataatctggacaatgcccagacctctggcatagaggagccttctgagacaaagggttctatgcaaaaaa

SEQ ID NO: 25916 - DNA, 830 bp, Homo sapiens
  source 1..830: mol_type = unassigned DNA
gaaccatgcaaaaaatgtggccttccaaaccatcctgagctaattcttctgtgtgactcttgcgatagtggataccatactgcctgccttcgccctcctctgatgatcatcccagatggagaatggttctgcccaccttgccaacataaactgctctgtgaaaaattagaggaacagttgcaggatttggatgttgccttaaagaagaaagagcgtgccgaacgaagaaaagaacgcttggtgtatgttggtatcagtattgaaaacatcattcctccacaagagccagacttttctgaagatcaagaagaaaagaaaaaagattcaaaaaaatccaaagcaaacttgcttgaaaggaggtcaacaagaacaaggaaatgtataagctacagatttgatgagtttgatgaagcaattgatgaagctattgaagatgacatcaaagaagccgatggaggaggagttggccgaggaaaagatatctccaccatcacaggtcatcgtgggaaagacatctctactattttggatgaagaaagaaaagaaaataaacgaccccagagggcagctgctgctcgaaggaagaaacgccggcgattaaatgatctggacagtgatagcaacctggatgaagaagagagcgaggatgaattcaagatcagtgatggatctcaagatgagtttgttgtgtctgatgaaaacccagatgaaagtgaagaagatccgccatctaatgatgacagtgacactgacttttgtagccgtagactgaggcgacacccctctcggccaatgaggcagagcaggcgtttgcgaagaaagaccccaaa

SEQ ID NO: 25917 - DNA, 1447 bp, Homo sapiens
  source 1..1447: mol_type = unassigned DNA
gcggatcgctgctccctctcgccatggcgcaggtgctgatcgtgggcgccgggatgacaggaagcttgtgcgctgcgctgctgaggaggcagacgtccggtcccttgtaccttgctgtgtgggacaaggctgaggactcagggggaagaatgactacagcctgcagtcctcataatcctcagtgcacagctgacttgggtgctcagtacatcacctgcactcctcattatgccaaaaaacaccaacgtttttatgatgaactgttagcctatggcgttttgaggcctctaagctcgcctattgaaggaatggtgatgaaagaaggagactgtaactttgtggcacctcaaggaatttcttcaattattaagcattacttgaaagaatcaggtgcagaagtctacttcagacatcgtgtgacacagatcaacctaagagatgacaaatgggaagtatccaaacaaacaggctcccctgagcagtttgatcttattgttctcacaatgccagttcctgagattctgcagcttcaaggtgacatcaccaccttaattagtgaatgccaaaggcagcaactggaggctgtgagctactcctctcgatatgctctgggcctcttttatgaagctggtacgaagattgatgtcccttgggctgggcagtacatcaccagtaatccctgcatacgcttcgtctccattgataataagaagcgcaatatagagtcatcagaaattgggccttccctcgtgattcacaccactgtcccatttggagttacatacttggaacacagcattgaggatgtgcaagagttagtcttccagcagctggaaaacattttgccgggtttgcctcagccaattgctaccaaatgccaaaaatggagacattcacaggttacaaatgctgctgccaactgtcctggccaaatgactctgcatcacaaacctttccttgcatgtggaggggatggatttactcagtccaactttgatggctgcatcacttctgccctatgtgttctggaagctttaaagaattatatttagtgcctatatccttattctctacatgtgtattgggtttttattttcacaattttctgttattgattattttgttttctattttgctaagaaaaattactggaaaattgttcttcacttattatcatttttcatgtggagtataaaatcaattttgtaattttgatagttacaacccatgctagaatggaaattcctcacaccttgcaccttccctacttttctgaattgctatgactactccttgttggaggaaaagtggtacttaaaaaataacaaacgactctctcaaaaaaattacattaaatcacaataacagtttgtgtgccaaaaacttgattatccttatgaaaatttcaattctgaataaagaataatcacattatcaaagccccatc

SEQ ID NO: 25918 - DNA, 3385 bp, Homo sapiens
  source 1..3385: mol_type = unassigned DNA
ttggacttacgtatttctttttattcaagaactctatccaatatatacacattttccttttggcttttgtcatttgtgtctttaagactttgaataatgtttttaaataatattaactttaatctttcatacacctttcagaaatttactatttgtattttgttttgtgtattttgtaacacacaagttgtaaatgattatgtattttctgttcaattccatctttcatttttatgcttaaaaatgtcttcttagtcatatatgcccgtctacattttcttctagttcttttattagatatatctagtattaattcgtcacccatttgatacatggtaatttttttcatgatgtggacatgaagtaaatattctgatttttaaatgtttccattataattggctaccattgtcaattttcttattggttctgatacttattcggtttcttagttttccaggtaataatttatctgcaagtcagcgtaacttaattatttgttttttaatagttcagtattaccattgcctttgttgtttcattgagaacttccagtacaatgtcaggagggggaaaaaaacaacggcaatggcaccaatccttctcttgttgttcatctttatattccttagaacatacggaatgcgttctgacatagaacttattgaagagtaatttggaattttctgatgaatcaactgtctttaatctttacaagtttgaaaggtatacgttattgtttccatttcccagatggagaaattgaggttcaggaaggttacacaaagtcccaggtctaagaaaaatgtctcccagattccaaaagatgtttctattatgctaatagtggccgttcaagcattagaggaaaggttgcccgtggtatcgctggtaaattcttcttcccactttcaaatctagaatagtaaaacagcaaaaatcccaacaggcatgagagttatcgcagtagataggttaagctgcttctctgctgtggtcaacgtcagctctgttgcgaggcgggttctcccaacaatagcccacaccatttccaggcttttctgggcgaggggcagggcgcccggcccccaaagcgagaagacagacagccccggttctccgcagccccaggtttgctcctcaaggacggaggggcctctcagctccggccgcctcctttccgccccctgcaggccggccggaggaaagctcagggcccaggtcggcccagggagcacggaaccaaagagcgctagcgccggttcggccgcctttccagaaagcccgggccgaacggccccgccgcagagactcagcgcggatcgctgctccctctcgccatggcgcaggtgctgatcgtgggcgccgggatgacaggaagcttgtgcgctgcgctgctgaggaggcagacgtccggtcccttgtaccttgctgtgtgggacaaggctgaggactcagggggaagaatgactacagcctgcagtcctcataatcctcagtgcacagctgacttgggtgctcagtacatcacctgcactcctcattatgccaaaaaacaccaacgtttttatgatgaactgttagcctatggcgttttgaggcctctaagctcgcctattgaaggaatggtgatgaaagaaggagactgtaactttgtggcacctcaaggaatttcttcaattattaagcattacttgaaagaatcaggtgcagaagtctacttcagacatcgtgtgacacagatcaacctaagagatgacaaatgggaagtatccaaacaaacaggctcccctgagcagtttgatcttattgttctcacaatgccagttcctgagattctgcagcttcaaggtgacatcaccaccttaattagtgaatgccaaaggcagcaactggaggctgtgagctactcctctcgatatgctctgggcctcttttatgaagctggtacgaagattgatgtcccttgggctgggcagtacatcaccagtaatccctgcatacgcttcgtctccattgataataagaagcgcaatatagagtcatcagaaattgggccttccctcgtgattcacaccactgtcccatttggagttacatacttggaacacagcattgaggatgtgcaagagttagtcttccagcagctggaaaacattttgccgggtttgcctcagccaattgctaccaaatgccaaaaatggagacattcacaggtaccaagtgctggtgtgattctaggatgtgcgaagagcccctggatgatggcgattggatttcccatctgacttcctggaaattggagcacacagtcaggttttatttgatttttttttttaaggataccacttcacagcctttaggatagctattatttagaagcaaaacagaagataaatgttggcaaggatgtggagatattggattcccttgtgcagtgccggtgggaatgtaaaatgatgtagctactatggaaaatgatacggcaatttctttagaaatgaaatatagaattgctgtatgatctgcagttccacatctggatatctatccaaaagaagtgaaagtagggacttgaacgaacatttgtacaccaatgttcacagcggctttattcacaacagccaaaaggtggaagcaacccagtgtccatggatagatgaatagataaataaaatgtggtataaacatacaatgggctattgtttagccttaaaagggaaggaaattctgacatgctgcaatatggatgaagcttaaagtcattatgcaaagtggaataagcctatcacaaaaaataatattacataattctacttatatgaggaatctagagcagtcagtttcacagagacagaaaatagaatggtggttgccaagggctgggagaagagggcaatggagagtgagtgtttagtgggtcagagttttagtttgggaaggtaaaaagttctggagatggatgatggttatgggtgctcaacagtgtgaatgtacttaatgccacagaactgcacatttaaatgtggttaaaatcatcacttttatgttatgtatatttaccacaataaataaagaagttgatatttcttatacttacaaagaggagaagggcatttgcaaatcaacaagaagtgtgaggcccctctctctagcagaaaaatagactaaatctatttctttatcttttaacatcctgtttaagggaaatgccaaaacaaatgggaaaaaatacacacacacaaatatatatgaacatgttttgcctcatgagtaatcaaaatgtgtacatatgtatgtttatgtatgtgtgtttatatttaaaatcgtgttctgccttatgagtaaacaaaaagtatacaaattaaaaactataatgaaacgt

SEQ ID NO: 25919 - DNA, 699 bp, Homo sapiens
  source 1..699: mol_type = unassigned DNA
atggcgcaggtgctgatcgtgggcgccgggatgacaggaagcttgtgcgctgcgctgctgaggaggcagacgtccggtcccttgtaccttgctgtgtgggacaaggctgaggactcaggtgcagaagtctacttcagacatcgtgtgacacagatcaacctaagagatgacaaatgggaagtatccaaacaaacaggctcccctgagcagtttgatcttattgttctcacaatgccagttcctgagattctgcagcttcaaggtgacatcaccaccttaattagtgaatgccaaaggcagcaactggaggctgtgagctactcctctcgatatgctctgggcctcttttatgaagctggtacgaagattgatgtcccttgggctgggcagtacatcaccagtaatccctgcatacgcttcgtctccattgataataagaagcgcaatatagagtcatcagaaattgggccttccctcgtgattcacaccactgtcccatttggagttacatacttggaacacagcattgaggatgtgcaagagttagtcttccagcagctggaaaacattttgccgggtttgcctcagccaattgctaccaaatgccaaaaatggagacattcacaggtaccaagtgctggtgtgattctaggatgtgcgaagagcccctggatgatggcgattggatttcccatctga

SEQ ID NO: 25920 - DNA, 1447 bp, Homo sapiens
  source 1..1447: mol_type = unassigned DNA
ctcagagagagccccagactgagggaagcatggatggatggagaaggatgcctcgctggggactgctgctgctgctctggggctcctgtacctttggtctcccgacagacaccaccacctttaaacggatcttcctcaagagaatgccctcaatccgagaaagcctgaaggaacgaggtgtggacatggccaggcttggtcccgagtggagccaacccatgaagaggctgacacttggcaacaccacctcctccgtgatcctcaccaactacatggacacccagtactatggcgagattggcatcggcaccccaccccagaccttcaaagtcgtctttgacactggttcgtccaatgtttgggtgccctcctccaagtgcagccgtctctacactgcctgtgtgtatcacaagctcttcgatgcttcggattcctccagctacaagcacaatggaacagaactcaccctccgctattcaacagggacagtcagtggctttctcagccaggacatcatcaccgtgggtggaatcacggtgacacagatgtttggagaggtcacggagatgcccgccttacccttcatgctggccgagtttgatggggttgtgggcatgggcttcattgaacaggccattggcagggtcacccctatcttcgacaacatcatctcccaaggggtgctaaaagaggacgtcttctctttctactacaacagagattccgagaattcccaatcgctgggaggacagattgtgctgggaggcagcgacccccagcattacgaagggaatttccactatatcaacctcatcaagactggtgtctggcagattcaaatgaagggggtgtctgtggggtcatccaccttgctctgtgaagacggctgcctggcattggtagacaccggtgcatcctacatctcaggttctaccagctccatagagaagctcatggaggccttgggagccaagaagaggctgtttgattatgtcgtgaagtgtaacgagggccctacactccccgacatctctttccacctgggaggcaaagaatacacgctcaccagcgcggactatgtatttcaggaatcctacagtagtaaaaagctgtgcacactggccatccacgccatggatatcccgccacccactggacccacctgggccctgggggccaccttcatccgaaagttctacacagagtttgatcggcgtaacaaccgcattggcttcgccttggcccgctgaggccctctgccacccaggcaggccctgccttcagccctggcccagagctggaacactctctgagatgcccctctgcctgggcttatgccctcagatggagacattggatgtggagctcctgctggatgcgtgccctgacccctgcaccagcccttccctgctttgaggacaaagagaataaagacttcatgttcaca

SEQ ID NO: 25921 - DNA, 1456 bp, Homo sapiens
  source 1..1456: mol_type = unassigned DNA
agaacctcagtggatctcagagagagccccagactgagggaagcatggatggatggagaaggatgcctcgctggggactgctgctgctgctctggggctcctgtacctttggtctcccgacagacaccaccacctttaaacggatcttcctcaagagaatgccctcaatccgagaaagcctgaaggaacgaggtgtggacatggccaggcttggtcccgagtggagccaacccatgaagaggctgacacttggcaacaccacctcctccgtgatcctcaccaactacatggacacccagtactatggcgagattggcatcggcaccccaccccagaccttcaaagtcgtctttgacactggttcgtccaatgtttgggtgccctcctccaagtgcagccgtctctacactgcctgtgtgtatcacaagctcttcgatgcttcggattcctccagctacaagcacaatggaacagaactcaccctccgctattcaacagggacagtcagtggctttctcagccaggacatcatcaccgtgggtggaatcacggtgacacagatgtttggagaggtcacggagatgcccgccttacccttcatgctggccgagtttgatggggttgtgggcatgggcttcattgaacaggccattggcagggtcacccctatcttcgacaacatcatctcccaaggggtgctaaaagaggacgtcttctctttctactacaacaggaattcccaatcgctgggaggacagattgtgctgggaggcagcgacccccagcattacgaagggaatttccactatatcaacctcatcaagactggtgtctggcagattcaaatgaagggggtgtctgtggggtcatccaccttgctctgtgaagacggctgcctggcattggtagacaccggtgcatcctacatctcaggttctaccagctccatagagaagctcatggaggccttgggagccaagaagaggctgtttgattatgtcgtgaagtgtaacgagggccctacactccccgacatctctttccacctgggaggcaaagaatacacgctcaccagcgcggactatgtatttcaggaatcctacagtagtaaaaagctgtgcacactggccatccacgccatggatatcccgccacccactggacccacctgggccctgggggccaccttcatccgaaagttctacacagagtttgatcggcgtaacaaccgcattggcttcgccttggcccgctgaggccctctgccacccaggcaggccctgccttcagccctggcccagagctggaacactctctgagatgcccctctgcctgggcttatgccctcagatggagacattggatgtggagctcctgctggatgcgtgccctgacccctgcaccagcccttccctgctttgaggacaaagagaataaagacttcatgttcacagcc

SEQ ID NO: 25922 - DNA, 1465 bp, Homo sapiens
  source 1..1465: mol_type = unassigned DNA
agaacctcagtggatctcagagagagccccagactgagggaagcatggatggatggagaaggatgcctcgctggggactgctgctgctgctctggggctcctgtacctttggtctcccgacagacaccaccacctttaaacggatcttcctcaagagaatgccctcaatccgagaaagcctgaaggaacgaggtgtggacatggccaggcttggtcccgagtggagccaacccatgaagaggctgacacttggcaacaccacctcctccgtgatcctcaccaactacatggacacccagtactatggcgagattggcatcggcaccccaccccagaccttcaaagtcgtctttgacactggttcgtccaatgtttgggtgccctcctccaagtgcagccgtctctacactgcctgtgtgtatcacaagctcttcgatgcttcggattcctccagctacaagcacaatggaacagaactcaccctccgctattcaacagggacagtcagtggctttctcagccaggacatcatcaccgtgggtggaatcacggtgacacagatgtttggagaggtcacggagatgcccgccttacccttcatgctggccgagtttgatggggttgtgggcatgggcttcattgaacaggccattggcagggtcacccctatcttcgacaacatcatctcccaaggggtgctaaaagaggacgtcttctctttctactacaacagagatggggagaattcccaatcgctgggaggacagattgtgctgggaggcagcgacccccagcattacgaagggaatttccactatatcaacctcatcaagactggtgtctggcagattcaaatgaagggggtgtctgtggggtcatccaccttgctctgtgaagacggctgcctggcattggtagacaccggtgcatcctacatctcaggttctaccagctccatagagaagctcatggaggccttgggagccaagaagaggctgtttgattatgtcgtgaagtgtaacgagggccctacactccccgacatctctttccacctgggaggcaaagaatacacgctcaccagcgcggactatgtatttcaggaatcctacagtagtaaaaagctgtgcacactggccatccacgccatggatatcccgccacccactggacccacctgggccctgggggccaccttcatccgaaagttctacacagagtttgatcggcgtaacaaccgcattggcttcgccttggcccgctgaggccctctgccacccaggcaggccctgccttcagccctggcccagagctggaacactctctgagatgcccctctgcctgggcttatgccctcagatggagacattggatgtggagctcctgctggatgcgtgccctgacccctgcaccagcccttccctgctttgaggacaaagagaataaagacttcatgttcacagcc

SEQ ID NO: 25923 - DNA, 1388 bp, Homo sapiens
  source 1..1388: mol_type = unassigned DNA
agccgggcgcggctgtgtcagctgagtgacagtcacgggaccgcgaccaactctgtctggcttcctagaggagcaggagggatgagcaagggtctcccagcgcgacaggacatggagaaagagcgagagactctgcaggcctggaaggagcgcgtggggcaggagctggaccgcgtggtggctttctggatggagcactcccacgaccaggagcacgggggcttcttcacgtgccttggccgcgaggggcgggtgtatgatgacctcaagtatgtgtggctgcaggggaggcaggtatggatgtattgtcgcctgtaccgcactttcgagcgcttccgccatgctcagcttctggacgcagcaaaagcaggtggtgagttcttgctgcggtatgcccgggtggcacctcctggcaagaagtgtgcctttgtgctgactcgggacggccgcccggtcaaggtgcagcgaaccatcttcagtgagtgtttctacaccatggccatgaacgagctgtggagagccacaggggaagtgcggtaccagacggaagcggtggagatgatggatcagatcgtccactgggtgcaggaggacgcgtcgggactgggccggccccagctccagggggccccggctgcggagcccatggcggtgcccatgatgctactgaacctggtggagcagctcggggaggcagatgaggagctggcgggcaaatacgcagagctgggggactggtgcgcccggaggattctgcagcacgtgcagagggatggacaagctgtgctggagaatgtgtcagagggtggcaaggaacttcctggctgcctggggagacagcagaacccaggccacacgctggaagccggctggtttctgctccgtcattgcattcggaaaggcgaccccgaacttcgagcccacgtgattgacaagttcctattgttgcccttccactccggatgggaccctgaccacggaggcctcttttacttccaggatgctgataacttctgccccacccagctggagtgggccatgaagctctggtggccacacagtgaagccatgattgccttcctcatgggttacagtgacagtggggaccctgtgctgctgcgcctcttctaccaagtggctgagtacaccttccgccagtttcgcgatcccgagtacggggaatggtttggctacctgagccgagagggcaaggtggccctctccatcaagggaggtcctttcaaaggctgcttccacgtgccgcggtgcctagccatgtgcgaggagatgctgggcgccctgctgagccgccccgcccccgccccctcccccgcccccacccccgcctgccgaggcgcggaataaaggctgagtccgctccacctgcg

SEQ ID NO: 25924 - DNA, 1388 bp, Homo sapiens
  source 1..1388: mol_type = unassigned DNA
gtggagggtcgcggcaggaacaagtgcgggggtcgggctcaaagccccgccccaggcccagcggaaccctgaagaggagggggagggtgagccgggcgcggctgtgtcagctgagtgacagtcacgggaccgcgaccaactctgtctggcttcctagaggagcaggagggatgagcaagggtctcccagcgcgacaggacatggagaaagagcgagagactctgcaggcctggaaggagcgcgtggggcaggagctggaccgcgtggtggctttctggatggagcactcccacgaccaggagcacgggggcttcttcacgtgccttggccgcgaggggcgggtgtatgatgacctcaagtatgtgtggctgcaggggaggcaggtatggatgtattgtcgcctgtaccgcactttcgagcgcttccgccatgctcagcttctggacgcagcaaaagcaggtggtgagttcttgctgcggtatgcccgggtggcacctcctggcaagaagtgtgcctttgtgctgactcgggacggccgcccggtcaaggtgcagcgaaccatcttcagtgagtgtttctacaccatggccatgaacgagctgtggagagccacaggggaagtgcggtaccagacggaagcggtggagatgatggatcagatcgtccactgggtgcaggaggacgcgtcgggactgggccggccccagctccagggggccccggctgcggagcccatggcggtgcccatgatgctactgaacctggtggagcagctcggggaggcagatgaggagctggcgggcaaatacgcagagctgggggactggtgcgcccggaggattctgcagcacgtgcaggccacacgctggaagccggctggtttctgctccgtcattgcattcggaaaggcgaccccgaacttcgagcccacgtgattgacaagttcctattgttgcccttccactccggatgggaccctgaccacggaggcctcttttacttccaggatgctgataacttctgccccacccagctggagtgggccatgaagctctggtggccacacagtgaagccatgattgccttcctcatgggttacagtgacagtggggaccctgtgctgctgcgcctcttctaccaagtggctgagtacaccttccgccagtttcgcgatcccgagtacggggaatggtttggctacctgagccgagagggcaaggtggccctctccatcaagggaggtcctttcaaaggctgcttccacgtgccgcggtgcctagccatgtgcgaggagatgctgggcgccctgctgagccgccccgcccccgccccctcccccgcccccacccccgcctgccgaggcgcggaataaaggctgagtccgctcc

SEQ ID NO: 25925 - DNA, 3569 bp, Homo sapiens
  source 1..3569: mol_type = unassigned DNA
atcctctctgactcctgaatcttctgctccttcctcctcaagcaggttcacccgtacttgtcaaaatggctcaactcctgaatagcatactcagtgtgattgacgtattccacaaatatgccaaagggaatggggactgtgccttactatgcaaggaagagttgaaacaactgctcttggctgagtttggagacatcctccagagaccaaatgacccagagactgtggaaaccatcttgaacctcttagatcaagaccgagatggacatattgattttcatgagtacctcttgttggtgttccagttggtccaagcctgctatcataagctagacaataagtcacatggaggcaggacctcacagcaagaaagggggcaggaaggagcacaagactgtaagttcccaggaaacacaggcagacaacacagacagaggcacgaggaagaaaggcagaactcccaccacagtcagcctgagagacaagacggagattcccaccatggtcagcctgagagacaagacagagattcccaccatggtcagtctgagaaacaagacagagattcccaccacagtcagcctgagagacaagacagagattctcaccacaatcagtctgagagacaagacaaggatttcagctttgatcagtcagagagacaaagtcaagactccagctctggtaaaaaagtgagtcacaaatctaccagtggccaggctaaatggcagggacatatctttgccttaaatcggtgtgaaaaaccaattcaggattctcattatggtcagtctgaaagacatacacaacaatctgaaacacttggacaagcctctcactttaaccagacaaatcaacagaaatcaggctcttattgtggacagtctgagaggctaggtcaggaattaggctgtggtcagacagacagacaaggccagagttcccactacggtcagacggacagacaagaccagagttatcattatggtcagacagacagacaaggccagagttcccactacagtcagacggacagacaaggccagagttcccactacagtcagccagacagacaaggtcagagttcccactatggtcaaatggacagaaaaggccagtgttatcattatgatcagacaaacagacaaggccagggttcccactacagtcaaccaaacagacaaggtcagagttcccactatggtcagccagacacacaagatcagagttctcactatggtcagacagacagacaagaccaaagttctcactatggtcagacagagagacaaggccagagttcccactacagtcagatggaccgacaaggccagggttctcactacggtcagacagacagacaaggccagagttcccactatggtcagccagacagacaaggccagaattcccactatggtcagacagacagacaaggccagagttcccactatggtcagacagacagacaaggccagagttcccactacagtcagccagacaaacaaggccagagttcccactatggtaagatagacagacaagaccagagttatcattatggtcagccagacggacaaggccaaagttcccactatggtcagacagacagacaaggccagagtttccactatggtcagccagacagacaaggccagagttcccactacagtcagatggacagacaaggccagagttcccactatggtcagacagacagacaaggccagagttcccactacggtcagacagacagacaaggccagagctatcattatggtcagacagacagacaaggccagagttcccactatattcaatcacagactggggaaatacaagggcaaaataagtacttccaagggactgaaggaacaagaaaagcctcttatgttgaacaatcaggaagatcagggaggctaagtcaacagactccaggacaggaagggtaccaaaaccagggacagggattccagtctagggactcacagcagaacggccaccaggtatgggagcctgaagaggatagccaacatcaccaacacaaactcttagcacaaatccaacaagaaagaccactttgtcacaaagggagagactggcaatcatgcagtagtgagcagggccacagacaggcccagaccaggcagagtcatggtgaggggctgagccactgggcagaggaagagcagggccatcaaacttgggatagacacagccatgagagtcaggaaggtccatgtgggacacaggacaggcgaacccataaagatgagcagaaccatcagagacgagacagacaaacccatgaacatgagcagagccatcagagacgagacaggcaaacccatgaagacaagcagaaccgtcagagacgagacaggcaaacccatgaagacgagcagaaccatcagagatgagacaggcaaactcatgaagaggatcaaaaccatcagcaacaacataatagacaaaactatgaggagaaagagaggtatcaaggatctcagaatcaaaaatcccaagtgacccacagaagctgtcctaacagagaaaaattccacatgaaagaggatgaccagagccaaggctcacagaaaagacacactgaaccatccttctatccaacccagagcagtgggaggccccaaaccagagaacagcgtggtcaccctgccaagggagctactgttcccaaccccccctatgactatgtgcaagagcagaaatcctacccatactaggctatgtgagcaccagaggtaaagcaacacaaagccaaaaaagaaacctatatgtcgagttcacctttaattcgatttaagagattgagaatgtatttcttccctctatcctctgctgtatctccctgcaaggatgtttttgagtactagcattcacgtaagggcttttggttctttgagcagcaattctagggttttctgattcagtgaaatctaggtggtaaattgggtgaaataatcatatcttaatgttgatcagtttgggtatttaaatcatttcctgctttgccctctgtgtagatgagacctggttgaatcattgaaaggtagaacacttctccctaaagttcagaaacagaaaagatattctgaagatttacattacatccaaggattatactacatctccactcctcaaggaaccctagatttggtgagctttggctcctgtggataaaacatcaggaatttcaagcctcatagtctagactagaatgaaactcagttcaaggctgctacaagagccgagaacatagagtgcatctctgatgtttactacatctcccatgccaggctcttattccacaccagagggactgtccattagtgcctatcactagagctgaatggacccattccaattcaatacctttctagtttctgattatataaaataaagagaaagtatatgtcatatgtttgcaaattccaggggatcaagactattgattcatagctcctaagacctgaaaactcttctcaagaaaatctatgtgcagattatgaattgtattaaaatatctaataaataattgatgagcaata

SEQ ID NO: 25926 - DNA, 2202 bp, Homo sapiens
  source 1..2202: mol_type = unassigned DNA
ctatggtcaaatggacagaaaaggccagtgttatcattatgatcagacaaacagacaaggccagggttcccactacagtcaaccaaacagacaaggtcagagttcccactatggtcagccagacacacaagatcagagttctcactatggtcagacagacagacaagaccaaagttctcactatggtcagacagagagacaaggccagagttcccactacagtcagatggaccgacaaggccagggttctcactacggtcagacagacagacaaggccagagttcccactatggtcagccagacagacaaggccagaattcccactatggtcagacagacagacaaggccagagttcccactatggtcagacagacagacaaggccagagttcccactacagtcagccagacaaacaaggccagagttcccactatggtaagatagacagacaagaccagagttatcattatggtcagccagacggacaaggccaaagttcccactatggtcagacagacagacaaggccagagtttccactatggtcagccagacagacaaggccagagttcccactacagtcagatggacagacaaggccagagttcccactatggtcagacagacagacaaggccagagttcccactacggtcagacagacagacaaggccagagctatcattatggtcagacagacagacaaggccagagttcccactatattcaatcacagactggggaaatacaagggcaaaataagtacttccaagggactgaaggaacaagaaaagcctcttatgttgaacaatcaggaagatcagggaggctaagtcaacagactccaggacaggaagggtaccaaaaccagggacagggattccagtctagggactcacagcagaacggccaccaggtatgggagcctgaagaggatagccaacatcaccaacacaaactcttagcacaaatccaacaagaaagaccactttgtcacaaagggagagactggcaatcatgcagtagtgagcagggccacagacaggcccagaccaggcagagtcatggtgaggggctgagccactgggcagaggaagagcagggccatcaaacttgggatagacacagccatgagagtcaggaaggtccatgtgggacacaggacaggcgaacccataaagatgagcagaaccatcagagacgagacagacaaacccatgaacatgagcagagccatcagagacgagacaggcaaacccatgaagacaagcagaaccgtcagagacgagacaggcaaacccatgaagacgagcagaaccatcagagatgagacaggcaaactcatgaagaggatcaaaaccatcagcaacaacataatagacaaaactatgaggagaaagagaggtatcaaggatctcagaatcaaaaatcccaagtgacccacagaagctgtcctaacagagaaaaattccacatgaaagaggatgaccagagccaaggctcacagaaaagacacactgaaccatccttctatccaacccagagcagtgggaggccccaaaccagagaacagcgtggtcaccctgccaagggagctactgttcccaaccccccctatgactatgtgcaagagcagaaatcctacccatactaggctatgtgagcaccagaggtaaagcaacacaaagccaaaaaagaaacctatatgtcgagttcacctttaattcgatttaagagattgagaatgtatttcttccctctatcctctgctgtatctccctgcaaggatgtttttgagtactagcattcacgtaagggcttttggctcctgtggataaaacatcaggaatttcaagcctcatagtctagactagaatgaaactcagttcaaggctgctacaagagccgagaacatagagtgcatctctgatgtttactacatctcccatgccaggctcttattccacaccagagggactgtccattagtgcctatcactagagctgaatggacccattccaattcaatacctttctagtttctgattatataaaataaagagaaagtatatgtcatatgtttgcaaattccaggggatcaagactattgattcatagctcctaagacctgaaaactcttctcaagaaaatctatgtgcagattatgaattgtattaaaatatctaataaataattgatgagc

SEQ ID NO: 25927 - DNA, 1695 bp, Homo sapiens
  source 1..1695: mol_type = unassigned DNA
ggggcttgcgtggcggcgtcaaggggcggtgcctcgggtggcgggaagaggaggcgcgagaatggaggtggaggccgtctgtggtggcgcgggcgaggtggaggcccaggactctgaccctgcccctgccttcagcaaggcccccggcagcgccggccactacgaactgccgtgggttgaaaaatataggccagtaaagctgaatgaaattgtcgggaatgaagacaccgtgagcaggctagaggtctttgcaagggaaggaaatgtgcccaacatcatcattgcgggccctccaggaaccggcaagaccacaagcattctgtgcttggcccgggccctgctgggcccagcactcaaagatgccatgttggaactcaatgcttcaaatgacaggggcattgacgttgtgaggaataaaattaaaatgtttgctcaacaaaaagtcactcttcccaaaggccgacataagatcatcattctggatgaagcagacagcatgaccgacggagcccagcaagccttgaggagaaccatggaaatctactctaaaaccactcgcttcgcccttgcttgtaatgcttcggataagatcatcgagcccattcagtcccgctgtgcagtcctccggtacacaaagctgaccgacgcccagatcctcaccaggctgatgaatgttatcgagaaggagagggtaccctacactgatgacggcctagaagccatcatcttcacggcccagggagacatgaggcaggcgctgaacaacctgcagtccaccttctcaggatttggcttcattaacagtgagaacgtgttcaaggtctgtgacgagccccacccactgctggtaaaggagatgatccagcactgtgtgaatgccaacattgacgaagcctacaagattcttgctcacttgtggcatctgggctactcaccagaagatatcattggcaacatctttcgagtgtgtaaaactttccaaatggcagaatacctgaaactggagtttatcaaggaaattggatacactcacatgaaaatagcggaaggagtgaactctcttttgcagatggcaggcctcctggcaaggctgtgtcagaagacaatggccccggtggccagttagagcagagacttcactgactgacttacaggtgccctattctgaggtacaggagccgcggctttctgatgggggaaaatgccgccttaggctggagccaacatgactgtcctttaaactccagtggctggccaggcacggtagctcacgcctgtaatcccaacactttgggaggccgaggcaggtggatcacctgaggtcagaagttcaagaccagcctggccaacatggggaaaccctgtctttactaaaaatataaaaattagctgggtgtggtggcgggcacctgtaatcccagctactcgggaggctgtggcaggagaatcgcttgaacccaggaggtggaggttgcagtgagccaagatcacaccattgcactccagcctgggcgacagagtctccatctggggaaaaaaattaaataaataaactcccgtgacttgcatgtttgcttctgggacgtctgtgccccgcaagtgtttgagtttggcctccaccccattgatgcggtgacggggcggaaaggcgcagagaagctgagggcggtctctgatctgtgtgtgggttgacat

SEQ ID NO: 25928 - DNA, 1576 bp, Homo sapiens
  source 1..1576: mol_type = unassigned DNA
gcgagaatggaggtggaggccgtctgtggtggcgcgggcgaggtggaggcccaggactctgaccctgcccctgccttcagcaaggcccccggcagcgccggccactacgaactgccgtgggttgaaaaatataggccagtaaagctgaatgaaattgtcgggaatgaagacaccgtgagcaggctagaggtctttgcaagggaaggaaatgtgcccaacatcatcattgcgggccctccaggaaccggcaagaccacaagcattctgtgcttggcccgggccctgctgggcccagcactcaaagatgccatgttggaactcaatgcttcaaatgacagcatgaccgacggagcccagcaagccttgaggagaaccatggaaatctactctaaaaccactcgcttcgcccttgcttgtaatgcttcggataagatcatcgagcccattcagtcccgctgtgcagtcctccggtacacaaagctgaccgacgcccagatcctcaccaggctgatgaatgttatcgagaaggagagggtaccctacactgatgacggcctagaagccatcatcttcacggcccagggagacatgaggcaggcgctgaacaacctgcagtccaccttctcaggatttggcttcattaacagtgagaacgtgttcaaggtctgtgacgagccccacccactgctggtaaaggagatgatccagcactgtgtgaatgccaacattgacgaagcctacaagattcttgctcacttgtggcatctgggctactcaccagaagatatcattggcaacatctttcgagtgtgtaaaactttccaaatggcagaatacctgaaactggagtttatcaaggaaattggatacactcacatgaaaatagcggaaggagtgaactctcttttgcagatggcaggcctcctggcaaggctgtgtcagaagacaatggccccggtggccagttagagcagagacttcactgactgacttacaggtgccctattctgaggtacaggagccgcggctttctgatgggggaaaatgccgccttaggctggagccaacatgactgtcctttaaactccagtggctggccaggcacggtagctcacgcctgtaatcccaacactttgggaggccgaggcaggtggatcacctgaggtcagaagttcaagaccagcctggccaacatggggaaaccctgtctttactaaaaatataaaaattagctgggtgtggtggcgggcacctgtaatcccagctactcgggaggctgtggcaggagaatcgcttgaacccaggaggtggaggttgcagtgagccaagatcacaccattgcactccagcctgggcgacagagtctccatctggggaaaaaaattaaataaataaactcccgtgacttgcatgtttgcttctgggacgtctgtgccccgcaagtgtttgagtttggcctccaccccattgatgcggtgacggggcggaaaggcgcagagaagctgagggcggtctctgatctgtgtgtgggttgacattttagctaataaagccttgcagtgtttgttggcaataa

SEQ ID NO: 25929 - DNA, 2402 bp, Homo sapiens
  source 1..2402: mol_type = unassigned DNA
tttacgcggccgcgaccggtagtgacgtcacgagatttggagctcgcgggaaaacttgtctctgcgttgtggggaggacgcgcgctcgcgcgggattttcaagcgtaggcccccgggaactcgagctgccatgagcctctgggtggacaagtatcggccctgctccttgggacggctggactatcacaaggagcaggcggcccagctgcggaacctggtgcagtgtggtgactttcctcatctgttagtgtacggaccatcaggtgctggaaaaaagacaagaattatgtgtattctacgtgaactttatggtgttggagtggaaaaattgagaattgaacatcagaccatcacaactccatctaaaaaaaaaattgaaattagcaccattgcaagtaactaccaccttgaagttaatcctagtgatgctggaaatagtgaccgagtagtcattcaggagatgttgaaaacagtggcacaatcacaacaacttgaaacaaactctcaaagggattttaaagtggtattattgacagaagttgacaaactcaccaaagatgctcagcatgccttgcgaagaaccatggaaaaatatatgtctacctgcagattgatcttgtgctgcaattctacatctaaagtgatcccacctattcgtagtaggtgcttggcggttcgtgtgcctgctcccagcattgaagatatttgccacgtgttatctactgtgtgtaagaaggaaggtctgaatcttccttcacaactggctcatagacttgcagagaagtcttgtagaaatctcagaaaagccctgcttatgtgtgaagcctgcagagtgcaacaatatccttttactgcagatcaagaaatccctgagacagattgggaggtgtatctgagggagactgcaaatgctattgtcagtcagcaaactccacaaaggctccttgaagttcgtggaaggctgtatgagcttctaactcattgtattcctcctgagataataatgaagggccttctctcagaactgttacataattgtgatggacaactgaaaggggaggtggcacaaatggcagcttactatgagcatcgtctacagctgggtagcaaagccatttatcacttggaagcgtttgtggccaaattcatggcactttataagaagttcatggaggatggattggaaggcatgatgttctgacttctgtcagttattcttgcaaagatttctcagtatcagtatttacatacagcttatattaaaagagctgtgggtaaattaactgaacttaatcatgtcgtatttgcgtttttttggtaataacttctctgtgaactattaatcatcctctgagttaaataattgctcctatactattgaagtatgtagttttgtacataacttagagactttagagtctaagaaaatgatcttaatttactttaagcattggttattcaagtattcattgttgatcctcctattctcttccgtctaatctctcacctgctaaaggagatttacacattagaaagcaaagattattttcatttatccagatgaccattttctgccacaggtaacatgattgtttgacacaccattatatttaattctagtttctctcaatgaataattgtatttttgtaggaaatgtaagatttcattctgaaacataattattggtatggacaaaattgcagataccatttctgttgaggctgcagatttccaacttttatttcagtggttcagattagtattaggtcggtactaagaaataagcatgttttcactaatttaagtacttgagactcttgaagaaaattcagaatgaagttctggagaaaggtatgttactgtagtaattactctttgaacaggttttgtgttttgtcattagctctgccctttttaattaaatattttggttcatggaccaaagggtttacttgacaaatttgtgtgacagactccgaacaattcctttactacgaagtataatttataaaataaaatatacccattttaagggtacagtttgatttttgaccagtgaaactatgatcccaatcaaggtatagatgccgtcaccccaaaaagttccctccatatccctttgcagtcagttcatccctaccctggcccagatgatcactgatcttgtcattatagatgagttttgccagttcaagaatttaatggaatcagatattgtaagcattcttgtgtaatacttcattctctctcattattgagattcatccatattgttgaatgtttcactagttaatgtttattgttcaatatttttgtatatacttttaaagcctattcacttgctgatggatctttggtttgtttccaggtttggttattatgaataaagttgctgtgaata

SEQ ID NO: 25930 - DNA, 1461 bp, Homo sapiens
  source 1..1461: mol_type = unassigned DNA
agtgacgtcacgagatttggagctcgcgggaaaacttgtctctgcgttgtggggaggacgcgcgctcgcgcgggattttcaagcgtaggcccccgggaactcgagctgccatgagcctctgggtggacaagtatcggccctgctccttgggacggctggactatcacaaggagcaggcggcccagctgcggaacctggtgcagtgtggtgactttcctcatctgttagtgtacggaccatcaggtgctggaaaaaagacaagaattatgtgtattctacgtgaactttatggtgttggagtggaaaaattgagaattgaacatcagaccatcacaactccatctaaaaaaaaaattgaaattagcaccattgcaagtaactaccaccttgaagttaatcctagtgatgctggaaatagtgaccgagtagtcattcaggagatgttgaaaacagtggcacaatcacaacaacttgaaacaaactctcaaagggattttaaagtggtattattgacagaagttgacaaactcaccaaagatgctcagcatgccttgcgaagaaccatggaaaaatatatgtctacctgcagattgatcttgtgctgcaattctacatctaaagtgatcccacctattcgtagtaggtgcttggcggttcgtgtgcctgctcccagcattgaagatatttgccacgtgttatctactgtgtgtaagaaggaaggtctgaatcttccttcacaactggctcatagacttgcagagaagtcttgtagaaatctcagaaaagccctgcttatgtgtgaagcctgcagagtgcaacaatatccttttactgcagatcaagaaatccctgagacagattgggaggtgtatctgagggagactgcaaatgctattgtcagtcagcaaactccacaaaggctccttgaagttcgtggaaggctgtatgagcttctaactcattgtattcctcctgagataataatgaaggcatgtaaggaggaatcaagaagctgtgacatattctgaggacctccaaagaacaacttgctactgactggacttctctcatcttttagcatgtgaagttttgcaaatataatccactttgctctgaatgtcctgacacctgcttcagagctcaagattcagactccagcctgaatgttatttcctgagaaaatccctccctgacccactgtgctggttaggtccacctgctaatcacatccacaaaaccctctgcttctccttcaaaacactcatctcctctgtaatgatcagatgaactcatgtctttctcagaggacaataaatttgatgaatggggaccatggaagtttatttccatctgtatccctacatctaactcatctgctggtacctatttgtcatgtatttaataagtacaactacctatgccaccctgcaataaaatgatattgttactttctcttcttta

SEQ ID NO: 25931 - DNA, 1384 bp, Homo sapiens
  source 1..1384: mol_type = unassigned DNA
accggcgtattcccgccctgcttttcgcccgccgttccgtggcgggaactgaggcgactgtggggacatcagtgatcgtaagtctcctgggcccgttattctcagattaggtgacggagctaagacttcgagaccatctcgtcctttttgtatcgcggaaacctgaggaacgagccggcggcggtgacctgcacgagaagccaggctaactgggtgaagtaccatgcaagcatttcttaaaggtacatccatcagtactaaacccccgctgaccaaggatcgaggagtagctgccagtgcgggaagtagcggagagaacaagaaagccaaacccgttccctgggtggaaaaatatcgcccaaaatgtgtggatgaagttgctttccaggaagaagtggttgcagtgctgaaaaaatctttagaaggagcagatcttcctaatctcttgttttacggaccacctggaactggaaaaacatccactattttggcagcagctagagaactctttgggcctgaacttttccgattaagagttcttgagttaaatgcatctgatgaacgtggaatacaagtagttcgagagaaagtgaaaaattttgctcaattaactgtgtcaggaagtcgctcagatgggaagccgtgtccgccttttaagattgtgattctggatgaagcagattctatgacctcagctgctcaggcagctttaagacgtaccatggagaaggagtcgaaaaccacccgattctgtcttatctgtaactatgtcagtcgaataattgaacccctgacctctagatgttcaaaattccgcttcaagcctctgtcagataaaattcaacagcagcgattactagacattgccaagaaggaaaatgtcaaaattagtgatgagggaatagcttatcttgttaaagtgtcagaaggagacttaagaaaagccattacatttcttcaaagcgctactcgattaacaggtggaaaggagatcacagagaaagtgattacagacattgccggggtaataccagctgagaaaattgatggagtatttgctgcctgtcagagtggctcttttgacaaactagaagctgtggtcaaggatttaatagatgagggtcatgcagcaactcagctcgtcaatcaactccatgatgtggttgtagaaaataacttatctgataaacagaagtctattatcacagaaaaacttgccgaagttgacaaatgcctagcagatggtgctgatgaacatttgcaactcatcagcctttgtgcaactgtgatgcagcagttatctcagaattgttaacgtgaatatatctggatggggggttttgtaaataatgaagttgtaataaaaataaaatgaccaaaagca

SEQ ID NO: 25932 - DNA, 1448 bp, Homo sapiens
  source 1..1448: mol_type = unassigned DNA
cgcgctcacgtctgaagtgggagcaatgcaccgggacagggacacctcctaggccatgcctgttccagtccagttctgcctgaaagtccggctggctcatcacctgcctaaataaaaccgtatacgggcaaactccctccgcaagcagcgcgccccagcaccggaagtgacgcgttacgtgcccgcgtattcctaccggcgtattcccgccctgcttttcgcccgccgttccgtggcgggaactgaggcgactgtggggacatcagtgatcggtgaagtaccatgcaagcatttcttaaaggtacatccatcagtactaaacccccgctgaccaaggatcgaggagtagctgccagtgcgggaagtagcggagagaacaagaaagccaaacccgttccctgggtggaaaaatatcgcccaaaatgtgtggatgaagttgctttccaggaagaagtggttgcagtgctgaaaaaatctttagaaggagcagatcttcctaatctcttgttttacggaccacctggaactggaaaaacatccactattttggcagcagctagagaactctttgggcctgaacttttccgattaagagttcttgagttaaatgcatctgatgaacgtggaatacaagtagttcgagagaaagtgaaaaattttgctcaattaactgtgtcaggaagtcgctcagatgggaagccgtgtccgccttttaagattgtgattctggatgaagcagattctatgacctcagctgctcaggcagctttaagacgtaccatggagaaggagtcgaaaaccacccgattctgtcttatctgtaactatgtcagtcgaataattgaacccctgacctctagatgttcaaaattccgcttcaagcctctgtcagataaaattcaacagcagcgattactagacattgccaagaaggaaaatgtcaaaattagtgatgagggaatagcttatcttgttaaagtgtcagaaggagacttaagaaaagccattacatttcttcaaagcgctactcgattaacaggtggaaaggagatcacagagaaagtgattacagacattgccggggtaataccagctgagaaaattgatggagtatttgctgcctgtcagagtggctcttttgacaaactagaagctgtggtcaaggatttaatagatgagggtcatgcagcaactcagctcgtcaatcaactccatgatgtggttgtagaaaataacttatctgataaacagaagtctattatcacagaaaaacttgccgaagttgacaaatgcctagcagatggtgctgatgaacatttgcaactcatcagcctttgtgcaactgtgatgcagcagttatctcagaattgttaacgtgaatatatctggatggggggttttgtaaataatgaagttgtaataaaaataaaatgaccaaaagcaccttt

SEQ ID NO: 25933 - DNA, 560 bp, Homo sapiens
  source 1..560: mol_type = unassigned DNA
agatttctaagtggggctcaggaattataatagatgtccacagctgcatggtcttctctctccacaacacgcagacactattagaagtaaaagccacgtgtcctcaagagggcaaggcaaagcatcttcagatgtctctgcccttaaagcacacgcgttctgctctgcgacgaagcaggacaaggaggacagggacctgcacctccggaggcccgcacctacgaagatagcgggctcgggaccttcggtggaccggcagggttccagaggcccgcgcgccgccgccccgccctcattgctgagcctgccagattaggtgacggagctaagacttcgagaccatctcgtcctttttgtatcgcggaaacctgaggaacgagccggcggcggtgacctgcacgagaagccaggctaactgggtgaagtaccatgcaagcatttcttaaaggtacatccatcagtactaaacccccgctgaccaaggatcgaggagtagctgccagtgcgggaagtagcggagagaacaagaaagccaaacccgttccctgggtggaaaaata

SEQ ID NO: 25934 - DNA, 701 bp, Homo sapiens
  source 1..701: mol_type = unassigned DNA
gccgttccgtggcgggaactgaggcgactgtggggacatcagtgatcggtgaagtaccatgcaagcatttcttaaaggtacatccatcagtactaaacccccgctgaccaaggatcgaggagtagctgccagtgcgggaagtagcggagagaacaagaaagccaaacccgttccctgggtggaaaaatatcgcccaaaatgtgtggatgaagttgctttccaggaagaagtggttgcagtgctgaaaaaatctttagaaggagcagatcttcctaatctcttgttttacggaccacctggaactggaaaaacatccactattttggcagcagctagagaactctttgggcctgaacttttccgattaagagttcttgagttaaatgcatctgatgaacgtggaatacaagtagttcgagagaaagtgaaaaattttgctcaattaactgtgtcaggaagtcgctcagatgggaagccgtgtccgccttttaagattgtgattctggatgaagcagattctatgacctcagctgctcaggcagctttaagacgtaccatggagaaggagtcgaaaaccacccgattctgtcttatctgtaactatgtcagtcgaataattgaacccctgacctctagatgttcaaaattccgcttcaagcctctgtcagataaaattcaacagcagcgattactagacattg

SEQ ID NO: 25935 - DNA, 485 bp, Homo sapiens
  source 1..485: mol_type = unassigned DNA
tttgtatcgcggaaacctgaggaacgagccggcggcggtgacctgcacgagaagccaggctaactgagtcccccaccttcccttccccacagaaagtctctgaagggtgaagtaccatgcaagcatttcttaaaggtacatccatcagtactaaacccccgctgaccaaggatcgaggagtagctgccagtgcgggaagtagcggagagaacaagaaagccaaacccgttccctgggtggaaaaatatcgcccaaaatgtgtggatgaagttgctttccaggaagaagtggttgcagtgctgaaaaaatctttagaaggagcagatcttcctaatctcttgttttacggaccacctggaactggaaaaacatccactattttggcagcagctagagaactctttgggcctgaacttttccgattaagagttcttgagttaaatgcatctgatgaacgtggaatacaagtagttcgagagaaagtg

SEQ ID NO: 25936 - DNA, 785 bp, Homo sapiens
  source 1..785: mol_type = unassigned DNA
cgcgctcacgtctgaagtgggagcaatgcaccgggacagggacacctcctaggccatgcctgttccagtccagttctgcctgaaagtccggctggctcatcacctgcctaaataaaaccgtatacgggcaaactccctccgcaagcagcgcgccccagcaccggaagtgacgcgttacgtgcccgcgtattcctaccggcgtattcccgccctgcttttcgcccgccgttccgtggcgggaactgaggcgactgtggggacatcagtgatcggtgaagtaccatgcaagcatttcttaaaggtacatccatcagtactaaacccccgctgaccaaggatcgaggagtagctgccagtgcgggaagtagcggagagaacaagaaagccaaacccgttccctgggtggaaaaatatcgcccaaaatgtgtggatgaagttgctttccaggaagaagtggttgcagtgctgaaaaaatctttagaaggagcagatcttcctaatctcttgttttacggaccacctggaactggaaaaacatccactattttggcagcagctagagaactctttgggcctgaacttttccgattaagagttcttgagttaaatgcatctgatgaacgtggaatacaagtagttcgagagaaagtgaaaaattttgctcaattaactgtgtcaggaagtcgctcagatgggaagccgtgtccgccttttaagattgtgattctggatgaagcagattctatgacctcagctgctcaggcagctttaagacgtaccatgga

SEQ ID NO: 25937 - DNA, 453 bp, Homo sapiens
  source 1..453: mol_type = unassigned DNA
tcctttattatgtaacatctttgcacaaggctaagtttattttcgggctgtactttctcataatggttccccaccaccacccccgctttcctatggtgctgattcgcaataaaagtttcaataaaagctttttttttctgtcttgcacctgaccagggtgaagtaccatgcaagcatttcttaaaggtacatccatcagtactaaacccccgctgaccaaggatcgaggagtagctgccagtgcgggaagtagcggagagaacaagaaagccaaacccgttccctgggtggaaaaatatcgcccaaaatgtgtggatgaagttgctttccaggaagaagtggttgcagtgctgaaaaaatctttagaaggagcagatcttcctaatctcttgttttacggaccacctggaactggaaaaacatccactattttggcagcagctagagaactct

SEQ ID NO: 25938 - DNA, 2229 bp, Homo sapiens
  source 1..2229: mol_type = unassigned DNA
gagagttgcttttgcgcgcgaactgtaagtgccagggtctcagggtcaggtcgcggctggtcactgtgcaggcgcttgggtgacgcgacgatctcagcggatctggtcaccttcgtctccccgccatggagacctcagcactcaagcagcaggagcagcccgcggcgaccaagatcaggaacctgccctgagacagggtctcgctctgtcgcccatgctggagcgcagtggtgtgatcacagctcagtgtaacctcaaacattggggttcaagccattctcctgcctcagcctccgaagaactgggacttttagagggttgaaaaataccggccacagaccctgaatgatctcatttctcatcaggacattctgagtaccattcagaagtttatcaatgaagaccgactgccacacttgcttctctacggtcccccagggacaggcaagacatctaccatcctagcctgtgcgaaacagctatataaagacaaagaatttggctccatggtcttggagctgaatgcttcagatgaccgaggaatagacatcattcgaggaccgatcctgagctttgctagcacaaggacaatatttaagaaaggctttaagctagtgatcttggatgaagcagacgccatgactcaggacgcccagaatgccttgagaagagtaattgagaaattcacagaaaataccagattctgcctcatctgtaactatctgtcaaagatcatccctgccttgcagtcccgctgcacgaggtttcggttcggtcccctgactcctgaactcatggttccccgcctggaacatgtcgtggaagaagagaaagttgatataagtgaagatggaatgaaagcactagtcactctttccagtggagacatgcgtagggctctgaacattttgcagagcaccaatatggcctttgggaaggtgacagaggagactgtctacacctgcaccgggcacccgctcaagtcagacattgccaacatcctggactggatgttgaatcaagatttcaccacagcctacagaaatattacagagttgaaaactctgaaggggttggcactgcatgatatcctgacagagatacacttgtttgtgcatagagttgactttccatcttcagttcgaatacatttattgaccaaaatggcagacattgagtacaggctttctgttggcaccaacgagaagatccagctgagctccctcattgctgcatttcaagtcaccagagacctgattgttgcagaggcctagatgctctgagggccattcacaattctcagggctcagcagtgatgggagaacagaggacagttccaggataaactgctgcctggggctgtgggatgaatcagtcaccccgaatcttggaaaaacccccttccaggagaggatgggcaggcatttaaaaagtaccatttttgtggttgtttggagcagggatgtacaaaataattttaatgtattaactcatactgcctgtcttttataggggaaaaaaataaccttttttattttaaagttataaggtttttaccttttagttgcttggatgacagggaattagcctaccccattttggtctggaacagaagactttcaaatttaatatggtccaagtgtcttcctactcaaggtaaacattatctccaaaattacatttatgattctaatatttggcattgtgtctgtatctaatttaaacagatgttaatggacgtctggccgaaactattatacttttataagatgagctgaatcctcttactttaaaaactggtctttttatttaccctctgtggtagaagagtcaccagcaggttccaaattgatgtgtatgataggaaaaaaaccttaattttaaatataatatagagccttaaactatgccactgggtggcagaggctgtataaaacgcacttgttttcatgcaggagcggggcaagtaaggttgagcctgactgtaaacctagaactgcggaaggactgggacttttgtacaaatttcacatttattttacagcaatcatgctgcatttgtgttagtgttctttataataaaaaacaaagcagcctcctggctggctgtgttacaagtgactcttccttagacagctagaaagatgctgactttgtcaaacttgcatttatatgaaaaccttctgtctctaatatcacagaataaactttctttagatgctgttcttt

SEQ ID NO: 25939 - DNA, 2442 bp, Homo sapiens
  source 1..2442: mol_type = unassigned DNA
gaactgtaagtgccagggtctcagggtcaggtcgcggctggtcactgtgcaggcgcttgggtgacgcgacgatctcagcggatctggtcaccttcgtctccccgccatggagacctcagcactcaagcagcaggagcagcccgcggcgaccaagatcaggaacctgccctgagacagggtctcgctctgtcgcccatgctggagcgcagtggtgtgatcacagctcagtgtaacctcaaacattggggttcaagccattctcctgcctcagcctccgaagaactgggacttttagaggcgagctaccaagcccatcctgtaaccattttaaaatgtacaattcagtggcattaagtacattcagaatgcagtgtactgttgtggagtcttcccgctatctagttccaaaatttcatcaccccaaatggaaatcctttacccattgacagttactccccattctccccttcctctagcccctggcaaccactaatctgctttctatctatggatttgcctattctggacatttcatggttgaaaaataccggccacagaccctgaatgatctcatttctcatcaggacattctgagtaccattcagaagtttatcaatgaagaccgactgccacacttgcttctctacggtcccccagggacaggcaagacatctaccatcctagcctgtgcgaaacagctatataaagacaaagaatttggctccatggtcttggagctgaatgcttcagatgaccgaggaatagacatcattcgaggaccgatcctgagctttgctagcacaaggacaatatttaagaaaggctttaagctagtgatcttggatgaagcagacgccatgactcaggacgcccagaatgccttgagaagagtaattgagaaattcacagaaaataccagattctgcctcatctgtaactatctgtcaaagatcatccctgccttgcagtcccgctgcacgaggtttcggttcggtcccctgactcctgaactcatggttccccgcctggaacatgtcgtggaagaagagaaagttgatataagtgaagatggaatgaaagcactagtcactctttccagtggagacatgcgtagggctctgaacattttgcagagcaccaatatggcctttgggaaggtgacagaggagactgtctacacctgcaccgggcacccgctcaagtcagacattgccaacatcctggactggatgttgaatcaagatttcaccacagcctacagaaatattacagagttgaaaactctgaaggggttggcactgcatgatatcctgacagagatacacttgtttgtgcatagagttgactttccatcttcagttcgaatacatttattgaccaaaatggcagacattgagtacaggctttctgttggcaccaacgagaagatccagctgagctccctcattgctgcatttcaagtcaccagagacctgattgttgcagaggcctagatgctctgagggccattcacaattctcagggctcagcagtgatgggagaacagaggacagttccaggataaactgctgcctggggctgtgggatgaatcagtcaccccgaatcttggaaaaacccccttccaggagaggatgggcaggcatttaaaaagtaccatttttgtggttgtttggagcagggatgtacaaaataattttaatgtattaactcatactgcctgtcttttataggggaaaaaaataaccttttttattttaaagttataaggtttttaccttttagttgcttggatgacagggaattagcctaccccattttggtctggaacagaagactttcaaatttaatatggtccaagtgtcttcctactcaaggtaaacattatctccaaaattacatttatgattctaatatttggcattgtgtctgtatctaatttaaacagatgttaatggacgtctggccgaaactattatacttttataagatgagctgaatcctcttactttaaaaactggtctttttatttaccctctgtggtagaagagtcaccagcaggttccaaattgatgtgtatgataggaaaaaaaccttaattttaaatataatatagagccttaaactatgccactgggtggcagaggctgtataaaacgcacttgttttcatgcaggagcggggcaagtaaggttgagcctgactgtaaacctagaactgcggaaggactgggacttttgtacaaatttcacatttattttacagcaatcatgctgcatttgtgttagtgttctttataataaaaaacaaagcagcctcctggctggctgtgttacaagtgactcttccttagacagctagaaagatgctgactttgtcaaacttgcatttatatgaaaaccttctgtctctaatatcacagaataaactttctttagatgctg

SEQ ID NO: 25940 - DNA, 559 bp, Homo sapiens
  source 1..559: mol_type = unassigned DNA
agagttgcttttgcgcgcgaactgtaagtgccagggtctcagggtcaggtcgcggctggtcactgtgcaggcgcttgggtgacgcgacgatctcagcggatctggtcaccttcgtctccccgccatggagacctcagcactcaagcagcaggagcagcccgcggcgaccaagatcaggaacctgccctgcccctggcaaccactaatctgctttctatctatggatttgcctattctggacatttcatggttgaaaaataccggccacagaccctgaatgatctcatttctcatcaggacattctgagtaccattcagaagtttatcaatgaagaccgactgccacacttgcttctctacggtcccccagggacaggcaagacatctaccatcctagcctgtgcgaaacagctatataaagacaaagaatttggctccatggtcttggagctgaatgcttcagatgaccgaggaatagacatcattcgaggaccgatcctgagctttgctagcacaaggacaatatttaagaaaggctttaagctagtgatcttggatg

SEQ ID NO: 25941 - DNA, 1655 bp, Homo sapiens
  source 1..1655: mol_type = unassigned DNA
gcttttgcgcgcgaactgtaagtgccagggtctcagggtcaggtcgcggctggtcactgtgcaggcgcttgggtgacgcgacgatctcagcggatctggtcaccttcgtctccccgccatggagacctcagcactcaagcagcaggagcagcccgcggcgaccaagatcaggaacctgccctgggttgaaaaataccggccacagaccctgaatgatctcatttctcatcaggacattctgagtaccattcagaagtttatcaatgaagaccgactgccacacttgcttctctacggtcccccagggacaggcaagacatctaccatcctagcctgtgcgaaacagctatataaagacaaagaatttggctccatggtcttggagctgaatgcttcagatgaccgaggaatagacatcattcgaggaccgatcctgagctttgctagcacaaggacaatatttaagaaaggctttaagctagtgatcttggatgaagcagacgccatgactcaggacgcccagaatgccttgagaagagtaattgagaaattcacagaaaataccagattctgcctcatctgtaactatctgtcaaagatcatccctgccttgcagtcccgctgcacgaggtttcggttcggtcccctgactcctgaactcatggttccccgcctggaacatgtcgtggaagaagagaaagttgatataagtgaagatggaatgaaagcactagtcactctttccagtggagacatgcgtagggctctgaacattttgcagagcaccaatatggcctttgggaaggtgacagaggagactgtctacacctgcaccgggcacccgctcaagtcagacattgccaacatcctggactggatgttgaatcaagatttcaccacagcctacagaaatattacagagttgaaaactctgaaggggttggcactgcatgatatcctgacagagatacacttgtttgtgcatagagttgactttccatcttcagttcgaatacatttattgaccaaaatggcagacattgagtacaggctttctgttggcaccaacgagaagatccagctgagctccctcattgctgcatttcaagtcaccagagacctgattgttgcagaggcctagatgctctgagggccattcacaattctcagggctcagcagtgatgggagaacagaggacagttccaggataaactgctgcctggggctgtgggatgaatcagtcaccccgaatcttggaaaaacccccttccaggagaggatgggcaggcatttaaaaagtaccatttttgtggttgtttggagcagggatgtacaaaataattttaatgtattaactcatactgcctgtcttttataggggaaaaaaataaccttttttattttaaagttataaggtttttaccttttagttgcttggatgacagggaattagcctaccccattttggtctggaacagaagactttcaaatttaatatggtccaagtgtcttcctactcaaggtaaacattatctccaaaattacatttatgattctaatatttggcattgtgtctgtatctaatttaaacagatgttaatggacgtctggccgaaactattatacttttataagatgagctgaatcctcttac

SEQ ID NO: 25942 - DNA, 574 bp, Homo sapiens
  source 1..574: mol_type = unassigned DNA
aagtgccagggtctcagggtcaggtcgcggctggtcactgtgcaggcgcttgggtgacgcgacgatctcagcggatctggtcaccttcgtctccccgccatggagacctcagcactcaagcagcaggagcagcccgcggcgaccaagatcaggaacctgccctgagacagggtctcgctctgtcgcccatgctggagcgcagtggtgtgatcacagctcagtgtaacctcaaacattggggttcaagccattctcctgcctcagcctccgaagaactgggacttttagaggcgagctaccaagcccatcctgtaaccattttaaaatcccctggcaaccactaatctgctttctatctatggatttgcctattctggacatttcatggttgaaaaataccggccacagaccctgaatgatctcatttctcatcaggacattctgagtaccattcagaagtttatcaatgaagaccgactgccacacttgcttctctacggtcccccagggacaggcaagacatctaccatcctagcctgtgcgaaacagctatataaagacaaagaatttggct

SEQ ID NO: 25943 - DNA, 1237 bp, Homo sapiens
  source 1..1237: mol_type = unassigned DNA
gttctgtggttttccgctattcccccagacccgcaccttctcggcctctttgcggagaatcgtgaccaagatgtggaacagtaatgatgggggtgcggggtggaggaggaagagaatcgcaggaggttttagcaagagggcgagcctagggtccgagaggcgtgtggtagcgggagaggaagggcgggagcggagctggggcgtttgggggtcacccgcaggaaggcggcgaggaaggttagggagactcgggcagtgtttgaaggggcgaagcctccgggagcctgcgggtttctcggaggcgtgggacgtggcacaggcactaatcctgttgttcaaaacaggtggattcgaaagctatggcagctcctcatacgggggagccggcggctacacgcagtccccggggggctttggatcgcccgcaccttctcaagccgaaaagaaatcaagagcccgagcccagcacattgtgccctgtactatatctcagctgctttctgccactttggttgatgaagtgttcagaattgggaatgttgagatttcacaggtcactattgtggggatcatcagacatgcagagaaggctccaaccaacattgtttacaaaatagatgacatgacagctgcacccatggacgttcgccagtgggttgacacagatgacaccagcagtgaaaacactgtggttcctccagaaacatatgtgaaagtggcaggccacctgagatcttttcagaacaaaaagagcctggtagcctttaagatcatgcccctggaggatatgaatgagttcaccacacatattctggaagtgatcaatgcacacatggtactaagcaaagccaacagccagccctcagcagggagagcacctatcagcaatccaggaatgagtgaagcagggaactttggtgggaatagcttcatgccagcaaatggcctcactgtggcccaaaaccaggtgttgaatttgattaaggcttgtccaagacctgaagggttgaactttcaggatctcaagaaccagctgaaacacatgtctgtatcctcaatcaagcaagctgtggattttctgagcaatgaggggcacatctattctactgtggatgatgaccattttaaatccacagatgcagaataactggatctaactgggtacctgagatattttacagctggacctagtttcacaatctgttgtctccagctctgcatatgtctggccaggggg

SEQ ID NO: 25944 - DNA, 1162 bp, Homo sapiens
  source 1..1162: mol_type = unassigned DNA
gctagtgcggagggttttgcccttcgtaaagatggccgcggaggcttttggagccaactgggagcgcagtacgcgttttctggagcatgggcagaggagacaggaacaagcgtagcatccgtggattcgaaagctatggcagctcctcatacgggggagccggcggctacacgcagtccccggggggctttggatcgcccgcaccttctcaagccgaaaagaaatcaagagcccgagcccagcacattgtgccctgtactatatctcagctgctttctgccactttggttgatgaagtgttcagaattgggaatgttgagatttcacaggtcactattgtggggatcatcagacatgcagagaaggctccaaccaacattgtttacaaaatagatgacatgacagctgcacccatggacgttcgccagtgggttgacacagatgacaccagcagtgaaaacactgtggttcctccagaaacatatgtgaaagtggcaggccacctgagatcttttcagaacaaaaagagcctggtagcctttaagatcatgcccctggaggatatgaatgagttcaccacacatattctggaagtgatcaatgcacacatggtactaagcaaagccaacagccagccctcagcagggagagcacctatcagcaatccaggaatgagtgaagcagggaactttggtgggaatagcttcatgccagcaaatggcctcactgtggcccaaaaccaggtgttgaatttgattaaggcttgtccaagacctgaagggttgaactttcaggatctcaagaaccagctgaaacacatgtctgtatcctcaatcaagcaagctgtggattttctgagcaatgaggggcacatctattctactgtggatgatgaccattttaaatccacagatgcagaataactggatctaactgggtacctgagatattttacagctggacctagtttcacaatctgttgtctccagctctgcatatgtctggccagggggcttctaggaagtaggtttcatctatcaaatgtctcctctgacttccttttgaaacttactgctcttctgttttattttgttttgtttgaagctcagagggagatgggcaattgacagggatgcaatccagggtgggatttcttgaggaa

SEQ ID NO: 25945 - DNA, 1752 bp, Homo sapiens
  source 1..1752: mol_type = unassigned DNA
agtgcggagggttttgcccttcgtaaagatggccgcggaggcttttggagccaactgggagcgcagtacgcgttttctggagcatgggcagaggagacaggaacaagcgtagcatccgtgagcaccgattggctgaagcgagcaccccgggagctgactggctccgccattcgcgggaaggcgtttgtggtgccagagaaaagtagccagagcggcgcagtggcggccgcgttctgtggttttccgctattcccccagacccgcaccttctcggcctctttgcggagaatcgtgaccaagatgtggaacagtggattcgaaagctatggcagctcctcatacgggggagccggcggctacacgcagtccccggggggctttggatcgcccgcaccttctcaagccgaaaagaaatcaagagcccgagcccagcacattgtgccctgtactatatctcagctgctttctgccactttggttgatgaagtgttcagaattgggaatgttgagatttcacaggtcactattgtggggatcatcagacatgcagagaaggctccaaccaacattgtttacaaaatagatgacatgacagctgcacccatggacgttcgccagtgggttgacacagatgacaccagcagtgaaaacactgtggttcctccagaaacatatgtgaaagtggcaggccacctgagatcttttcagaacaaaaagagcctggtagcctttaagatcatgcccctggaggatatgaatgagttcaccacacatattctggaagtgatcaatgcacacatggtactaagcaaagccaacagccagccctcagcagggagagcacctatcagcaatccaggaatgagtgaagcagggaactttggtgggaatagcttcatgccagcaaatggcctcactgtggcccaaaaccaggtgttgaatttgattaaggcttgtccaagacctgaagggttgaactttcaggatctcaagaaccagctgaaacacatgtctgtatcctcaatcaagcaagctgtggattttctgagcaatgaggggcacatctattctactgtggatgatgaccattttaaatccacagatgcagaataactggatctaactgggtacctgagatattttacagctggacctagtttcacaatctgttgtctccagctctgcatatgtctggccagggggcttctaggaagtaggtttcatctatcaaatgtctcctctgacttccttttgaaacttactgctcttctgttttattttgttttgtttgaagctcagagggagatgggcaattgacagggatgcaatccagggtgggatttcttgaggaagttacaaataagcttgttacaacatcaagatagatggaattggaaggatgctaccaggagagtacttacatagtgctcaggagtttctcttcttaaaatgtttactgctgaaagatgagcaggaccagggcgttataggcagagccctagccgagaaacctgctggcctctgcctgttttcatttcccactttggttgtgtggcattactttcagaattgcactttcctgcttgtcatgactttttgacacacttgccatgacgtgtgtttctgtgaacatgaagttctgcggtagtgcctccaggggcagaggaaaagaagaagtgttactgcattttgtacaaaataaatacagtcatatgtttaataaaacagttctattgtagtaacttgtaaaaa

SEQ ID NO: 25946 - DNA, 554 bp, Homo sapiens
  source 1..554: mol_type = unassigned DNA
ctggaggatatgaatgagttcaccacacatattctggaagtgatcaatgcacacatggtactaagcaaagccaacagccagccctcagcagggagagcacctatcagcaatccaggaatgagtgaagcagggaactttggtgggaatagcttcatgccagcaaatggcctcactgtggcccaaaaccaggtgttgaatttgattaaggcttgtccaagacctgaagggttgaactttcaggatctcaagaaccagctgaaacacatgtctgtatcctcaatcaagcaagctgtggattttctgagcaatgaggggcacatctattctactgtggatgatgaccattttaaatccacagatgcagaataactggatctaactggaattgcactttcctgcttgtcatgactttttgacacacttgccatgacgtgtgtttctgtgaacatgaagttctgcggtagtgcctccaggggcagaggaaaagaagaagtgttactgcattttgtacaaaataaatacagtcatatgtttaataaaacagttctattgta

SEQ ID NO: 25947 - DNA, 682 bp, Homo sapiens
  source 1..682: mol_type = unassigned DNA
gactggctccgccattcgcgggaaggcgtttgtggtgccagagaaaagtagccagagcggcgcagtggcggccgcgttctgtggttttccgctattcccccagacccgcaccttctcggcctctttgcggagaatcgtgaccaagatgtggaacagtaatgatgggggtggattcgaaagctatggcagctcctcatacgggggagccggcggctacacgcagtccccggggggctttggatcgcccgcaccttctcaagccgaaaagaaatcaagagcccgagcccagcacattgtgccctgtactatatctcagctgctttctgccactttggttgatgaagtgttcagaattgggaatgttgagatttcacaggtcactattgtggggatcatcagacatgcagagaaggctccaaccaacattgtttacaaaatagatgacatgacagctgcacccatggacgttcgccagtgggttgacacagatgacaccagcagtgaaaacactgtggttcctccagaaacatatgtgaaagtggcaggccacctgagatcttttcagaacaaaaagagcctggtagcctttaagatcatgcccctggaggatatgaatgagttcaccacacatattctggaagtgatcaatgcacacatggtactaagcaaagccaacagccag

SEQ ID NO: 25948 - DNA, 1540 bp, Homo sapiens
  source 1..1540: mol_type = unassigned DNA
ctagtaaaaatgcatttttatagagatgttgggaaaggcttgcttgaaattacacgtgggacttttaatagataggcgctttgaccagctaagcaacagggctcccctcgtgtgggacttttagaatgtagcaaccactgacacacagggaaggattatgcgatcaggtgagaaggtggccgaccctgactggctggaagcagatgcattctggtagttgattggtccacaggtagcgtgacgcttgtcacgtcctcagcctcccagcattcaatcgtagcctttcggacagctcgaagccttctgtggagagctcgaagccttctgtggagaactcaaagccgtccgtggagccccagacgagccaaagcccaccttctcctcagcctgagctgtcttgaagatgagtaagagtgggtttgggagctatggcagcatttctgctgctgatggagcgagtggaggcagtgaccaactgtgtgagagagatgcaactcctgctattaagacccaaagacctaaggtccgaattcaggacgttgtaccgtgtaatgtgaaccagcttctcagctctactgtgtttgaccctgtgttcaaggttaggggaattatagtttcccaggtctccatcgtgggggtaatcagaggggcagagaaggcttcaaatcacatttgttacaaaattgatgatatgaccgcgaaaccaatcgaggcccgacagtggtttggtagagagaaagtcaagcaggtgactccattgtcagtcggagtatatgtcaaagtgtttggtatcctcaaatgtcccacgggaacaaagagccttgaggtattgaaaattcatgtcctagaggacatgaacgagttcaccgtgcatattctggaaacggtcaatgcacacatgatgctggataaagcccgtcgtgataccactgtagaaagtgtgcctgtgtctccatcagaagtgaatgatgctggggataacgatgagagtcaccgcaatttcatccaggacgaagtgctgcgtttgattcatgagtgtcctcatcaggaagggaagagcatccatgagctccgggctcagctctgcgaccttagcgtcaaggccatcaaggaagcgattgattatctgaccgttgagggccacatctatcccactgtggatcgggagcattttaagtctgctgattgaggcagggaaaacatcctttcatttttcgaagacccttgcatccagctgtgagtaattttgacctgttgactttttaggaagtaggactaaaaaaaaaaatctcaagtggcattctttgtcaactcgctgcttttctaactgctttgaacttttcggattttctgtatttgaagctcagagagagacggtgatggataaattgacaactctgtaggatttactagcaagctaatggaaacatgattttcggggaagaaaaactacagaaaatgtagaaatttattatttaattgtgttggagcttctttttccaaaagaaaaactagttgcagtcagggagccagcgaaaag

SEQ ID NO: 25949 - DNA, 1471 bp, Homo sapiens
  source 1..1471: mol_type = unassigned DNA
gcgagcgccgggaacgagcaccaccagggctggagcggacggctttagaagagcctagctgctgcgcgcgtcggagaggctcctgggaaactcccacggcccagggactttcgaaagcagagcgaggagccctcgcacgcgctagtctgcgagtgagcgctcagcccggcacctgttcctccagcgccgccgccttcccacccctcggacccgcgccgctcgcggcgcccgcccgttcctgcgatgaatccggccctaggcaaccagacggacgtggcgggcctgttcctggccaacagcagcgaggcgctggagcgagccgtgcgctgctgcacccaggcgtccgtggtgaccgacgacggcttcgcggagggaggcccggacgagcgtagcctgtacataatgcgcgtggtgcagatcgcggtcatgtgcgtgctctcactcaccgtggtcttcggcatcttcttcctcggctgcaatctgctcatcaagtccgagggcatgatcaacttcctcgtgaaggaccggaggccgtctaaggaggtggaggcggtggtcgtggggccctactgacccgccctctgcccccgcggcaaccgctcccacgcctgcccactttgctagcccggctgtgcccctcactatcagagactgggcgaagcaaacctgtcggagtcaattatttctctcgacttcggcctttcggaaagaagcgaccggtttctccctcgccctctgaaagtcctcatgcctggcagtcggaggagagcgcccagactctgaactcagcagaaagtggcaagaagagggcgattagggcgcagaactttggaagctgctacttacttggaatgcggggagaccgacggtgcgaaggcccttctccacccgcaggtgggccaagctctgggggcaggtggagagggcgggcaggggagagacccagcggcactgatcgccttgtgaccggaagagtgacctgttaaaagccacgcagcagactcatggggtctcacaaatccgtgtccgggtgcgctcccactcttctcctgctccccccctgccctggaggggaggggcgataaatacctttgattgtaacgtgccgttttaagaggttttgtgtttgtttgcttgaatacaaatgtttgataagtctttttctgccccagtggcctgtttgcctgcctgaggagttacagttttgtcattgtgggagaaggggtggggggagggggagcctgcgaatttgaacggggtgagttgtttcttttagtgcatttcccactgggtcttttgggaggcgtctagcgttcctgctggccctgggacaaagacccagaatagaactcgtagctcgtgactgcacggtttacgccacaaaagtgctcttgacatccgtgacaccgttttgactttttgtttttttcttatttaacatttccttaataaatgcaacatttaagcgttt

SEQ ID NO: 25950 - DNA, 478 bp, Homo sapiens
  source 1..478: mol_type = unassigned DNA
gtgtgccggatttggttagctgagcccaccgagaggcgcctgcaggatgaaagctctctgtctcctcctcctccctgtcctggggctgttggtgtctagcaagaccctgtgctccatggaagaagccatcaatgagaggatccaggaggtcgccggctccctaatatttagggcaataagcagcattggcctggagtgccagagcgtcacctccaggggggacctggctacttgcccccgaggcttcgccgtcaccggctgcacttgtggctccgcctgtggctcgtgggatgtgcgcgccgagaccacatgtcactgccagtgcgcgggcatggactggaccggagcgcgctgctgtcgtgtgcagccctgaggtcgcgcgcagcgcgtgcacagcgcgggcggaggcggctccaggtccggaggggttgcgggggagctggaaataaacctggagatgatgatgatgatgatgatg

SEQ ID NO: 25951 - DNA, 249 bp, Homo sapiens
  source 1..249: mol_type = unassigned DNA
atgaaagctctctgtctcctcctcctccctgtcctggggctgttggtgtctagcaagaccctgtgctccatggaagaagccatcaatgagaggatccaggaggtcgccggctccctaagcttcgccgtcaccggctgcacttgtggctccgcctgtggctcgtgggatgtgcgcgccgagaccacatgtcactgccagtgcgcgggcatggactggaccggagcgcgctgctgtcgtgtgcagccctga

SEQ ID NO: 25952 - DNA, 1496 bp, Homo sapiens
  source 1..1496: mol_type = unassigned DNA
gccgtgtcactggctcaggctcagttgctgggtcaccagtagaatggacccttcctccacctcagttcagagcacagtgatgattcgtgactttctttcccaatagaacttcaaatctctgaagacggggggtggggggatgtgcttgagtgtttgtactcatggtcttgttctagaagtgacaaagctgggacacaatacctttatgcatgaaaaggttgtcacttgtcacaactaacaggctttcacctcacggaaattttcttcccttgtgcacttttcccctggcagtggacatggctgcactcttccaagaagcaagcagctgtcccgtctgctcagactatctagagaaaccaatgtccctggagtgtggatgcgctgtctgcttcaagtgcatcaattcactgcagaaggagccccatggggaggatctactttgctgttgctgttccatggtctctcagaagaacaaaatcaggcccagttggcagctagagaggctggcttcccacatcaaggaactggagcccaagctgaagaagattctgcagatgaacccaaggatgcggaagttccaagtggatatgaccttggatgccgacacagccaacaacttcctcctcatttctgacgacctcaggagcgtccgaagtgggtgcatcacacagaatcggcaagaccttgccgagagatttgacgtgtccatttgcatcctgggctcccctcgctttacctgtggccgccactactgggaggtggacgtgggaacaagcacagaatgggacctgggagtctgcagagaatctgttcaccgcaaagggaggatccatctgaccacagagcgtggattctggactgtgagtttgagggatggaagccgcctctctgccagcacggtgccgctgactttcctcttcgtagaccgcaagttacagcgagtggggatttttctggatatgggcatgcagaacgtttccttttttgatgctgaaggtggttcccatgtctatacattcaggagtgtctctgctgaggagccactgcacttgttttttgctcctccaagtccacctaatggtgataagagtgtcttgagtatctgtcctgtgataaacccgggcactactgatgctccagtccatcctggggaggccaaataagcccccactgcaaaaaaacaaaaaacaggttaagaaaattacttgggtgggcagacttaggaacgctctactcggtaaaagcgttatacaaagtcataggagaaaaatatgggacaattcatgattatacttaatctaatttgattagtttataaattgagtcctaagtattaattattgccaccatccaactcattgagtcttatggttcacatcttgtttcctatagaaatattctgtattctgggatcaatttccaaatgcttttttatttctgtaagttcaaattaatgtattatagaagttatgagttaaataaacattggaatatca

SEQ ID NO: 25953 - DNA, 1496 bp, Homo sapiens
  source 1..1496: mol_type = unassigned DNA
gccatgtcactggctcaggctcagctgctgggtcaccaggagaatggacgcttcctccacctcagctcagagcacagtgatgattcgtgactttcccaatagaacttcaaatctctgaagacggggggtggggggatgtgcttgagtgtttgtactcatggtcttattctcggagtgacaaagctggaacacaatacctctatgcatgaaaaggttgtcacttgtcacaactaacaggctttcacctcatggaaatttttttaccttgtgtacttttcccctggcagtggacatggctgcactcttccaagaagcaagcagctgtcccgtctgctcagactatctggaaaaaccaatgtccctggagtgtggatgcgccgtctgcctcaagtgcattaattcactgcagaaggagccccatggggaggatctactttgctgttgctcttccatggtctctcggaagaacaaaatcaggcgcaatcggcagctagagaggctggcttcccacatcaaggaactggagcccaagctgaagaagattctgcagatgaacccaaggatgcggaagttccaagtggatatgaccttggatgccaacacagccaacaacttcctcctcatttctgacgacctcaggagcgtccgaagtgggcgcatcagacagaatcggcaagaccttgccgagagatttgacgtgtccgtttgcatcctgggctcccctcgctttacctgtggccgccactgctgggaggtggacgtgggaacaagcacagaatgggacctgggagtctgcagagaatctgttcaccgcaaagggaggatccagctgaccacagagcttggattctggactgtgagtttgagggatggaggccgcctctctgccaccacggtgccgctgactttcctcttcgtagaccgcaagttacagcgagtggggatttttctggatatgggcatgcagaacgtttccttttttgatgctgaaagtggttcccatgtctatacattcaggagcgtatctgctgaggagccattgcgcccatttttggctccttcagttccacctaatggtgatcaaggtgtcttgagcatctgtcctttgatgaactcaggcactactgatgctccagtccgtcctggggaggccaaataagccctcactccaaaaaaacaaaaaacagggtaagaaaattacttgggtgggtagacttaggaacgctctacttcgtaaaagcattatacaaagtcacgggagaaaaatatgggacatttcttgattgtacttaatctaatttgattagattatagagtcctaagtattaattattgccaccatcaaactcattgagtcctatggttcacatcttgtttcctatagaaatgtcctgtattctgggatcaatttccaaatgctttacttttttatttctgcaagttcaaattaatgtattatagaagttatgagttaaataaagattggaatatcacct

SEQ ID NO: 25954 - DNA, 1452 bp, Homo sapiens
  source 1..1452: mol_type = unassigned DNA
gccagcccatctgctccatgcccaggcttttctggctttgtctgcccggatgcccagtgccctgagaaggagctacatgccacgggctggaggctagagcctgtggcaccatgatttgcctccgatggaggtggctgaattaggcttcccagagactgcagtgtcccaatccaggatctgtctatgtgctgtattgtgtggccactgggactttgcagacatgatggtgataaggagcctgagtggacatggctgcactcttccaagaagcaagcagctgtcccgtctgctcagactatctggaaaaaccaatgtccctggagtgtggatgcgccgtctgcctcaagtgcattaattcactgcagaaggagccccatggggaggatctactttgctgttgctcttccatggtctctcggaagaacaaaatcaggcgcaatcggcagctagagaggctggcttcccacatcaaggaactggagcccaagctgaagaagattctgcagatgaacccaaggatgcggaagttccaagtggatatgaccttggatgccaacacagccaacaacttcctcctcatttctgacgacctcaggagcgtccgaagtgggcgcatcagacagaatcggcaagaccttgccgagagatttgacgtgtccgtttgcatcctgggctcccctcgctttacctgtggccgccactgctgggaggtggacgtgggaacaagcacagaatgggacctgggagtctgcagagaatctgttcaccgcaaagggaggatccagctgaccacagagcttggattctggactgtgagtttgagggatggaggccgcctctctgccaccacggtgccgctgactttcctcttcgtagaccgcaagttacagcgagtggggatttttctggatatgggcatgcagaacgtttccttttttgatgctgaaagtggttcccatgtctatacattcaggagcgtatctgctgaggagccattgcgcccatttttggctccttcagttccacctaatggtgatcaaggtgtcttgagcatctgtcctttgatgaactcaggcactactgatgctccagtccgtcctggggaggccaaataagccctcactccaaaaaaacaaaaaacagggtaagaaaattacttgggtgggtagacttaggaacgctctacttcgtaaaagcattatacaaagtcacgggagaaaaatatgggacatttcttgattgtacttaatctaatttgattagattatagagtcctaagtattaattattgccaccatcaaactcattgagtcctatggttcacatcttgtttcctatagaaatgtcctgtattctgggatcaatttccaaatgctttacttttttatttctgcaagttcaaattaatgtattatagaagttatgagttaaataaagattggaatatcacct

SEQ ID NO: 25955 - DNA, 2410 bp, Homo sapiens
  source 1..2410: mol_type = unassigned DNA
tatcgctacactgccgcggcgagtaccgggttggcggcgctatcctgggctacaccgccggtggcgggaggcgttttaggggcgctatctggtgctgcactgcccgcgcaggagttgggttgggtgacctactccaggcgtcactgcccgaggctgggggctgatttggggcgctatcccgggagtcatttcctgtggcgaggggctggttgagggtggtatccgtggctgcactgcccacagcacagagcgggtttggggagttatcccgggctgcgctgcccgtggcagggggcaggctgccagcgccattgggtgctgcatgtactaggcacggatgagttaggggcgccatctgggactgcactgccggtggcgggcggtggaggtgtcagtgacagcggtggtctgcaagagaggagcggtcctcctcttcccggccacctcctcctgttcttgctcaagtgcggcgggcgcacagcatttcctgagcgcggcaggggccccagccccgtggtgcttcctggacccgcctcctattgctctgtgttgcagagaccgcctgggaccccggggcacgcagtagtggacacgaggaggctacagggccctgtgggtggaggaggcatcaggaacgggaaccggcacttgggtggggagggctggctggggttgagtttctgctgctcctgcttcccgaggagtgcagccagggtggctgcagctgttcctgtggagtgggaagcccgggcactgtggtgtctgcagtccccactccaggccgcagttcctggccagcttgcgctaaaaggagaggctggactttgaagtgtgggtgcttttctggctttgtctgcccggatgcccagtgccctgagaaggagctacatgccacgggctggaggctagagcctgtggcaccatgatttgcctccgatggaggtggctgaattaggcttcccagagactgcagtgtcccaatccaggatctgtctatgtgctgtattgtgtggccactgggactttgcagacatgatggtgataaggagcctgagcctcatcaggttagagggtgtggaagggcgtgacccagtgggaggtgggaatctcaccaataaaaggccctcgtgtgccccttccccacaagacctgagcgcccagtggaagcagctggaggacagaggagcttccagcagaagagtggacatggctgcactcttccaagaagcaagcagctgtcccgtctgctcagactatctggaaaaaccaatgtccctggagtgtggatgcgccgtctgcctcaagtgcattaattcactgcagaaggagccccatggggaggatctactttgctgttgctcttccatggtctctcggaagaacaaaatcaggcgcaatcggcagctagagaggctggcttcccacatcaaggaactggagcccaagctgaagaagattctgcagatgaacccaaggatgcggaagttccaagtggatatgaccttggatgccaacacagccaacaacttcctcctcatttctgacgacctcaggagcgtccgaagtgggcgcatcagacagaatcggcaagaccttgccgagagatttgacgtgtccgtttgcatcctgggctcccctcgctttacctgtggccgccactgctgggaggtggacgtgggaacaagcacagaatgggacctgggagtctgcagagaatctgttcaccgcaaagggaggatccagctgaccacagagcttggattctggactgtgagtttgagggatggaggccgcctctctgccaccacggtgccgctgactttcctcttcgtagaccgcaagttacagcgagtggggatttttctggatatgggcatgcagaacgtttccttttttgatgctgaaagtggttcccatgtctatacattcaggagcgtatctgctgaggagccattgcgcccatttttggctccttcagttccacctaatggtgatcaaggtgtcttgagcatctgtcctttgatgaactcaggcactactgatgctccagtccgtcctggggaggccaaataagccctcactccaaaaaaacaaaaaacagggtaagaaaattacttgggtgggtagacttaggaacgctctacttcgtaaaagcattatacaaagtcacgggagaaaaatatgggacatttcttgattgtacttaatctaatttgattagattatagagtcctaagtattaattattgccaccatcaaactcattgagtcctatggttcacatcttgtttcctatagaaatgtcctgtattctgggatcaatttccaaatgctttacttttttatttctgcaagttcaaattaatgtattatagaagttatgagttaaataaagattggaatatcacct

SEQ ID NO: 25956 - DNA, 2407 bp, Homo sapiens
  source 1..2407: mol_type = unassigned DNA
tatcgctacactgccgcggcgagtaccgggttggcggcgctatcctgggctacaccgccggtggcgggaggcgttttaggggcgctatctggtgctgcactgcccgcgcaggagttgggttgggtgacctactccaggcgtcactgcccgaggctgggggctgatttggggcgctatcccgggagtcatttcctgtggcgaggggctggttgagggtggtatccgtggctgcactgcccacagcacagagcgggtttggggagttatcccgggctgcgctgcccgtggcagggggcaggctgccagcgccattgggtgctgcatgtactaggcacggatgagttaggggcgccatctgggactgcactgccggtggcgggcggtggaggtgtcagtgacagcggtggtctgcaagagaggagcggtcctcctcttcccggccacctcctcctgttcttgctcaagtgcggcgggcgcacagcatttcctgagcgcggcaggggccccagccccgtggtgcttcctggacccgcctcctattgctctgtgttgcagagaccgcctgggaccccggggcacgcagtagtggacacgaggaggctacagggccctgtgggtggaggaggcatcaggaacgggaaccggcacttgggtggggagggctggctggggttgagtttctgctgctcctgcttcccgaggagtgcagccagggtggctgcagctgttcctgtggagtgggaagcccgggcactgtggtgtctgcagtccccactccaggccgcagttcctggccagcttgcgctaaaaggagaggctggactttgaagtgtgggtgcttttctggctttgtctgcccggatgcccagtgccctgagaaggagctacatgccacgggctggaggctagagcctgtggcaccatgatttgcctccgatggaggtggctgaattaggcttcccagagactgcagtgtcccaatccaggatctgtctatgtgctgtattgtgtggccactgggactttgcagacatgatggtgataaggagcctgagcctcatcaggttagagggtgtggaagggcgtgacccagtgggaggtgggaatctcaccaataaaaggccctcgtgtgccccttccccacaagacctgagcgcccagtggaagcagctggaggacagaggagcttccagcagaagagtggacatggctgcactcttccaagaagcaagcagctgtcccgtctgctcagactatctggaaaaaccaatgtccctggagtgtggatgcgccgtctgcctcaagtgcattaattcactgcagaaggagccccatggggaggatctactttgctgttgctcttccatggtctctcggaagaacaaaatcaggcgcaatcggcagctagagaggctggcttcccacatcaaggaactggagcccaagctgaagaagattctgcagatgaacccaaggatgcggaagttccaagtggatatgaccttggatgccaacacagccaacaacttcctcctcatttctgacgacctcaggagcgtccgaagtgggcgcatcagacagaatcggcaagaccttgccgagagatttgacgtgtccgtttgcatcctgggctcccctcgctttacctgtggccgccactgctgggaggtggacgtgggaacaagcacagaatgggacctgggagtctgcagagaatctgttcaccgcaaagggaggatccagctgaccacagagcttggattctggactgtgagtttgagggatggaggccgcctctctgccaccacggtgccgctgactttcctcttcgtagaccgcaagttacagcgagtggggatttttctggatatgggcatgcagaacgtttccttttttgatgctgaaagtggttcccatgtctatacattcaggagcgtatctgctgaggagccattgcgcccatttttggctccttcagttccacctaatggtgatcaaggtgtcttgagcatctgtcctttgatgaactcaggcactactgatgctccagtccgtcctggggaggccaaataagccctcactccaaaaaaacaaaaaacagggtaagaaaattacttgggtgggtagacttaggaacgctctacttcgtaaaagcattatacaaagtcacgggagaaaaatatgggacatttcttgattgtacttaatctaatttgattagattatagagtcctaagtattaattattgccaccatcaaactcattgagtcctatggttcacatcttgtttcctatagaaatgtcctgtattctgggatcaatttccaaatgctttacttttttatttctgcaagttcaaattaatgtattatagaagttatgagttaaataaagattggaatatca

SEQ ID NO: 25957 - DNA, 1488 bp, Homo sapiens
  source 1..1488: mol_type = unassigned DNA
gccacgtcactggctcaggctcagctgctgggtcaccaggagaatggacccttcctccacctcagctcagagcacagtgatgattcgtgactttcccaatagaacttcaaatctctgaggacggggggtggggggatgtgcttgagtgtttgtactcatggtcttgttctcggagtgacaaagctggaacacaatacctctatgcatgaaaaggttgtcacttgtcacaactaacaggctttcacctcaaggaaattttcttcccttgtgtacttttcccctggcagtggacatggctgcactcttccaagaagcaagcagctgtcccgtctgctcagactatctggaaaaaccaatgtccctggagtgtggatgcaccgtctgcctcaagtgcatcaattcgctgcagaaggagccccatggggaggatctgctttgctgttgctgttccatggtctctcagaggaacaaaatcaggcccaatcggcagctagagaggctggtttcccacatcaaggaactggagcccaagctgaagaagattctacagatgaacccaaggatgcggaagttccaagtggatatgaccttggatgccgacacagccaacaacttcctcctcatttctgacgacctcaggagcgtccgaagtgggctcatcacacagaatcggcaagaccttgccgagagatttgacgtgtccgtttgcatcctgggctcccctcgctttacctgtggccgccactactgggaggtggacgtgggaacaagcacagaatgggacctgggagtctgcagagaatctgttcactgcaaagggaagatccagctgaccacagagcttggattctggactgtgagtttgagggatggaagccgcctctctgccagcacggtgccgctgactttcctcttagtagaccgcaagttacagcgagtggggatttttctggatatgggcatgcagaacgtttccttttttgatgctgaaagtggttcccatgtctatacattcaggagcgtctctgctgaggagccactgcgcccatttttggctccttcaattccacctaatggtgatcaaggtgtcttgagcatctgtcctttgatgaactcaggcactactgatgctccagtccgtcctggggaggccaaataagccgccactgcaaaaaaaaacagggtcagaaaattacttgggtgggtagacttaggaattttctacttggtaaaagcattatacagtcataggagaaagatatgggacatttctataatctatattctaatttgattcgattattgagtcgtaagtattaattattgccaccatccaactcattgagtcttatggttcacatcttgtttcctatagaaatgttctgtattctcggatcaatttccaaatgctttactttttcatttctgtaagttcaaatcaatgtttaaattatagaagttatgaggtaaataaacatttggatatca

SEQ ID NO: 25958 - DNA, 1203 bp, Homo sapiens
  source 1..1203: mol_type = unassigned DNA
agtggacatggctgcactcttccaagaagcaagcagctgtcccgtctgctcagactatctggaaaaaccaatgtccctggagtgtggatgcaccgtctgcctcaagtgcatcaattcgctgcagaaggagccccatggggaggatctgctttgctgttgctgttccatggtctctcagaggaacaaaatcaggcccaatcggcagctagagaggctggtttcccacatcaaggaactggagcccaagctgaagaagattctacagatgaacccaaggatgcggaagttccaagtggatatgaccttggatgccgacacagccaacaacttcctcctcatttctgacgacctcaggagcgtccgaagtgggctcatcacacagaatcggcaagaccttgccgagagatttgacgtgtccgtttgcatcctgggctcccctcgctttacctgtggccgccactactgggaggtggacgtgggaacaagcacagaatgggacctgggagtctgcagagaatctgttcactgcaaagggaagatccagctgaccacagagcttggattctggactgtgagtttgagggatggaagccgcctctctgccagcacggtgccgctgactttcctcttagtagaccgcaagttacagcgagtggggatttttctggatatgggcatgcagaacgtttccttttttgatgctgaaagtggttcccatgtctatacattcaggagcgtctctgctgaggagccactgcgcccatttttggctccttcaattccacctaatggtgatcaaggtgtcttgagcatctgtcctttgatgaactcaggcactactgatgctccagtccgtcctggggaggccaaataagccgccactgcaaaaaaaaacagggtcagaaaattacttgggtgggtagacttaggaattttctacttggtaaaagcattatacagtcataggagaaagatatgggacatttctataatctatattctaatttgattcgattattgagtcgtaagtattaattattgccaccatccaactcattgagtcttatggttcacatcttgtttcctatagaaatgttctgtattctcggatcaatttccaaatgctttactttttcatttctgtaagttcaaatcaatgtttaaattatagaagttatgaggtaaataaacatttggatatca

SEQ ID NO: 25959 - DNA, 1214 bp, Homo sapiens
  source 1..1214: mol_type = unassigned DNA
cggcagcagcgagtggacatggctgcactcttccaagaagcaagcagctgtcccgtctgctcagactatctggaaaaaccaatgtccctggagtgtggatgcaccgtctgcctcaagtgcatcaattcgctgcagaaggagccccatggggaggatctgctttgctgttgctgttccatggtctctcagaggaacaaaatcaggcccaatcggcagctagagaggctggtttcccacatcaaggaactggagcccaagctgaagaagattctacagatgaacccaaggatgcggaagttccaagtggatatgaccttggatgccgacacagccaacaacttcctcctcatttctgacgacctcaggagcgtccgaagtgggctcatcacacagaatcggcaagaccttgccgagagatttgacgtgtccgtttgcatcctgggctcccctcgctttacctgtggccgccactactgggaggtggacgtgggaacaagcacagaatgggacctgggagtctgcagagaatctgttcactgcaaagggaagatccagctgaccacagagcttggattctggactgtgagtttgagggatggaagccgcctctctgccagcacggtgccgctgactttcctcttagtagaccgcaagttacagcgagtggggatttttctggatatgggcatgcagaacgtttccttttttgatgctgaaagtggttcccatgtctatacattcaggagcgtctctgctgaggagccactgcgcccatttttggctccttcaattccacctaatggtgatcaaggtgtcttgagcatctgtcctttgatgaactcaggcactactgatgctccagtccgtcctggggaggccaaataagccgccactgcaaaaaaaaacagggtcagaaaattacttgggtgggtagacttaggaattttctacttggtaaaagcattatacagtcataggagaaagatatgggacatttctataatctatattctaatttgattcgattattgagtcgtaagtattaattattgccaccatccaactcattgagtcttatggttcacatcttgtttcctatagaaatgttctgtattctcggatcaatttccaaatgctttactttttcatttctgtaagttcaaatcaatgtttaaattatagaagttatgaggtaaataaacatttggatatca

SEQ ID NO: 25960 - DNA, 4097 bp, Homo sapiens
  source 1..4097: mol_type = unassigned DNA
ccgaagcagggcgcgcagcagcgctgagtgccccggaacgtgcgtcgcgcccccagtgtccgtcgcgtccgccgcgccccgggcggggatggggcggccagactgagcgccgcacccgccatccagacccgccggccctagccgcagtccctccagccgtggccccagcgcgcacgggcgatggcgaaggcgacgtccggtgccgcggggctgcgtctgctgttgctgctgctgctgccgctgctaggcaaagtggcattgggcctctacttctcgagggatgcttactgggagaagctgtatgtggaccaggcagccggcacgcccttgctgtacgtccatgccctgcgggacgcccctgaggaggtgcccagcttccgcctgggccagcatctctacggcacgtaccgcacacggctgcatgagaacaactggatctgcatccaggaggacaccggcctcctctaccttaaccggagcctggaccatagctcctgggagaagctcagtgtccgcaaccgcggctttcccctgctcaccgtctacctcaaggtcttcctgtcacccacatcccttcgtgagggcgagtgccagtggccaggctgtgcccgcgtatacttctccttcttcaacacctcctttccagcctgcagctccctcaagccccgggagctctgcttcccagagacaaggccctccttccgcattcgggagaaccgacccccaggcaccttccaccagttccgcctgctgcctgtgcagttcttgtgccccaacatcagcgtggcctacaggctcctggagggtgagggtctgcccttccgctgcgccccggacagcctggaggtgagcacgcgctgggccctggaccgcgagcagcgggagaagtacgagctggtggccgtgtgcaccgtgcacgccggcgcgcgcgaggaggtggtgatggtgcccttcccggtgaccgtgtacgacgaggacgactcggcgcccaccttccccgcgggcgtcgacaccgccagcgccgtggtggagttcaagcggaaggaggacaccgtggtggccacgctgcgtgtcttcgatgcagacgtggtacctgcatcaggggagctggtgaggcggtacacaagcacgctgctccccggggacacctgggcccagcagaccttccgggtggaacactggcccaacgagacctcggtccaggccaacggcagcttcgtgcgggcgaccgtacatgactataggctggttctcaaccggaacctctccatctcggagaaccgcaccatgcagctggcggtgctggtcaatgactcagacttccagggcccaggagcgggcgtcctcttgctccacttcaacgtgtcggtgctgccggtcagcctgcacctgcccagtacctactccctctccgtgagcaggagggctcgccgatttgcccagatcgggaaagtctgtgtggaaaactgccaggcattcagtggcatcaacgtccagtacaagctgcattcctctggtgccaactgcagcacgctaggggtggtcacctcagccgaggacacctcggggatcctgtttgtgaatgacaccaaggccctgcggcggcccaagtgtgccgaacttcactacatggtggtggccaccgaccagcagacctctaggcaggcccaggcccagctgcttgtaacagtggaggggtcatatgtggccgaggaggcgggctgccccctgtcctgtgcagtcagcaagagacggctggagtgtgaggagtgtggcggcctgggctccccaacaggcaggtgtgagtggaggcaaggagatggcaaagggatcaccaggaacttctccacctgctctcccagcaccaagacctgccccgacggccactgcgatgttgtggagacccaagacatcaacatttgccctcaggactgcctccggggcagcattgttgggggacacgagcctggggagccccgggggattaaagctggctatggcacctgcaactgcttccctgaggaggagaagtgcttctgcgagcccgaagacatccaggatccactgtgcgacgagctgtgccgcacggtgatcgcagccgctgtcctcttctccttcatcgtctcggtgctgctgtctgccttctgcatccactgctaccacaagtttgcccacaagccacccatctcctcagctgagatgaccttccggaggcccgcccaggccttcccggtcagctactcctcttccggtgcccgccggccctcgctggactccatggagaaccaggtctccgtggatgccttcaagatcctggaggatccaaagtgggaattccctcggaagaacttggttcttggaaaaactctaggagaaggcgaatttggaaaagtggtcaaggcaacggccttccatctgaaaggcagagcagggtacaccacggtggccgtgaagatgctgaaagagaacgcctccccgagtgagctgcgagacctgctgtcagagttcaacgtcctgaagcaggtcaaccacccacatgtcatcaaattgtatggggcctgcagccaggatggcccgctcctcctcatcgtggagtacgccaaatacggctccctgcggggcttcctccgcgagagccgcaaagtggggcctggctacctgggcagtggaggcagccgcaactccagctccctggaccacccggatgagcgggccctcaccatgggcgacctcatctcatttgcctggcagatctcacaggggatgcagtatctggccgagatgaagctcgttcatcgggacttggcagccagaaacatcctggtagctgaggggcggaagatgaagatttcggatttcggcttgtcccgagatgtttatgaagaggattcctacgtgaagaggagccagggtcggattccagttaaatggatggcaattgaatccctttttgatcatatctacaccacgcaaagtgatgtatggtcttttggtgtcctgctgtgggagatcgtgaccctagggggaaacccctatcctgggattcctcctgagcggctcttcaaccttctgaagaccggccaccggatggagaggccagacaactgcagcgaggagatgtaccgcctgatgctgcaatgctggaagcaggagccggacaaaaggccggtgtttgcggacatcagcaaagacctggagaagatgatggttaagaggagagactacttggaccttgcggcgtccactccatctgactccctgatttatgacgacggcctctcagaggaggagacaccgctggtggactgtaataatgcccccctccctcgagccctcccttccacatggattgaaaacaaactctatggtagaatttcccatgcatttactagattctagcaccgctgtcccctttgcactatccttcctctctgtgatgctttttaaaaatgtttctggtctgaacaaaaccaaagtctgctctgaacctttttatttgtaaatgtctgactttgcatccagtttacatttaggcattattgcaactatgtttttctaaaaggatgtgaaaataagtgtaattaccacattgcccagcaacttaggatggtagaggaaaaaacagatcagggcggaactctcaggggagaccaagaacaggttgaataaggcgcttctggggtgggaatcaagtcatagtacttctactttaactaagtggataaatatacaaatctggggaggtattcagttgagaaaggagccaccagcaccactcagcctgcactgggagcacagccaggttcccccagacccctcctgggcaggcaggtgcctctcagaggccacccggcactggcgagcagccactggccaagcctcagccccagtcccagccacatgtcctccatcaggggtagcgaggttgcaggagctggctggccctgggaggacgcacccccactgctgttttcacatcctttcccttacccaccttcaggacggttgtcacttatgaagtcagtgctaaagctggagcagttgctttttgaaagaacatggtctgtggtgctgtggtcttacaatggacagtaaat

SEQ ID NO: 25961 - DNA, 5659 bp, Homo sapiens
  source 1..5659: mol_type = unassigned DNA
ccctacccgctcctccggcgcagccggcgcttacctcgcttcagtcccgcgaccgaagcagggcgcgcagcagcgctgagtgccccggaacgtgcgtcgcgcccccagtgtccgtcgcgtccgccgcgccccgggcggggatggggcggccagactgagcgccgcacccgccatccagacccgccggccctagccgcagtccctccagccgtggccccagcgcgcacgggcgatggcgaaggcgacgtccggtgccgcggggctgcgtctgctgttgctgctgctgctgccgctgctaggcaaagtggcattgggcctctacttctcgagggatgcttactgggagaagctgtatgtggaccaggcagccggcacgcccttgctgtacgtccatgccctgcgggacgcccctgaggaggtgcccagcttccgcctgggccagcatctctacggcacgtaccgcacacggctgcatgagaacaactggatctgcatccaggaggacaccggcctcctctaccttaaccggagcctggaccatagctcctgggagaagctcagtgtccgcaaccgcggctttcccctgctcaccgtctacctcaaggtcttcctgtcacccacatcccttcgtgagggcgagtgccagtggccaggctgtgcccgcgtatacttctccttcttcaacacctcctttccagcctgcagctccctcaagccccgggagctctgcttcccagagacaaggccctccttccgcattcgggagaaccgacccccaggcaccttccaccagttccgcctgctgcctgtgcagttcttgtgccccaacatcagcgtggcctacaggctcctggagggtgagggtctgcccttccgctgcgccccggacagcctggaggtgagcacgcgctgggccctggaccgcgagcagcgggagaagtacgagctggtggccgtgtgcaccgtgcacgccggcgcgcgcgaggaggtggtgatggtgcccttcccggtgaccgtgtacgacgaggacgactcggcgcccaccttccccgcgggcgtcgacaccgccagcgccgtggtggagttcaagcggaaggaggacaccgtggtggccacgctgcgtgtcttcgatgcagacgtggtacctgcatcaggggagctggtgaggcggtacacaagcacgctgctccccggggacacctgggcccagcagaccttccgggtggaacactggcccaacgagacctcggtccaggccaacggcagcttcgtgcgggcgaccgtacatgactataggctggttctcaaccggaacctctccatctcggagaaccgcaccatgcagctggcggtgctggtcaatgactcagacttccagggcccaggagcgggcgtcctcttgctccacttcaacgtgtcggtgctgccggtcagcctgcacctgcccagtacctactccctctccgtgagcaggagggctcgccgatttgcccagatcgggaaagtctgtgtggaaaactgccaggcattcagtggcatcaacgtccagtacaagctgcattcctctggtgccaactgcagcacgctaggggtggtcacctcagccgaggacacctcggggatcctgtttgtgaatgacaccaaggccctgcggcggcccaagtgtgccgaacttcactacatggtggtggccaccgaccagcagacctctaggcaggcccaggcccagctgcttgtaacagtggaggggtcatatgtggccgaggaggcgggctgccccctgtcctgtgcagtcagcaagagacggctggagtgtgaggagtgtggcggcctgggctccccaacaggcaggtgtgagtggaggcaaggagatggcaaagggatcaccaggaacttctccacctgctctcccagcaccaagacctgccccgacggccactgcgatgttgtggagacccaagacatcaacatttgccctcaggactgcctccggggcagcattgttgggggacacgagcctggggagccccgggggattaaagctggctatggcacctgcaactgcttccctgaggaggagaagtgcttctgcgagcccgaagacatccaggatccactgtgcgacgagctgtgccgcacggtgatcgcagccgctgtcctcttctccttcatcgtctcggtgctgctgtctgccttctgcatccactgctaccacaagtttgcccacaagccacccatctcctcagctgagatgaccttccggaggcccgcccaggccttcccggtcagctactcctcttccggtgcccgccggccctcgctggactccatggagaaccaggtctccgtggatgccttcaagatcctggaggatccaaagtgggaattccctcggaagaacttggttcttggaaaaactctaggagaaggcgaatttggaaaagtggtcaaggcaacggccttccatctgaaaggcagagcagggtacaccacggtggccgtgaagatgctgaaagagaacgcctccccgagtgagctgcgagacctgctgtcagagttcaacgtcctgaagcaggtcaaccacccacatgtcatcaaattgtatggggcctgcagccaggatggcccgctcctcctcatcgtggagtacgccaaatacggctccctgcggggcttcctccgcgagagccgcaaagtggggcctggctacctgggcagtggaggcagccgcaactccagctccctggaccacccggatgagcgggccctcaccatgggcgacctcatctcatttgcctggcagatctcacaggggatgcagtatctggccgagatgaagctcgttcatcgggacttggcagccagaaacatcctggtagctgaggggcggaagatgaagatttcggatttcggcttgtcccgagatgtttatgaagaggattcctacgtgaagaggagccagggtcggattccagttaaatggatggcaattgaatccctttttgatcatatctacaccacgcaaagtgatgtatggtcttttggtgtcctgctgtgggagatcgtgaccctagggggaaacccctatcctgggattcctcctgagcggctcttcaaccttctgaagaccggccaccggatggagaggccagacaactgcagcgaggagatgtaccgcctgatgctgcaatgctggaagcaggagccggacaaaaggccggtgtttgcggacatcagcaaagacctggagaagatgatggttaagaggagagactacttggaccttgcggcgtccactccatctgactccctgatttatgacgacggcctctcagaggaggagacaccgctggtggactgtaataatgcccccctccctcgagccctcccttccacatggattgaaaacaaactctatggcatgtcagacccgaactggcctggagagagtcctgtaccactcacgagagctgatggcactaacactgggtttccaagatatccaaatgatagtgtatatgctaactggatgctttcaccctcagcggcaaaattaatggacacgtttgatagttaacatttctttgtgaaaggtaatggactcacaaggggaagaaacatgctgagaatggaaagtctaccggccctttctttgtgaacgtcacattggccgagccgtgttcagttcccaggtggcagactcgtttttggtagtttgttttaacttccaaggtggttttacttctgatagccggtgattttccctcctagcagacatgccacaccgggtaagagctctgagtcttagtggttaagcattcctttctcttcagtgcccagcagcacccagtgttggtctgtgtccatcagtgaccaccaacattctgtgttcacatgtgtgggtccaacacttactacctggtgtatgaaattggacctgaactgttggatttttctagttgccgccaaacaaggcaaaaaaatttaaacatgaagcacacacacaaaaaaggcagtaggaaaaatgctggccctgatgacctgtccttattcagaatgagagactgcggggggggcctgggggtagtgtcaatgcccctccagggctggaggggaagaggggccccgaggatgggcctgggctcagcattcgagatcttgagaatgattttttttaaatcatgcaacctttccttaggaagacatttggttttcatcatgattaagatgattcctagatttagcacaatggagagattccatgccatctttactatgtggatggtggtatcagggaagagggctcacaagacacatttgtcccccgggcccaccacatcatcctcacgtgttcggtactgagcagccactacccctgatgagaacagtatgaagaaagggggctgttggagtcccagaattgctgacagcagaggctttgctgctgtgaatcccacctgccaccagcctgcagcacaccccacagccaagtagaggcgaaagcagtggctcatcctacctgttaggagcaggtagggcttgtactcactttaatttgaatcttatcaacttactcataaagggacaggctagctagctgtgttagaagtagcaatgacaatgaccaaggactgctacacctctgattacaattctgatgtgaaaaagatggtgtttggctcttatagagcctgtgtgaaaggcccatggatcagctcttcctgtgtttgtaatttaatgctgctacaagatgtttctgtttcttagattctgaccatgactcataagcttcttgtcattcttcattgcttgtttgtggtcacagatgcacaacactcctccagtcttgtgggggcagcttttgggaagtctcagcagctcttctggctgtgttgtcagcactgtaacttcgcagaaaagagtcggattaccaaaacactgcctgctcttcagacttaaagcactgataggacttaaaatagtctcattcaaatactgtattttatataggcatttcacaaaaacagcaaaattgtggcattttgtgaggccaaggcttggatgcgtgtgtaatagagccttgtggtgtgtgcgcacacacccagagggagagtttgaaaaatgcttattggacacgtaacctggctctaatttgggctgtttttcagatacactgtgataagttcttttacaaatatctatagacatggtaaacttttggttttcagatatgcttaatgatagtcttactaaatgcagaaataagaataaactttctcaaattattaaaaatgcctacacagtaagtgtgaattgctgcaacaggtttgttctcaggagggtaagaactccaggtctaaacagctgacccagtgatggggaatttatccttgaccaatttatccttgaccaataacctaattgtctattcctgagttataaaagtccccatccttattagctctactggaattttcatacacgtaaatgcagaagttactaagtattaagtattactgagtattaagtagtaatctgtcagttattaaaatttgtaaaatctatttatgaaaggtcattaaaccagatcatgttcctttttttgtaatcaaggtgactaagaaaatcagttgtgtaaataaaatcatgtatcataaaa

SEQ ID NO: 25962 - DNA, 2189 bp, Homo sapiens
  source 1..2189: mol_type = unassigned DNA
ccgaagcagggcgcgcagcagcgctgagtgccccggaacgtgcgtcgcgcccccagtgtccgtcgcgtccgccgcgccccgggcggggatggggcggccagactgagcgccgcacccgccatccagacccgccggccctagccgcagtccctccagccgtggccccagcgcgcacgggcgatggcgaaggcgacgtccggtgccgcggggctgcgtctgctgttgctgctgctgctgccgctgctaggcaaagtggcattgggcctctacttctcgagggatgcttactgggagaagctgtatgtggaccaggcagccggcacgcccttgctgtacgtccatgccctgcgggacgcccctgaggaggtgcccagcttccgcctgggccagcatctctacggcacgtaccgcacacggctgcatgagaacaactggatctgcatccaggaggacaccggcctcctctaccttaaccggagcctggaccatagctcctgggagaagctcagtgtccgcaaccgcggctttcccctgctcaccgtctacctcaaggtcttcctgtcacccacatcccttcgtgagggcgagtgccagtggccaggctgtgcccgcgtatacttctccttcttcaacacctcctttccagcctgcagctccctcaagccccgggagctctgcttcccagagacaaggccctccttccgcattcgggagaaccgacccccaggcaccttccaccagttccgcctgctgcctgtgcagttcttgtgccccaacatcagcgtggcctacaggctcctggagggtgagggtctgcccttccgctgcgccccggacagcctggaggtgagcacgcgctgggccctggaccgcgagcagcgggagaagtacgagctggtggccgtgtgcaccgtgcacgccggcgcgcgcgaggaggtggtgatggtgcccttcccggtgaccgtgtacgacgaggacgactcggcgcccaccttccccgcgggcgtcgacaccgccagcgccgtggtggagttcaagcggaaggaggacaccgtggtggccacgctgcgtgtcttcgatgcagacgtggtacctgcatcaggggagctggtgaggcggtacacaagcacgctgctccccggggacacctgggcccagcagaccttccgggtggaacactggcccaacgagacctcggtccaggccaacggcagcttcgtgcgggcgaccgtacatgactataggctggttctcaaccggaacctctccatctcggagaaccgcaccatgcagctggcggtgctggtcaatgactcagacttccagggcccaggagcgggcgtcctcttgctccacttcaacgtgtcggtgctgccggtcagcctgcacctgcccagtacctactccctctccgtgagcaggagggctcgccgatttgcccagatcgggaaagtctgtgtggaaaactgcctggcagatctcacaggggatgcagtatctggccgagatgaagctcgttcatcgggacttggcagccagaaacatcctggtagctgaggggcggaagatgaagatttcggatttcggcttgtcccgagatgtttatgaagaggattcctacgtgaagaggagccagggtcggattccagttaaatggatggcaattgaatccctttttgatcatatctacaccacgcaaagtgatgtatggtcttttggtgtcctgctgtgggagatcgtgaccctagggggaaacccctatcctgggattcctcctgagcggctcttcaaccttctgaagaccggccaccggatggagaggccagacaactgcagcgaggagatgtaccgcctgatgctgcaatgctggaagcaggagccggacaaaaggccggtgtttgcggacatcagcaaagacctggagaagatgatggttaagaggagagactacttggaccttgcggcgtccactccatctgactccctgatttatgacgacggcctctcagaggaggagacaccgctggtggactgtaataatgcccccctccctcgagccctcccttccacatggattgaaaacaaactctatggtagaatttcccatgcatttactagattctagcaccgctgtcccctttgcactatccttcctctctgtgatgctttttaaaaatgtttctggtctg

SEQ ID NO: 25963 - DNA, 1327 bp, Homo sapiens
  source 1..1327: mol_type = unassigned DNA
gcgcggacccaacctggctgctgcagtacttgctctaactttgccgcagctgcctcccttctctcggaacccactctcctaacccacccccgagaggcggagagaatgtgggagcacttcagagaggcctaggctccggagatcgggccatctgggctctgaaagcaaattagttttccaactcatgtctggctccggcgttacccagacgcctggaaggtccttcctgcagtctgatcaccatttttcctgctgcactgaccaatcagctccccttggccttcaacctcgggaatgatggattaggggagtctagaaatggacgaagccctagaaacgcagctgaagacgagcagaggacgcttctcggctacagaatccctccccaccttggagctcttatctcaggtggacatggactgcagggtccacatgcgacccatcggcctgacgtgggtgctgcaactgaccttggcatggatcctgctagaagcctgtggagggagccgcccactccaagccaggtcccagcaacaccatgggctggcagctgatctgggcaaaggcaagctgcacctggcaggaccttgttgtccctcagagatggacacaacagagacatcgggccctggaaaccatccagaacgctgtggagtgccgagccctgaatgcgaatccttcctggaacacctccaacgtgcccttcgcagtcgcttccgcctgcggctattgggggtacgccaggcacagccgctctgcgaggagctctgccaggcctggttcgccaactgcgaagatgatatcacctgcggcccgacttggctcccactctcagaaaaaaggggctgtgagcccagctgccttacctatggacagaccttcgcagacgggacggacctttgtcgctcggctctgggccacgccctaccggtggctgctcctggagcccgtcactgcttcaacatctccatctccgcggtacctcgtcccagaccaggacgacggggccgggaagctccctcccggcgttcccgcagccctcgcacctccatcctggacgctgcgggcagcgggagtggcagtggaagcggcagcggcccctagcggacgcgtggccctgagttgggggagcgacccttcccccagccccgcccctcaggacacccagaaccccacccctcgtcctctcggccttctgtaatagttttgagatgtctgtccctcctccctggagctccagagacccacccctctccaggttatcccagaaatgacccaactctctcacttttccctctcccctttgaataaagtcgccagctagagc

SEQ ID NO: 25964 - DNA, 2076 bp, Homo sapiens
  source 1..2076: mol_type = unassigned DNA
agaaacccgacggcgcggacccaacctggctgctgcagtacttgctctaactttgccgcagctgcctcccttctctcggaacccactctcctaacccacccccgagaggcggagagaatgtgggagcacttcagagaggcctaggctccggagatcgggccatctgggctctgaaagcaaattagttttccaactcatgtctggctccggcgttacccagacgcctggaaggtccttcctgcagtctgatcaccatttttcctgctgcactgaccaatcagctccccttggccttcaacctcgggaatgatggattaggggagtctagaaatggacgaagccctagaaacgcagctgaagacgagcagaggacgcttctcggctacagaatccctccccaccttggagctcttatctcaggtggacatggactgcagggtccacatgcgacccatcggcctgacgtgggtgctgcaactgaccttggcatggatcctgctagaagcctgtggagggagccgcccactccaagccaggtcccagcaacaccatgggctggcagctgatctgggcaaaggcaagctgcacctggcaggaccttgttgtccctcagagatggacacaacagagacatcgggccctggaaaccatccagaacgctgtggagtgccgagccctgaatgcgaatccttcctggaacacctccaacgtgcccttcgcagtcgcttccgcctgcggctattgggggtacgccaggcacagccgctctgcgaggagctctgccaggcctggttcgccaactgcgaagatgatatcacctgcggcccgacttggctcccactctcagaaaaaaggggctgtgagcccagctgccttacctatggacaggctggagtgcagtggcgcgatctcagctcgatgcaacctccgcctccggggttcaagtgattctcctgccgcaacctcccgaatagctgggatttcaggcgcatgccaccatgcccagctaatttttgtatttttagtagagtcagcgtttcaccatgttggccaggctggtttcgaactcctgacctcaggtgatccgcccacctcggcctcccaaagtgttgggattacaggtgtgagccaccgcccccggcccccaccaagttctttcttaccgtgtctagaccccagagaccggattggtactccccaggtccctgctcccacccttccctagcccaacctcctactgggttgtgccctttgaccccaaaagctctcgaagtccagatttgcccttcccaagaaaccattcctgctctgggtccatccacattttaccctggaggacccagaagcccagtcactctctacaaaaccccagccttgatacagacctctctgcgcgccccccaactgccccaaccctgattcatcccgctagggcccagtaagaacattcaccctccccaaggacctgcccccactcacgttccgcacatagactcccaggccgcacgctccggctctgaccccaatccctaaggaatttacacatttttcccttcccgaggccacgccccccacgtctctggactccgcccactagggccttaactccactttttcctagaccttcgcagacgggacggacctttgtcgctcggctctgggccacgccctaccggtggctgctcctggagcccgtcactgcttcaacatctccatctccgcggtacctcgtcccagaccaggacgacggggccgggaagctccctcccggcgttcccgcagccctcgcacctccatcctggacgctgcgggcagcgggagtggcagtggaagcggcagcggcccctagcggacgcgtggccctgagttgggggagcgacccttcccccagccccgcccctcaggacacccagaaccccacccctcgtcctctcggccttctgtaatagttttgagatgtctgtccctcctccctggagctccagagacccacccctctccaggttatcccagaaatgacccaactctctcacttttccctctcccctttgaataaagtcgccagctagagcacgt

SEQ ID NO: 25965 - DNA, 1043 bp, Homo sapiens
  source 1..1043: mol_type = unassigned DNA
ggaggccgcatagaagagagggaggaattactgaacaggagagggggattggaagacctagggaggtccccttcattctgagaaaagaaggggtctcttgaagactaaaaagctcttatctcaggtggacatggactgcagggtccacatgcgacccatcggcctgacgtgggtgctgcaactgaccttggcatggatcctgctagaagcctgtggagggagccgcccactccaagccaggtcccagcaacaccatgggctggcagctgatctgggcaaaggcaagctgcacctggcaggaccttgttgtccctcagagatggacacaacagagacatcgggccctggaaaccatccagaacgctgtggagtgccgagccctgaatgcgaatccttcctggaacacctccaacgtgcccttcgcagtcgcttccgcctgcggctattgggggtacgccaggcacagccgctctgcgaggagctctgccaggcctggttcgccaactgcgaagatgatatcacctgcggcccgacttggctcccactctcagaaaaaaggggctgtgagcccagctgccttacctatggacagaccttcgcagacgggacggacctttgtcgctcggctctgggccacgccctaccggtggctgctcctggagcccgtcactgcttcaacatctccatctccgcggtacctcgtcccagaccaggacgacggggccgggaagctccctcccggcgttcccgcagccctcgcacctccatcctggacgctgcgggcagcgggagtggcagtggaagcggcagcggcccctagcggacgcgtggccctgagttgggggagcgacccttcccccagccccgcccctcaggacacccagaaccccacccctcgtcctctcggccttctgtaatagttttgagatgtctgtccctcctccctggagctccagagacccacccctctccaggttatcccagaaatgacccaactctctcacttttccctctcccctttgaataaagtcgccagctagagc

SEQ ID NO: 25966 - DNA, 2076 bp, Homo sapiens; identical to SEQ ID NO: 25964
  source 1..2076: mol_type = unassigned DNA

SEQ ID NO: 25967 - DNA, 1024 bp, Homo sapiens
  source 1..1024: mol_type = unassigned DNA
gtagtggaggaggtggaatgaagagtgagaaagctgtctaggtgcctgtccaattagggcagtaggaagaatcctgatggccaggcagctcttatctcaggtggacatggactgcagggtccacatgcgacccatcggcctgacgtgggtgctgcaactgaccttggcatggatcctgctagaagcctgtggagggagccgcccactccaagccaggtcccagcaacaccatgggctggcagctgatctgggcaaaggcaagctgcacctggcaggaccttgttgtccctcagagatggacacaacagagacatcgggccctggaaaccatccagaacgctgtggagtgccgagccctgaatgcgaatccttcctggaacacctccaacgtgcccttcgcagtcgcttccgcctgcggctattgggggtacgccaggcacagccgctctgcgaggagctctgccaggcctggttcgccaactgcgaagatgatatcacctgcggcccgacttggctcccactctcagaaaaaaggggctgtgagcccagctgccttacctatggacagaccttcgcagacgggacggacctttgtcgctcggctctgggccacgccctaccggtggctgctcctggagcccgtcactgcttcaacatctccatctccgcggtacctcgtcccagaccaggacgacggggccgggaagctccctcccggcgttcccgcagccctcgcacctccatcctggacgctgcgggcagcgggagtggcagtggaagcggcagcggcccctagcggacgcgtggccctgagttgggggagcgacccttcccccagccccgcccctcaggacacccagaaccccacccctcgtcctctcggccttctgtaatagttttgagatgtctgtccctcctccctggagctccagagacccacccctctccaggttatcccagaaatgacccaactctctcacttttccctctcccctttgaataaagtcgccagctagagcacgtg

SEQ ID NO: 25968 - DNA, 2572 bp, Homo sapiens
  source 1..2572: mol_type = unassigned DNA
agccccgcgcccaccaccccagctggcgacgtggctccgcggccccggcttcccccggcagctcagcgaccaatgggcgcgcgagcggggccgcccgcagcttcccagcccgaggcccaggcgcgcccctctgctccggctcggggcgggcactggcggagggactggccagtcccctcctccgcgccggccccaaccctgtcgctgccgccgcgctccgagtccccattcccgagctgccgctgttgtcgctcgctcagcgtctccctctcggccgccctctcctcgggacgatggcgcgcggtggccgcggccgccgcctggggttagccctggggctgctgctggcgctggtgctggcgccgcgggttctgcgggccaagcccacggtgcgcaaagagcgcgtggtgcggcccgactcggagctgggcgagcggccccctgaggacaaccagagcttccagtacgaccacgaggccttcctgggcaaggaggactccaagaccttcgaccagctcaccccggacgagagcaaggagaggctagggaagattgttgatcgaatcgacaatgatggggatggctttgtcactactgaggagctgaaaacctggatcaaacgggtgcagaaaagatacatctttgataatgtcgccaaagtctggaaggattatgatagggacaaggatgataaaatttcctgggaagaatacaaacaagccacctatggttactacctaggaaaccccgcagagtttcatgattcttcagatcatcacacctttaaaaagatgctgccacgtgatgagagaagattcaaagctgcagacctcaatggtgacctgacagctactcgggaggagttcactgcctttctgcatcctgaagagtttgaacatatgaaggaaattgtggttttggaaaccctggaggacatcgacaagaacggggatgggtttgtggatcaggatgagtatattgcggatatgttttcccatgaggagaatggccctgagccagactgggttttatcagaacgggagcagtttaacgaattccgggatctgaacaaggacgggaagttagacaaagatgagattcgccactggatcctccctcaagattatgatcatgcacaggctgaggccaggcatctggtatatgaatcagacaaaaacaaggatgagaagctaactaaagaggaaatattggagaactggaacatgtttgtcggaagccaagctaccaattacggggaagatctcacaaaaaatcatgatgagctttgatagacactcaccagaatatggcagactgtcataggcattctgttattgtcttggattgttgctacaattgtctaatttacagcagttgtgatcccacaaaaagcaagtttatacctcagattggggtataaaaattgtttttcgctcagtatttactggaaaatggacatcactagtctttcagtaagatttctctcaaaacacgtgaaaaccttggtaaattgcaattctttctggggatatattggtacaacatgacttaaaacttttttttttctattaaaacttaaaggggaacaaaacttgaaaaagccctgttcttcagaaggtgagtgggttgagggaggcagtaatatgaagtgactgctgtgtattttaactaccagattttttatatttgccactgttaaatagttggaaaggggaaattctgattaagcgaaagtggtatcatcctaggtaagcttatttcagaacaagtctaatatttcagattctttcttttcgactttatactctgagttattacttactgtaagtggtgtatatgaaacctccatgcattttccagtatggatctgctaatatgcacagtaaatccatgtctttgtttgtttttctattaaaaagcaatcaagaaagataatgtgaaaaagaaaggaatttagaggtagggaaaagatgaatgtcagacatttgaagaactatagtaaaatgataaacactaaatatacttgagaaaactttcttaatatgccaatgaggtaggcctgatctttgaaatagtgaataggaatacaatgcatttcctcagtgatcactgattagaatgagttggtgggatccttgggaagccaaacggagcggagttctggatcatgtcccatccagtccagtgaatccacgacccgcagacctgtccccccgcaacagcttataccatggaatgaggacaaggtgatactctgagctgtggactgaactggcagacacaacctgtacagattgaaatttcaccttgtaaggaggaagtgaatgaaataaaggatccccctaaggattttctactgtgtcctgtggtgtttgacttcacagatgctatttgtgacattattcatatagcataaaacagtggggttggatcccatgaataacattataaaggttctggggttttttttcatccaattactagaatgttcagaatagactcatatttactaatttaataaatgtatgtacttaatgcctttacttttctaggtcattttaactataaaatc

SEQ ID NO: 25969 - DNA, 549 bp, Homo sapiens
  source 1..549: mol_type = unassigned DNA
gaaatattggagaactggaacatgtttgtcggaagccaagctaccaattacggggaagatctcacaaaaaatcatgatgagctttgatagacactcaccagaatatggcagactgtcataggcattctgttattgtcttggattgttgctacaattgtctaatttacagcagttgtgatcccacaaaaagcaagtttatacctcagattggggtataaaaattgtttttcgctcagtatttactggaaaatggacatcactagtctttcagtaagatttctctcaaaacacgtgaaaaccttgtgatcactgattagaatgagttggtgggatccttgggaagccaaacggagcggagttctggatcatgtcccatccagtccagtgaatccacgacccgcagacctgtccccccgcaacagcttataccatggaatgaggacaaggtgatactctgagctgtggactgaactggcagacacaacctgtacagattgaaatttcaccttgtaaggaggaagtgaatgaaataaaggatccccctaagga

SEQ ID NO: 25970 - DNA, 2215 bp, Homo sapiens
  source 1..2215: mol_type = unassigned DNA
atataggcctcctcctggcgcgcctccgcaccgcattggtggaccggcccccagcccgtccatgggcgttgtggccgccaccgcaggttccgcctcccgttccctccgccctcaacgtacgtcgcaccgcctctctgtagccgcccgcggagcatcgcagccggcccgggcccccgccagcctccctcctcgcgtccctcggtgtcctccgcgggccggcgcgatgcggctgggcccgaggaccgcggcgttggggctgctgctgctgtgcgccgccgcggccggcgccggcaaggccgaggagctgcactacccgctgggcgagcgccgcagcgactacgaccgcgaggcgctgctgggcgtccaggaagatgtggatgaatatgttaaactcggccacgaagagcagcaaaaaagactgcaggcgatcataaagaaaatcgacttggactcagatggctttctcactgaaagtgaactcagttcatggattcagatgtcttttaagcattatgctatgcaagaagcaaaacaacagtttgttgaatatgataaaaacagtgatgatactgtgacttgggatgaatataacattcagatgtatgatcgtgtgattgactttgatgagaacactgctctggatgatgcagaagaggagtcctttaggaagcttcacttaaaggacaagaagcgatttgaaaaagctaaccaggattcaggtcccggtttgagtcttgaagaatttattgcttttgagcatcctgaagaagttgattatatgacggaatttgtcattcaagaagctttagaagaacatgacaaaaatggtgatggatttgttagtttggaagaatttcttggtgattacaggtgggatccaactgcaaatgaagatccagaatggatacttgttgagaaagacagattcgtgaatgattatgacaaagataacgatggcaggcttgatccccaagagctgttaccttgggtagtacctaataatcagggcattgcacaagaggaggcgcttcatctaattgatgaaatggatttgaatggtgacaaaaagctctctgaagaagagattctggaaaacccggacttgtttctcaccagtgaagccacagattatggcagacagctccatgatgactatttctatcatgatgagctttaatctctgagcctgtctcagtagagtactggctccttttataatttgttaccagctttacttttgtgataaaatattgatgttgtattttacactcttaagtcttaaccacagtcagaattatcttaatgtagattataattttggtcttttaggaaaaaaaaacaaaaatctgatatttatttcaaaatgtattgaagcaacaaaatattaatattgtgccatatgacaacaaagtctttcctaaatactccatctgtttagtactgtattgtggaatatttgagttctatttccatacttgaaaacatggaggattttagagatgcctgaacaatattatttaagtagtatgtgaccgagctataaatttttgtttttgttctaagtagatttaatttgggaactgacaggacaatgtttttaggtttagcattttgtttaaaaacctttaaagaaacctttagaaggacttagacctcacatattaatgttgagaagttctgcttaattttaaaatggtttctataaagggttttattgtatgaaatagaactttatatttttgcatatgtatagatagtaattatatttaatgtataactatagcattatggtgagtggaatttgacattgtccaaacctttttcatttttgagtgattaaaaatgaaatgtcctttgtatatgtttgtttgcttttctttaactttcagataaatattgaatttagcataggttttgtggtattgtacattatcttgcctcatccattcctttatgtggatagttcccaaaactgtcaaattattcttgctgcattttcttattttttttttaaataagagaatcatgttataatataattgaatgtgcacctgacacattttaataattggtgttgtagcaaatgtggttttgctctttggggctataaataatcttgagtaacgcaggttggaattaccaatagagctggtcagttatcaacagtagagctcagtatcaattttactgaaattaaaatcatacttgataagca

SEQ ID NO: 25971 - DNA, 3435 bp, Homo sapiens
  source 1..3435: mol_type = unassigned DNA
aggaggacccggaccaagcaggccattttcacctgcgtaataacaggattgggaatagcgaagcagcggcggcagcagcgagtggagtaggaggaggagcgcaggcagcggccgcggcggggccggaggaagaggaggggggagaaggaggagctgaagcgggaagagcggcaggcagcggctcggcggagttgcagcagaggcggcggcgacgctgagacaccgcagcttccctgagcgccgagtccctccggggacagcagcagggagcgcccgcgcagccaccgagcctctgcccagccaagccgccgtcgccgcgccgggggaccgccagccatggccgcgccgggggatccgcaggacgagctgctgccgctggccggccccgggtcccagtggctcaggcaccggggggagggggagaacgaagcggtgacgccgaaaggggccacgccggcgccgcaggctggggagcccagcccggggttgggcgccagggcccgggaagcggcgtcgcgggaagccggctcgggccccgcccggcagtcgcccgttgccatggaaactgcatccacaggtgtggcaggtgtttccagtgccatggaccacaccttctcaacaacatcaaaagatggggaaggatcgtgttacacatctctcatttctgacatctgctatccacctcaggaggattctacatattttactggaattcttcagaaggaaaatggccacgtcaccatttcagagagccctgaggagctgggtacacccggcccctccttaccagatgtgcctgggatagagtctcgtggcttatttagttctgattctggaatagagatgactcctgcagagtccacggaagtgaacaagatcttagcagaccctctggaccagatgaaagcagaggcctataaatacattgacataaccagacccgaggaggtgaagcaccaagaacaacatcaccccgagctggaagataaagacttggactttaagaataaagacactgacatctcaattaaacctgaaggagtccgtgaacctgacaaaccagctcctgtggagggaaaaatcatcaaggaccatttattggaagaatccacatttgctccatacatagatgatctctctgaagaacagcgcagggctcctcagatcaccacccctgtcaaaatcacactgacggaaatagaaccttctgttgaaaccactacccaagagaagacccctgagaagcaagatatatgtctaaagccaagtcctgacacagtccccactgtcactgtctcggagcctgaagacgacagcccaggatctatcacccctccatcttctggaacagaaccatctgctgcagaatcccaggggaaaggcagcatctccgaggatgagctgatcaccgccatcaaagaagcaaagggattatcgtatgaaaccgccgagaacccacggccggtgggccagctggccgacaggcccgaggtcaaggccaggtccggaccgccaaccatccccagccccctggaccacgaggccagcagcgcggagtcgggggactcagagatcgagctggtgtccgaggaccccatggccgcggaggacgcgctgccctcaggctatgtgagctttggccacgtgggcggcccgccgccctcgcccgcctcgccatccatccagtacagcatcctgagggaggagcgcgaggccgagctggacagcgagctcatcatcgagtcgtgcgacgcctcctcggcctcggaggagagccccaagcgggagcaggactcacccccgatgaagcccagcgccctggatgccatccgggaggagactggcgtccgggccgaggagcgtgcgccaagccggcggggcctggccgagccgggttccttcctcgactacccctcaactgagccccagcctggccccgagctgccccctggagacggagccctggagcctgagacgcccatgttgccacggaagcctgaagaagactcgagttccaaccaaagtcctgcggccacaaagggccctgggcctctaggtcctggcgccccgcccccactgctgtttctcaataagcaaaaagctattgacctgttgtattggcgggacatcaagcagacgggcatcgtgtttgggagtttcctgctgctgctcttctccctgacccagttcagcgtggtgagcgtcgtggcctacctggccctggccgcactctcagccaccatcagtttccgcatctacaagtctgttttacaagcagtgcagaaaaccgacgaaggccaccctttcaaggcctacttggagcttgagatcaccctttctcaggagcagattcagaagtacacggactgcctgcagttctacgtgaacagcacacttaaggaactgaggaggctcttccttgtccaggacctggtggattccttaaaatttgcagtcctgatgtggctcctgacctacgttggcgctctcttcaatggcctgaccctgctgctcatggctgtggtttcaatgtttactctacctgtagtgtatgttaagcaccaggcacagattgaccaatatctgggacttgtgaggactcacataaatgctgttgtggcaaagattcaggctaaaatcccaggcgctaagaggcatgctgagtaaactgatttcccaccggggactggacacaaacaggaatgtctggagtggtaacagctctcttcttactcattactgcaaattgattgtctttcccccctccctccagtaccataatcttagagacaaaccttaaaacagctgtttttaggctgttccttgtactcttaggatatttgagtcacttgtgtcaaccactaaagtatagagaaaagtgtattagatgtggtttttaattttgtgttgctaaaaaaagtgcatgatggtgagagcccaagttatctttccctcttcggtgttcttcttctcttctctgcaatgcttctgtagcttctaatgttccccgtggctaggcctttcctgccgagtgctctgatgcaatagtggaaatcgcttatatgtccttgggttgctggttggattaatctttaataacaatatatagaattgtagactgatgttttagcatttttccaacacacacaacgtaaaaataaaagcagtcgaccgcacttatggtaatcagttttgtataacttaaaataattaaataaatgaataaatccaaaacaaacatgcagtacttttgttgtatgggattggtgggctgatttacatgtatggttactaaaaagtaccagcatgttaactttattacaatttgtattactttctctgtagttcctaatggattcaattacggactctggatatttgcacttatgtacttgatactgaatgcataaataaatgttactaaatgtagaatgt

SEQ ID NO: 25972 - DNA, 1703 bp, Homo sapiens
  source 1..1703: mol_type = unassigned DNA
agaaccgctttacccgtctccagggtagcacccttgggcagcccagccaacgctgtcgcgtggagcggcgcccgcatccccatgcgcgcaggcggctccggggccgcgccgcgctgattcgctgccggccgcgcagactgcggcgccagcgacgctcccgcccctcaccgcgcgccgcctggtgcagcctcagtctctccgcagccgcgcggccactgcgagcccagccgcagcagccgggcaccaacgcttgagtgcacgctcggcgcccccgaggagagccacggcgagcccccaaagcccgcacgatgcaggccactgccgattccaccaagatggactgtgtgtggagcaactggaaaagtcaggctattgacctgttgtattggcgggacatcaagcagacgggcatcgtgtttgggagtttcctgctgctgctcttctccctgacccagttcagcgtggtgagcgtcgtggcctacctggccctggccgcactctcagccaccatcagtttccgcatctacaagtctgttttacaagcagtgcagaaaaccgacgaaggccaccctttcaaggcctacttggagcttgagatcaccctttctcaggagcagattcagaagtacacggactgcctgcagttctacgtgaacagcacacttaaggaactgaggaggctcttccttgtccaggacctggtggattccttaaaatttgcagtcctgatgtggctcctgacctacgttggcgctctcttcaatggcctgaccctgctgctcatggctgtggtttcaatgtttactctacctgtagtgtatgttaagcaccaggcacagattgaccaatatctgggacttgtgaggactcacataaatgctgttgtggcaaagattcaggctaaaatcccaggcgctaagaggcatgctgagtaaactgatttcccaccggggactggacacaaacaggaatgtctggagtggtaacagctctcttcttactcattactgcaaattgattgtctttcccccctccctccagtaccataatcttagagacaaaccttaaaacagctgtttttaggctgttccttgtactcttaggatatttgagtcacttgtgtcaaccactaaagtatagagaaaagtgtattagatgtggtttttaattttgtgttgctaaaaaaagtgcatgatggtgagagcccaagttatctttccctcttcggtgttcttcttctcttctctgcaatgcttctgtagcttctaatgttccccgtggctaggcctttcctgccgagtgctctgatgcaatagtggaaatcgcttatatgtccttgggttgctggttggattaatctttaataacaatatatagaattgtagactgatgttttagcatttttccaacacacacaacgtaaaaataaaagcagtcgaccgcacttatggtaatcagttttgtataacttaaaataattaaataaatgaataaatccaaaacaaacatgcagtacttttgttgtatgggattggtgggctgatttacatgtatggttactaaaaagtaccagcatgttaactttattacaatttgtattactttctctgtagttcctaatggattcaattacggactctggatatttgcacttatgtacttgatactgaatgcataaataaatgttactaaatgtagaatgt

SEQ ID NO: 25973 - DNA, 2130 bp, Homo sapiens
  source 1..2130: mol_type = unassigned DNA
cgtgtgtgtgcctccgtggctctccttcgctctgtgggacgacagaaccatctgctgcagaatcccaggggaaaggcagcatctccgaggatgagctgatcaccgccatcaaagaagcaaagggattatcgtatgaaaccgccgagaacccacggccggtgggccagctggccgacaggcccgaggtcaaggccaggtccggaccgccaaccatccccagccccctggaccacgaggccagcagcgcggagtcgggggactcagagatcgagctggtgtccgaggaccccatggccgcggaggacgcgctgccctcaggctatgtgagctttggccacgtgggcggcccgccgccctcgcccgcctcgccatccatccagtacagcatcctgagggaggagcgcgaggccgagctggacagcgagctcatcatcgagtcgtgcgacgcctcctcggcctcggaggagagccccaagcgggagcaggactcacccccgatgaagcccagcgccctggatgccatccgggaggagactggcgtccgggccgaggagcgtgcgccaagccggcggggcctggccgagccgggttccttcctcgactacccctcaactgagccccagcctggccccgagctgccccctggagacggagccctggagcctgagacgcccatgttgccacggaagcctgaagaagactcgagttccaaccaaagtcctgcggccacaaagggccctgggcctctaggtcctggcgccccgcccccactgctgtttctcaataagcaaaaagctattgacctgttgtattggcgggacatcaagcagacgggcatcgtgtttgggagtttcctgctgctgctcttctccctgacccagttcagcgtggtgagcgtcgtggcctacctggccctggccgcactctcagccaccatcagtttccgcatctacaagtctgttttacaagcagtgcagaaaaccgacgaaggccaccctttcaaggcctacttggagcttgagatcaccctttctcaggagcagattcagaagtacacggactgcctgcagttctacgtgaacagcacacttaaggaactgaggaggctcttccttgtccaggacctggtggattccttaaaatttgcagtcctgatgtggctcctgacctacgttggcgctctcttcaatggcctgaccctgctgctcatggctgtggtttcaatgtttactctacctgtagtgtatgttaagcaccaggcacagattgaccaatatctgggacttgtgaggactcacataaatgctgttgtggcaaagattcaggctaaaatcccaggcgctaagaggcatgctgagtaaactgatttcccaccggggactggacacaaacaggaatgtctggagtggtaacagctctcttcttactcattactgcaaattgattgtctttcccccctccctccagtaccataatcttagagacaaaccttaaaacagctgtttttaggctgttccttgtactcttaggatatttgagtcacttgtgtcaaccactaaagtatagagaaaagtgtattagatgtggtttttaattttgtgttgctaaaaaaagtgcatgatggtgagagcccaagttatctttccctcttcggtgttcttcttctcttctctgcaatgcttctgtagcttctaatgttccccgtggctaggcctttcctgccgagtgctctgatgcaatagtggaaatcgcttatatgtccttgggttgctggttggattaatctttaataacaatatatagaattgtagactgatgttttagcatttttccaacacacacaacgtaaaaataaaagcagtcgaccgcacttatggtaatcagttttgtataacttaaaataattaaataaatgaataaatccaaaacaaacatgcagtacttttgttgtatgggattggtgggctgatttacatgtatggttactaaaaagtaccagcatgttaactttattacaatttgtattactttctctgtagttcctaatggattcaattacggactctggatatttgcacttatgtacttgatactgaatgcataaataaatgttactaaatgtagaatgtt

SEQ ID NO: 25974 - DNA, 2647 bp, Homo sapiens
  source 1..2647: mol_type = unassigned DNA
ctgagacaccgcagcttccctgagcgccgagtccctccggggacagcagcagggagcgcccgcgcagccaccgagcctctgcccagccaagccgccgtcgccgcgccggtcgcccgttgccatggaaactgcatccacaggtgtggcaggtgtttccagtgccatggaccacaccttctcaacaacatcaaaagatggggaaggatcgtgttacacatctctcatttctgacatctgctatccacctcaggaggattctacatattttactggaattcttcagaaggaaaatggccacgtcaccatttcagagagccctgaggagctgggtacacccggcccctccttaccagatgtgcctgggatagagtctcgtggcttatttagttctgattctggaatagagatgactcctgcagagtccacggaagtgaacaagatcttagcagaccctctggaccagatgaaagcagaggcctataaatacattgacataaccagacccgaggaggtgaagcaccaagaacaacatcaccccgagctggaagataaagacttggactttaagaataaagacactgacatctcaattaaacctgaaggagtccgtgaacctgacaaaccagctcctgtggagggaaaaatcatcaaggaccatttattggaagaatccacatttgctccatacatagatgatctctctgaagaacagcgcagggctcctcagatcaccacccctgtcaaaatcacactgacggaaatagaaccttctgttgaaaccactacccaagagaagacccctgagaagcaagatatatgtctaaagccaagtcctgacacagtccccactgtcactgtctcggagcctgaagacgacagcccaggatctatcacccctccatcttctggaacagaaccatctgctgcagaatcccaggggaaaggcagcatctccgaggatgagctgatcaccgccatcaaagaagcaaagggattatcgtatgaaaccgccgagaacccacggccggtgggccagctggccgacaggcccgaggtcaaggccaggtccggaccgccaaccatccccagccccctggaccacgaggccagcagcgcggagtcgggggactcagagatcgagctggtgtccgaggaccccatggccgcggaggacgcgctgccctcaggctatgtgagctttggccacgtgggcggcccgccgccctcgcccgcctcgccatccatccagtacagcatcctgagggaggagcgcgaggccgagctggacagcgagctcatcatcgagtcgtgcgacgcctcctcggcctcggaggagagccccaagcgggagcaggactcacccccgatgaagcccagcgccctggatgccatccgggaggagactggcgtccgggccgaggagcgtgcgccaagccggcggggcctggccgagccgggttccttcctcgactacccctcaactgagccccagcctggccccgagctgccccctggagacggagccctggagcctgagacgcccatgttgccacggaagcctgaagaagactcgagttccaaccaaagtcctgcggccacaaagggccctgggcctctaggtcctggcgccccgcccccactgctgtttctcaataagcaaaaagctattgacctgttgtattggcgggacatcaagcagacgggcatcgtgtttgggagtttcctgctgctgctcttctccctgacccagttcagcgtggtgagcgtcgtggcctacctggccctggccgcactctcagccaccatcagtttccgcatctacaagtctgttttacaagcagtgcagaaaaccgacgaaggccaccctttcaaggcctacttggagcttgagatcaccctttctcaggagcagattcagaagtacacggactgcctgcagttctacgtgaacagcacacttaaggaactgaggaggctcttccttgtccaggacctggtggattccttaaaatttgcagtcctgatgtggctcctgacctacgttggcgctctcttcaatggcctgaccctgctgctcatggctgtggtttcaatgtttactctacctgtagtgtatgttaagcaccaggcacagattgaccaatatctgggacttgtgaggactcacataaatgctgttgtggcaaagattcaggctaaaatcccaggcgctaagaggcatgctgagtaaactgatttcccaccggggactggacacaaacaggaatgtctggagtggtaacagctctcttcttactcattactgcaaattgattgtctttcccccctccctccagtaccataatcttagagacaaaccttaaaacagctgtttttaggctgttccttgtactcttaggatatttgagtcacttgtgtcaaccactaaagtatagagaaaagtgtattagatgtggtttttaattttgtgttgctaaaaaaagtgcatgatggtgagagcccaagttatctttccctcttcggtgttcttcttctcttctctgcaatgcttctgtagcttctaatgttccccgtggctaggcctttcctgccgagtgctctgatgcaatagtggaaatcgcttatatgtccttgggttgctggttgg

SEQ ID NO: 25975 - DNA, 2282 bp, Homo sapiens
  source 1..2282: mol_type = unassigned DNA
cgcgctgcagtgccttccccacctcggccccgcccgcccccgccgagccgagcaccagggcggcggcggcggcggcggcggcggcggcggctggagcagcccgggaggaggaggcggcgagaatggcagcggcgtcgtgggcgcggcggagatgagcgcccgcgaccccgggcccagggcggcacagccggagtgggcgggggtcccgatgcaggcccgaggggggccatggggcaggtcctgccggtcttcgcccactgcaaagaagctccgtctacagcctcctcaactcctgattccacagaaggagggaacgacgactctgattttcgagagctgcacacagcccgggaattctcagaggaggacgaggaggagaccacgtcgcaggactggggcaccccccgggagctgaccttctcctacatcgcctttgatggtgtagtgggctccgggggccgcagggattcaactgcccgccgcccccgcccccagggccgctcagtctcggaaccacgagaccagcaccctcagcccagcctgggcgacagcttggagagcatccccagcctgagccaatccccggagcctggacgacggggtgatcctgacaccgcgcctccatccgagcgccctctggaagacctgaggcttcggttggaccatctgggctgggtggcccggggaacgggatccggggaggactcttccaccagcagctccaccccgctggaagacgaagaaccccaagaacccaacagattggagacaggagaagctggggaagaactggacctacgactccgacttgctcagccctcatcgcccgaggtcttgactccccagctcagtccgggctctgggacaccccaggccggtactccgtccccatcccgatcgcgagattcgaactctgggcccgaagagccattgctggaagaggaagaaaagcagtgggggccactggagcgagagccagtaaggggacagtgcctcgatagcacggaccaattagaattcacggtggagccacgccttctaggaacagctatggaatggttaaagacatcattgcttttggctgtttacaagacggttccaattttggaattgtccccacctctgtggacagccattggctgggtccaaaggggccccaccccccctactcctgtcctccgggttctactgaagtgggcaaaatccccgagaagcagcggtgtccccagcctctcactcggagccgatatggggagtaaagtggcggacctgctgtactggaaggacacgaggacgtcaggagtggtcttcacaggcctgatggtctccctcctctgcctcctgcactttagcatcgtgtccgtggccgcgcacttggctctgttgctgctctgcggcaccatctctctcagggtttaccgcaaagtgctgcaggccgtgcaccggggggatggagccaaccctttccaggcctacctggatgtggacctcaccctgactcgggagcagacggaacgtttgtcccaccagatcacctcccgcgtggtctcggcggccacgcagctgcggcacttcttcctggtagaagacctcgtggattccctcaagctggccctcctcttctacatcttgaccttcgtgggtgccatcttcaatggtttgactcttctcattctgggagtgattggtctattcaccatccccctgctgtaccggcagcaccaggctcagatcgaccaatatgtggggttggtgaccaatcagttgagccacatcaaagctaagatccgagctaaaatcccagggaccggagccctggcctctgcagcagccgcagtctccggatccaaagccaaagccgaatgagaacggtgtctctgcccgcaggacgcctgcccccagcccccgcagccctctggccccctccatctcttgtccgttcccacccacccccctcctcggcccgagccttttcccggtgggtgtcaggatcactcccactagggactctgcgctaattacctgagcgaccaggactacatttcccaagaggctctgctccaggagtccaggaaagacgaggcaccttggccgcggggcctgctgggacttgtagttgcctagacagggcaccaccctgcacttccggacccgccgctggaggcgccgtgaggcgttggtgtctcctggatgctactagccccaacgccggggctttgcatggggcccaggggaggcctgagcttggatttacactgtaataaagactcctgtggaaaacc

SEQ ID NO: 25976 - DNA, 2065 bp, Homo sapiens
  source 1..2065: mol_type = unassigned DNA
cgcgcgctgcagtgccttccccacctcggccccgcccgcccccgccgagccgagcaccagggcggcggcggcggcggcggcggcggcggcggctggagcagcccgggaggaggaggcggcgagaatggcagcggcgtcgtgggcgcggcggagatgagcgcccgcgaccccgggcccagggcggcacagccggagtgggcgggggtcccgatgcaggcccgaggggggccatggggcaggtcctgccggtcttcgcccactgcaaagaagctccgtctacagcctcctcaactcctgattccacagaaggagggaacgacgactctgattttcgagagctgcacacagcccgggaattctcagaggaggacgaggaggagaccacgtcgcaggactggggcaccccccgggagctgaccttctcctacatcgcctttgatggtgtagtgggctccgggggccgcagggattcaactgcccgccgcccccgcccccagggccgctcagtctcggaaccacgagaccagcaccctcagcccagcctgggcgacagcttggagagcatccccagcctgagccaatccccggagcctggacgacggggtgatcctgacaccgcgcctccatccgagcgccctctggaagacctgaggcttcggttggaccatctgggctgggtggcccggggaacgggatccggggaggactcttccaccagcagctccaccccgctggaagacgaagaaccccaagaacccaacagattggagacaggagaagctggggaagaactggacctacgactccgacttgctcagccctcatcgcccgaggtcttgactccccagctcagtccgggctctgggacaccccaggccggtactccgtccccatcccgatcgcgagattcgaactctgggcccgaagagccattgctggaagaggaagaaaagcagtgggggccactggagcgagagccagtaaggggacagtgcctcgatagcacggaccaattagaattcacggtggagccacgccttctagtggcggacctgctgtactggaaggacacgaggacgtcaggagtggtcttcacaggcctgatggtctccctcctctgcctcctgcactttagcatcgtgtccgtggccgcgcacttggctctgttgctgctctgcggcaccatctctctcagggtttaccgcaaagtgctgcaggccgtgcaccggggggatggagccaaccctttccaggcctacctggatgtggacctcaccctgactcgggagcagacggaacgtttgtcccaccagatcacctcccgcgtggtctcggcggccacgcagctgcggcacttcttcctggtagaagacctcgtggattccctcaagctggccctcctcttctacatcttgaccttcgtgggtgccatcttcaatggtttgactcttctcattctgggagtgattggtctattcaccatccccctgctgtaccggcagcaccaggctcagatcgaccaatatgtggggttggtgaccaatcagttgagccacatcaaagctaagatccgagctaaaatcccagggaccggagccctggcctctgcagcagccgcagtctccggatccaaagccaaagccgaatgagaacggtgtctctgcccgcaggacgcctgcccccagcccccgcagccctctggccccctccatctcttgtccgttcccacccacccccctcctcggcccgagccttttcccggtgggtgtcaggatcactcccactagggactctgcgctaattacctgagcgaccaggactacatttcccaagaggctctgctccaggagtccaggaaagacgaggcaccttggccgcggggcctgctgggacttgtagttgcctagacagggcaccaccctgcacttccggacccgccgctggaggcgccgtgaggcgttggtgtctcctggatgctactagccccaacgccggggctttgcatggggcccaggggaggcctgagcttggatttacactgtaataaagactcctgtggaaaacc

SEQ ID NO: 25977 - DNA, 1078 bp, Homo sapiens
  source 1..1078: mol_type = unassigned DNA
ccccgagaagcagcggtgtccccagcctctcactcggagccgatatggggagtaaagtggcggacctgctgtactggaaggacacgaggacgtcaggagtggtcttcacaggcctgatggtctccctcctctgcctcctgcactttagcatcgtgtccgtggccgcgcacttggctctgttgctgctctgcggcaccatctctctcagggtttaccgcaaagtgctgcaggccgtgcaccggggggatggagccaaccctttccaggcctacctggatgtggacctcaccctgactcgggagcagacggaacgtttgtcccaccagatcacctcccgcgtggtctcggcggccacgcagctgcggcacttcttcctggtagaagacctcgtggattccctcaagctggccctcctcttctacatcttgaccttcgtgggtgccatcttcaatggtttgactcttctcattctgggagtgattggtctattcaccatccccctgctgtaccggcagcaccaggctcagatcgaccaatatgtggggttggtgaccaatcagttgagccacatcaaagctaagatccgagctaaaatcccagggaccggagccctggcctctgcagcagccgcagtctccggatccaaagccaaagccgaatgagaacggtgtctctgcccgcaggacgcctgcccccagcccccgcagccctctggccccctccatctcttgtccgttcccacccacccccctcctcggcccgagccttttcccggtgggtgtcaggatcactcccactagggactctgcgctaattacctgagcgaccaggactacatttcccaagaggctctgctccaggagtccaggaaagacgaggcaccttggccgcggggcctgctgggacttgtagttgcctagacagggcaccaccctgcacttccggacccgccgctggaggcgccgtgaggcgttggtgtctcctggatgctactagccccaacgccggggctttgcatggggcccaggggaggcctgagcttggatttacactgtaataaagactcctgtggaaaacc

SEQ ID NO: 25978 - DNA, 4886 bp, Homo sapiens
  source 1..4886: mol_type = unassigned DNA
gctcggctgagtcagtcagtctgtcggagtctgtcctcggagcaggcggagtaaagggacttgagcgagccagttgccggattattctatttcccctccctctctcccgccccgtatctcttttcacccttctcccaccctcgctcgcgtagccatggcggagccgtcggcggccactcagtcccattccatctcctcgtcgtccttcggagccgagccgtccgcgcccggcggcggcgggagcccaggagcctgccccgccctggggacgaagagctgcagctcctcctgtgcggagggattgagctctctttgctctgatgagccatcttcagaaattatgacttcttcctttctttcatcttctgaaatacataacactggccttacaatactacatggagaaaaaagccatgtgttagggagccagcctattttagccaaagaaggaaaagaccacttggatcttctagatatgaaaaagatggaaaagcctcaggggaccagcaacaacgtatcagactcttcagtttctcttgcagcaggagttcattgtgaccgtccttctattccagccagtttcccagagcatcctgcttttctctcaaagaaaattggtcaagtggaagagcaaatagataaagagaccaagaacccaaatggggtatcaagtagggaggctaaaactgcattggatgctgatgacagattcactttgctgacagcccagaaaccacctactgagtactctaaggtagaaggcatttatacatattctttgtctccatccaaagtttcaggagatgatgttattgaaaaggattcccctgaatcaccatttgaagtaattattgacaaagcagcatttgacaaagaatttaaagactcatataaggagagcacagatgattttggtagctggtctgtgcacactgataaagaatcatccgaagacatttcagagactaatgacaagctttttccactgagaaataaagaggcaggacgttacccaatgtctgcattgctcagtaggcagttttcacacacaaatgcagcactggaagaggtgtccagatgcgtgaatgatatgcataactttactaacgaaatactgacttgggatctggttccccaagtgaaacaacagaccgataaatcttctgactgcatcacaaaaactacaggacttgacatgagtgaatataattcagaaattccagttgtaaatcttaaaactagcactcatcagaaaactcctgtatgttctattgatgggagcactcccatcactaaatcaacaggtgattgggcagaagcatctctccagcaagaaaatgctattactggaaaacctgtacctgactctttgaattccacaaaagaattcagtatcaaaggtgtgcaaggcaatatgcagaaacaggatgacacacttgcagaattacctggatctccacctgagaaatgtgactctttgggttctggagtggccacagtgaaagtggttttacctgatgaccacctgaaagatgaaatggactggcagagctctgcattgggagaaatcacagaagctgatagttctggtgagtctgatgacacagtaatagaggacatcacagcagatacatcatttgaaaataacaaaattcaggctgaaaaacctgtttccattccaagtgctgttgtaaaaacaggtgaaagagaaatcaaagagattcccagttgtgagagagaagaaaaaacatctaaaaactttgaagaattggtcagtgactctgagctgcatcaagatcagcctgatattcttggaaggagtccagctagtgaggcagcatgttcaaaagtacccgatacgaatgtctccttagaagatgtgagtgaagttgctcctgaaaagcctattactactgagaaccccaaacttccttcaacagtgtctccaaatgtttttaatgagacagaattctcattaaatgtgacaacatctgcctatttggagtcattacatgggaaaaatgttaaacatatagatgattcctccccagaggacctgatagcagcctttacagaaaccagagataaaggaatagtagatagtgaaagaaatgcttttaaagcaatatcagagaagatgacagactttaaaacaactcctcctgtagaagtcttacatgaaaatgagtccggtggttctgaaattaaagacattggaagcaaatacagtgaacaaagcaaagaaacaaatggaagtgagcctctaggtgttttccctacccaaggtactccagtagcatctcttgacttagaacaagaacagctcacaattaaggctcttaaagaattaggtgaaagacaggttgagaagtcaacttctgcacagcgtgacgcagaattgccttctgaagaagtactgaagcaaactttcacatttgctccagaatcttggccacagagatcatatgacatcctagaacgtaatgtcaagaatggatctgatcttgggatttcccagaagcccatcactatcagagaaactactagggtagatgctgtttccagccttagcaagactgaattggtaaaaaagcatgtcctagcaagacttctgacagacttctcagtgcacgatctgattttctggagagatgtgaagaagactgggtttgtctttggcaccacgctgatcatgctgctttccctggcagctttcagtgtcatcagtgtggtttcttacctcatcctggctcttctctctgtcaccatcagcttcaggatctacaagtccgtcatccaagctgtacagaagtcagaagaaggccatccattcaaagcctacctggacgtagacattactctgtcctcagaagctttccataattacatgaatgctgccatggtgcacatcaacagggccctgaaactcattattcgtctctttctggtagaagatctggttgactccttgaagctggctgtcttcatgtggctgatgacctatgttggtgctgtttttaacggaatcacccttctaattcttgctgaactgctcattttcagtgtcccgattgtctatgagaagtacaagacccagattgatcactatgttggcatcgcccgagatcagaccaagtcaattgttgaaaagatccaagcaaaactccctggaatcgccaaaaaaaaggcagaataagtacatggaaaccagaaatgcaacagttactaaaacaccatttaatagttataacgtcgttacttgtactatgaaggaaaatactcagtgtcagcttgagcctgcattccaagctttttttttaatttggtgttttctcccatcctttccctttaaccctcagtatcaagcacaaaaattgatggactgataaaagaactatcttagaactcagaagaagaaagaatcaaattcataggataagtcaataccttaatggtggtagagcctttacctgtagcttgaaaggggaaagattggaggtaagagagaaaatgaaagaacacctctgggtccttctgtccagttttcagcactagtcttactcagctatccattatagttttgcccttaagaagtcatgattaacttatgaaaaaattatttggggacaggagtgtgataccttccttggtttttttttgcagccctcaaatcctatcttcctgccccacaatgtgagcagctacccctgatactccttttctttaatgatttaactatcaacttgataaataacttataggtgatagtgataattcctgattccaagaatgccatctgataaaaaagaatagaaatggaaagtgggactgagagggagtcagcaggcatgctgcggtggcggtcactccctctgccactatccccagggaaggaaaggctccgccatttgggaaagtggtttctacgtcactggacaccggttctgagcattagtttgagaactcgttcccgaatgtgctttcctccctctcccctgcccacctcaagtttaataaataaggttgtacttttcttactataaaataaatgtctgtaactgctgtgcactgctgtaaacttgttagagaaaaaaataacctgcatgtgggctcctcagttattgagtttttgtgatcctatctcagtctgggggggaacattctcaagaggtgaaatacagaaagcctttttttcttgatcttttcccgagattcaaatctccgattcccatttgggggcaagtttttttcttcaccttcaatatgagaattcagcgaacttgaaagaaaaatcatctgtgagttccttcaggttctcactcatagtcatgatccttcagagggaatatgcactggcgagtttaaagtaagggctatgatatttgatggtcccaaagtacggcagctgcaaaaagtagtggaaggaaattgtctacgtgtcttggaaaaattagttaggaatttggatgggtaaaaggtacccttgccttactccatcttattttcttagccccctttgagtgttttaactggtttcatgtcctagtaggaagtgcattctccatcctcatcctctgccctcccaggaagtcagtgattgtctttttgggcttcccctccaaaggaccttctgcagtggaagtgccacatccagttcttttcttttgttgctgctgtgtttagataattgaagagatctttgtgccacacaggatttttttttttttttaagaaaaacctatagatgaaaaattactaatgaaactgtgtgtacgtgtctgtgcgtgcaacataaaaatacagtagcacctaaggagcttgaatcttggttcctgtaaaatttcaaattgatgtggtattaataaaaaaaaaaaaaacacaaacaa

SEQ ID NO: 25979 - DNA, 2524 bp, Homo sapiens
  source 1..2524: mol_type = unassigned DNA
gtgcgcatgcgcgctcgcgctcccgccctctagctgcgctcggctgagtcagtcagtctgtcggagtctgtcctcggagcaggcggagtaaagggacttgagcgagccagttgccggattattctatttcccctccctctctcccgccccgtatctcttttcacccttctcccaccctcgctcgcgtagccatggcggagccgtcggcggccactcagtcccattccatctcctcgtcgtccttcggagccgagccgtccgcgcccggcggcggcgggagcccaggagcctgccccgccctggggacgaagagctgcagctcctcctgtgcggtgcacgatctgattttctggagagatgtgaagaagactgggtttgtctttggcaccacgctgatcatgctgctttccctggcagctttcagtgtcatcagtgtggtttcttacctcatcctggctcttctctctgtcaccatcagcttcaggatctacaagtccgtcatccaagctgtacagaagtcagaagaaggccatccattcaaagcctacctggacgtagacattactctgtcctcagaagctttccataattacatgaatgctgccatggtgcacatcaacagggccctgaaactcattattcgtctctttctggtagaagatctggttgactccttgaagctggctgtcttcatgtggctgatgacctatgttggtgctgtttttaacggaatcacccttctaattcttgctgaactgctcattttcagtgtcccgattgtctatgagaagtacaaggatccaagcaaaactccctggaatcgccaaaaaaaaggcagaataagtacatggaaaccagaaatgcaacagttactaaaacaccatttaatagttataacgtcgttacttgtactatgaaggaaaatactcagtgtcagcttgagcctgcattccaagctttttttttaatttggtgttttctcccatcctttccctttaaccctcagtatcaagcacaaaaattgatggactgataaaagaactatcttagaactcagaagaagaaagaatcaaattcataggataagtcaataccttaatggtggtagagcctttacctgtagcttgaaaggggaaagattggaggtaagagagaaaatgaaagaacacctctgggtccttctgtccagttttcagcactagtcttactcagctatccattatagttttgcccttaagaagtcatgattaacttatgaaaaaattatttggggacaggagtgtgataccttccttggtttttttttgcagccctcaaatcctatcttcctgccccacaatgtgagcagctacccctgatactccttttctttaatgatttaactatcaacttgataaataacttataggtgatagtgataattcctgattccaagaatgccatctgataaaaaagaatagaaatggaaagtgggactgagagggagtcagcaggcatgctgcggtggcggtcactccctctgccactatccccagggaaggaaaggctccgccatttgggaaagtggtttctacgtcactggacaccggttctgagcattagtttgagaactcgttcccgaatgtgctttcctccctctcccctgcccacctcaagtttaataaataaggttgtacttttcttactataaaataaatgtctgtaactgctgtgcactgctgtaaacttgttagagaaaaaaataacctgcatgtgggctcctcagttattgagtttttgtgatcctatctcagtctgggggggaacattctcaagaggtgaaatacagaaagcctttttttcttgatcttttcccgagattcaaatctccgattcccatttgggggcaagtttttttcttcaccttcaatatgagaattcagcgaacttgaaagaaaaatcatctgtgagttccttcaggttctcactcatagtcatgatccttcagagggaatatgcactggcgagtttaaagtaagggctatgatatttgatggtcccaaagtacggcagctgcaaaaagtagtggaaggaaattgtctacgtgtcttggaaaaattagttaggaatttggatgggtaaaaggtacccttgccttactccatcttattttcttagccccctttgagtgttttaactggtttcatgtcctagtaggaagtgcattctccatcctcatcctctgccctcccaggaagtcagtgattgtctttttgggcttcccctccaaaggaccttctgcagtggaagtgccacatccagttcttttcttttgttgctgctgtgtttagataattgaagagatctttgtgccacacaggatttttttttttttttaagaaaaacctatagatgaaaaattactaatgaaactgtgtgtacgtgtctgtgcgtgcaacataaaaatacagtagcacctaaggagcttgaatcttggttcctgtaaaatttcaaattgatgtggtattaataaaaaaaaaaaaaa

SEQ ID NO: 25980 - DNA, 1407 bp, Homo sapiens
  source 1..1407: mol_type = unassigned DNA
ttcccctccctctctcccgccccgtatctcttttcacccttctcccaccctcgctcgcgtagccatggcggagccgtcggcggccactcagtcccattccatctcctcgtcgtccttcggagccgagccgtccgcgcccggcggcggcgggagcccaggagcctgccccgccctggggacgaagagctgcagctcctcctgtgcggtgcacgatctgattttctggagagatgtgaagaagactgggtttgtctttggcaccacgctgatcatgctgctttccctggcagctttcagtgtcatcagtgtggtttcttacctcatcctggctcttctctctgtcaccatcagcttcaggatctacaagtccgtcatccaagctgtacagaagtcagaagaaggccatccattcaaacccagattgatcactatgttggcatcgcccgagatcagaccaagtcaattgttgaaaagatccaagcaaaactccctggaatcgccaaaaaaaaggcagaataagtacatggaaaccagaaatgcaacagttactaaaacaccatttaatagttataacgtcgttacttgtactatgaaggaaaatactcagtgtcagcttgagcctgcattccaagctttttttttaatttggtgttttctcccatcctttccctttaaccctcagtatcaagcacaaaaattgatggactgataaaagaactatcttagaactcagaagaagaaagaatcaaattcataggataagtcaataccttaatggtggtagagcctttacctgtagcttgaaaggggaaagattggaggtaagagagaaaatgaaagaacacctctgggtccttctgtccagttttcagcactagtcttactcagctatccattatagttttgcccttaagaagtcatgattaacttatgaaaaaattatttggggacaggagtgtgataccttccttggtttttttttgcagccctcaaatcctatcttcctgccccacaatgtgagcagctacccctgatactccttttctttaatgatttaactatcaacttgataaataacttataggtgatagtgataattcctgattccaagaatgccatctgataaaaaagaatagaaatggaaagtgggactgagagggagtcagcaggcatgctgcggtggcggtcactccctctgccactatccccagggaaggaaaggctccgccatttgggaaagtggtttctacgtcactggacaccggttctgagcattagtttgagaactcgttcccgaatgtgctttcctccctctcccctgcccacctcaagtttaataaataaggttgtacttttcttactataaaataaatgtctgtaactgctgtgcactgctgtaaacttgtt

SEQ ID NO: 25981 - DNA, 2619 bp, Homo sapiens
  source 1..2619: mol_type = unassigned DNA
gcatgcgcgctcgcgctcccgccctctagctgcgctcggctgagtcagtcagtctgtcggagtctgtcctcggagcaggcggagtaaagggacttgagcgagccagttgccggattattctatttcccctccctctctcccgccccgtatctcttttcacccttctcccaccctcgctcgcgtagccatggcggagccgtcggcggccactcagtcccattccatctcctcgtcgtccttcggagccgagccgtccgcgcccggcggcggcgggagcccaggagcctgccccgccctggggacgaagagctgcagctcctcctgtgcggattcctttgtttcttcctcttcctctcagcctgtatctctattttcgacctcacaagtgcacgatctgattttctggagagatgtgaagaagactgggtttgtctttggcaccacgctgatcatgctgctttccctggcagctttcagtgtcatcagtgtggtttcttacctcatcctggctcttctctctgtcaccatcagcttcaggatctacaagtccgtcatccaagctgtacagaagtcagaagaaggccatccattcaaagcctacctggacgtagacattactctgtcctcagaagctttccataattacatgaatgctgccatggtgcacatcaacagggccctgaaactcattattcgtctctttctggtagaagatctggttgactccttgaagctggctgtcttcatgtggctgatgacctatgttggtgctgtttttaacggaatcacccttctaattcttgctgaactgctcattttcagtgtcccgattgtctatgagaagtacaagacccagattgatcactatgttggcatcgcccgagatcagaccaagtcaattgttgaaaagatccaagcaaaactccctggaatcgccaaaaaaaaggcagaataagtacatggaaaccagaaatgcaacagttactaaaacaccatttaatagttataacgtcgttacttgtactatgaaggaaaatactcagtgtcagcttgagcctgcattccaagctttttttttaatttggtgttttctcccatcctttccctttaaccctcagtatcaagcacaaaaattgatggactgataaaagaactatcttagaactcagaagaagaaagaatcaaattcataggataagtcaataccttaatggtggtagagcctttacctgtagcttgaaaggggaaagattggaggtaagagagaaaatgaaagaacacctctgggtccttctgtccagttttcagcactagtcttactcagctatccattatagttttgcccttaagaagtcatgattaacttatgaaaaaattatttggggacaggagtgtgataccttccttggtttttttttgcagccctcaaatcctatcttcctgccccacaatgtgagcagctacccctgatactccttttctttaatgatttaactatcaacttgataaataacttataggtgatagtgataattcctgattccaagaatgccatctgataaaaaagaatagaaatggaaagtgggactgagagggagtcagcaggcatgctgcggtggcggtcactccctctgccactatccccagggaaggaaaggctccgccatttgggaaagtggtttctacgtcactggacaccggttctgagcattagtttgagaactcgttcccgaatgtgctttcctccctctcccctgcccacctcaagtttaataaataaggttgtacttttcttactataaaataaatgtctgtaactgctgtgcactgctgtaaacttgttagagaaaaaaataacctgcatgtgggctcctcagttattgagtttttgtgatcctatctcagtctgggggggaacattctcaagaggtgaaatacagaaagcctttttttcttgatcttttcccgagattcaaatctccgattcccatttgggggcaagtttttttcttcaccttcaatatgagaattcagcgaacttgaaagaaaaatcatctgtgagttccttcaggttctcactcatagtcatgatccttcagagggaatatgcactggcgagtttaaagtaagggctatgatatttgatggtcccaaagtacggcagctgcaaaaagtagtggaaggaaattgtctacgtgtcttggaaaaattagttaggaatttggatgggtaaaaggtacccttgccttactccatcttattttcttagccccctttgagtgttttaactggtttcatgtcctagtaggaagtgcattctccatcctcatcctctgccctcccaggaagtcagtgattgtctttttgggcttcccctccaaaggaccttctgcagtggaagtgccacatccagttcttttcttttgttgctgctgtgtttagataattgaagagatctttgtgccacacaggatttttttttttttttaagaaaaacctatagatgaaaaattactaatgaaactgtgtgtacgtgtctgtgcgtgcaacataaaaatacagtagcacctaaggagcttgaatcttggttcctgtaaaatttcaaattgatgtggtatt

SEQ ID NO: 25982 - DNA, 4937 bp, Homo sapiens
  source 1..4937: mol_type = unassigned DNA
gctcggctgagtcagtcagtctgtcggagtctgtcctcggagcaggcggagtaaagggacttgagcgagccagttgccggattattctatttcccctccctctctcccgccccgtatctcttttcacccttctcccaccctcgctcgcgtagccatggcggagccgtcggcggccactcagtcccattccatctcctcgtcgtccttcggagccgagccgtccgcgcccggcggcggcgggagcccaggagcctgccccgccctggggacgaagagctgcagctcctcctgtgcggattcctttgtttcttcctcttcctctcagcctgtatctctattttcgacctcacaagagggattgagctctctttgctctgatgagccatcttcagaaattatgacttcttcctttctttcatcttctgaaatacataacactggccttacaatactacatggagaaaaaagccatgtgttagggagccagcctattttagccaaagaaggaaaagaccacttggatcttctagatatgaaaaagatggaaaagcctcaggggaccagcaacaacgtatcagactcttcagtttctcttgcagcaggagttcattgtgaccgtccttctattccagccagtttcccagagcatcctgcttttctctcaaagaaaattggtcaagtggaagagcaaatagataaagagaccaagaacccaaatggggtatcaagtagggaggctaaaactgcattggatgctgatgacagattcactttgctgacagcccagaaaccacctactgagtactctaaggtagaaggcatttatacatattctttgtctccatccaaagtttcaggagatgatgttattgaaaaggattcccctgaatcaccatttgaagtaattattgacaaagcagcatttgacaaagaatttaaagactcatataaggagagcacagatgattttggtagctggtctgtgcacactgataaagaatcatccgaagacatttcagagactaatgacaagctttttccactgagaaataaagaggcaggacgttacccaatgtctgcattgctcagtaggcagttttcacacacaaatgcagcactggaagaggtgtccagatgcgtgaatgatatgcataactttactaacgaaatactgacttgggatctggttccccaagtgaaacaacagaccgataaatcttctgactgcatcacaaaaactacaggacttgacatgagtgaatataattcagaaattccagttgtaaatcttaaaactagcactcatcagaaaactcctgtatgttctattgatgggagcactcccatcactaaatcaacaggtgattgggcagaagcatctctccagcaagaaaatgctattactggaaaacctgtacctgactctttgaattccacaaaagaattcagtatcaaaggtgtgcaaggcaatatgcagaaacaggatgacacacttgcagaattacctggatctccacctgagaaatgtgactctttgggttctggagtggccacagtgaaagtggttttacctgatgaccacctgaaagatgaaatggactggcagagctctgcattgggagaaatcacagaagctgatagttctggtgagtctgatgacacagtaatagaggacatcacagcagatacatcatttgaaaataacaaaattcaggctgaaaaacctgtttccattccaagtgctgttgtaaaaacaggtgaaagagaaatcaaagagattcccagttgtgagagagaagaaaaaacatctaaaaactttgaagaattggtcagtgactctgagctgcatcaagatcagcctgatattcttggaaggagtccagctagtgaggcagcatgttcaaaagtacccgatacgaatgtctccttagaagatgtgagtgaagttgctcctgaaaagcctattactactgagaaccccaaacttccttcaacagtgtctccaaatgtttttaatgagacagaattctcattaaatgtgacaacatctgcctatttggagtcattacatgggaaaaatgttaaacatatagatgattcctccccagaggacctgatagcagcctttacagaaaccagagataaaggaatagtagatagtgaaagaaatgcttttaaagcaatatcagagaagatgacagactttaaaacaactcctcctgtagaagtcttacatgaaaatgagtccggtggttctgaaattaaagacattggaagcaaatacagtgaacaaagcaaagaaacaaatggaagtgagcctctaggtgttttccctacccaaggtactccagtagcatctcttgacttagaacaagaacagctcacaattaaggctcttaaagaattaggtgaaagacaggttgagaagtcaacttctgcacagcgtgacgcagaattgccttctgaagaagtactgaagcaaactttcacatttgctccagaatcttggccacagagatcatatgacatcctagaacgtaatgtcaagaatggatctgatcttgggatttcccagaagcccatcactatcagagaaactactagggtagatgctgtttccagccttagcaagactgaattggtaaaaaagcatgtcctagcaagacttctgacagacttctcagtgcacgatctgattttctggagagatgtgaagaagactgggtttgtctttggcaccacgctgatcatgctgctttccctggcagctttcagtgtcatcagtgtggtttcttacctcatcctggctcttctctctgtcaccatcagcttcaggatctacaagtccgtcatccaagctgtacagaagtcagaagaaggccatccattcaaagcctacctggacgtagacattactctgtcctcagaagctttccataattacatgaatgctgccatggtgcacatcaacagggccctgaaactcattattcgtctctttctggtagaagatctggttgactccttgaagctggctgtcttcatgtggctgatgacctatgttggtgctgtttttaacggaatcacccttctaattcttgctgaactgctcattttcagtgtcccgattgtctatgagaagtacaagacccagattgatcactatgttggcatcgcccgagatcagaccaagtcaattgttgaaaagatccaagcaaaactccctggaatcgccaaaaaaaaggcagaataagtacatggaaaccagaaatgcaacagttactaaaacaccatttaatagttataacgtcgttacttgtactatgaaggaaaatactcagtgtcagcttgagcctgcattccaagctttttttttaatttggtgttttctcccatcctttccctttaaccctcagtatcaagcacaaaaattgatggactgataaaagaactatcttagaactcagaagaagaaagaatcaaattcataggataagtcaataccttaatggtggtagagcctttacctgtagcttgaaaggggaaagattggaggtaagagagaaaatgaaagaacacctctgggtccttctgtccagttttcagcactagtcttactcagctatccattatagttttgcccttaagaagtcatgattaacttatgaaaaaattatttggggacaggagtgtgataccttccttggtttttttttgcagccctcaaatcctatcttcctgccccacaatgtgagcagctacccctgatactccttttctttaatgatttaactatcaacttgataaataacttataggtgatagtgataattcctgattccaagaatgccatctgataaaaaagaatagaaatggaaagtgggactgagagggagtcagcaggcatgctgcggtggcggtcactccctctgccactatccccagggaaggaaaggctccgccatttgggaaagtggtttctacgtcactggacaccggttctgagcattagtttgagaactcgttcccgaatgtgctttcctccctctcccctgcccacctcaagtttaataaataaggttgtacttttcttactataaaataaatgtctgtaactgctgtgcactgctgtaaacttgttagagaaaaaaataacctgcatgtgggctcctcagttattgagtttttgtgatcctatctcagtctgggggggaacattctcaagaggtgaaatacagaaagcctttttttcttgatcttttcccgagattcaaatctccgattcccatttgggggcaagtttttttcttcaccttcaatatgagaattcagcgaacttgaaagaaaaatcatctgtgagttccttcaggttctcactcatagtcatgatccttcagagggaatatgcactggcgagtttaaagtaagggctatgatatttgatggtcccaaagtacggcagctgcaaaaagtagtggaaggaaattgtctacgtgtcttggaaaaattagttaggaatttggatgggtaaaaggtacccttgccttactccatcttattttcttagccccctttgagtgttttaactggtttcatgtcctagtaggaagtgcattctccatcctcatcctctgccctcccaggaagtcagtgattgtctttttgggcttcccctccaaaggaccttctgcagtggaagtgccacatccagttcttttcttttgttgctgctgtgtttagataattgaagagatctttgtgccacacaggatttttttttttttttaagaaaaacctatagatgaaaaattactaatgaaactgtgtgtacgtgtctgtgcgtgcaacataaaaatacagtagcacctaaggagcttgaatcttggttcctgtaaaatttcaaattgatgtggtattaataaaaaaaaaaaaaacac

SEQ ID NO: 25983 - DNA, 992 bp, Homo sapiens
  source 1..992: mol_type = unassigned DNA
agtctgtcggagtctgtcctcggagcaggcggagtaaagggacttgagcgagccagttgccggattattctatttcccctccctctctcccgccccgtatctcttttcacccttctcccaccctcgctcgcgtagccatggcggagccgtcggcggccactcagtcccattccatctcctcgtcgtccttcggagccgagccgtccgcgcccggcggcggcgggagcccaggagcctgccccgccctggggacgaagagctgcagctcctcctgtgcggtgcacgatctgattttctggagagatgtgaagaagactgggtttgtctttggcaccacgctgatcatgctgctttccctggcagctttcagtgtcatcagtgtggtttcttacctcatcctggctcttctctctgtcaccatcagcttcaggatctacaagtccgtcatccaagctgtacagaagtcagaagaaggccatccattcaactggctgtcttcatgtggctgatgacctatgttggtgctgtttttaacggaatcacccttctaattcttgctgaactgctcattttcagtgtcccgattgtctatgagaagtacaaggatccaagcaaaactccctggaatcgccaaaaaaaaggcagaataagtacatggaaaccagaaatgcaacagttactaaaacaccatttaatagttataacgtcgttacttgtactatgaaggaaaatactcagtgtcagcttgagcctgcattccaagctttttttttaatttggtgttttctcccatcctttccctttaaccctcagtatcaagcacaaaaattgatggactgataaaagaactatcttagaactcagaagaagaaagaatcaaattcataggataagtcaataccttaatggtggtagagcctttacctgtagcttgaaaggggaaagattggaggtaagagagaaaatgaaagaacacctctgggtccttctgt

SEQ ID NO: 25984 - DNA, 2532 bp, Homo sapiens
  source 1..2532: mol_type = unassigned DNA
agtctgtcggagtctgtcctcggagcaggcggagtaaagggacttgagcgagccagttgccggattattctatttcccctccctctctcccgccccgtatctcttttcacccttctcccaccctcgctcgcgtagccatggcggagccgtcggcggccactcagtcccattccatctcctcgtcgtccttcggagccgagccgtccgcgcccggcggcggcgggagcccaggagcctgccccgccctggggacgaagagctgcagctcctcctgtgcggtgcacgatctgattttctggagagatgtgaagaagactgggtttgtctttggcaccacgctgatcatgctgctttccctggcagctttcagtgtcatcagtgtggtttcttacctcatcctggctcttctctctgtcaccatcagcttcaggatctacaagtccgtcatccaagctgtacagaagtcagaagaaggccatccattcaaagcctacctggacgtagacattactctgtcctcagaagctttccataattacatgaatgctgccatggtgcacatcaacagggccctgaaactcattattcgtctctttctggtagaagatctggttgactccttgaagctggctgtcttcatgtggctgatgacctatgttggtgctgtttttaacggaatcacccttctaattcttgctgaactgctcattttcagtgtcccgattgtctatgagaagtacaagacccagattgatcactatgttggcatcgcccgagatcagaccaagtcaattgttgaaaagatccaagcaaaactccctggaatcgccaaaaaaaaggcagaataagtacatggaaaccagaaatgcaacagttactaaaacaccatttaatagttataacgtcgttacttgtactatgaaggaaaatactcagtgtcagcttgagcctgcattccaagctttttttttaatttggtgttttctcccatcctttccctttaaccctcagtatcaagcacaaaaattgatggactgataaaagaactatcttagaactcagaagaagaaagaatcaaattcataggataagtcaataccttaatggtggtagagcctttacctgtagcttgaaaggggaaagattggaggtaagagagaaaatgaaagaacacctctgggtccttctgtccagttttcagcactagtcttactcagctatccattatagttttgcccttaagaagtcatgattaacttatgaaaaaattatttggggacaggagtgtgataccttccttggtttttttttgcagccctcaaatcctatcttcctgccccacaatgtgagcagctacccctgatactccttttctttaatgatttaactatcaacttgataaataacttataggtgatagtgataattcctgattccaagaatgccatctgataaaaaagaatagaaatggaaagtgggactgagagggagtcagcaggcatgctgcggtggcggtcactccctctgccactatccccagggaaggaaaggctccgccatttgggaaagtggtttctacgtcactggacaccggttctgagcattagtttgagaactcgttcccgaatgtgctttcctccctctcccctgcccacctcaagtttaataaataaggttgtacttttcttactataaaataaatgtctgtaactgctgtgcactgctgtaaacttgttagagaaaaaaataacctgcatgtgggctcctcagttattgagtttttgtgatcctatctcagtctgggggggaacattctcaagaggtgaaatacagaaagcctttttttcttgatcttttcccgagattcaaatctccgattcccatttgggggcaagtttttttcttcaccttcaatatgagaattcagcgaacttgaaagaaaaatcatctgtgagttccttcaggttctcactcatagtcatgatccttcagagggaatatgcactggcgagtttaaagtaagggctatgatatttgatggtcccaaagtacggcagctgcaaaaagtagtggaaggaaattgtctacgtgtcttggaaaaattagttaggaatttggatgggtaaaaggtacccttgccttactccatcttattttcttagccccctttgagtgttttaactggtttcatgtcctagtaggaagtgcattctccatcctcatcctctgccctcccaggaagtcagtgattgtctttttgggcttcccctccaaaggaccttctgcagtggaagtgccacatccagttcttttcttttgttgctgctgtgtttagataattgaagagatctttgtgccacacaggatttttttttttttttaagaaaaacctatagatgaaaaattactaatgaaactgtgtgtacgtgtctgtgcgtgcaacataaaaatacagtagcacctaaggagcttgaatcttggttcctgtaaaatttcaaattgatgtggtattaataaaaaaaaaaaaaacac

SEQ ID NO: 25985 - DNA, 2333 bp, Homo sapiens
  source 1..2333: mol_type = unassigned DNA
gctggcctcactcctagctcatctgggcggcggcggcaagtggggacagggcgggtggcgcatcaccggcgcggaggcaggaggagcagtctcattgttccgggagccgtcaccacagtaggtccctcggctcagtcggcccagcccctctcagtcctccccaacccccacaaccgcccgcggctctgagacgcggccccggcggcggcggcagcagctgcagcatcatctccaccctccagccatggaagacctggaccagtctcctctggtctcgtcctcggacagcccaccccggccgcagcccgcgttcaagtaccagttcgtgagggagcccgaggacgaggaggaagaagaggaggaggaagaggaggacgaggacgaagacctggaggagctggaggtgctggagaggaagcccgccgccgggctgtccgcggccccagtgcccaccgcccctgccgccggcgcgcccctgatggacttcggaaatgacttcgtgccgccggcgccccggggacccctgccggccgctccccccgtcgccccggagcggcagccgtcttgggacccgagcccggtgtcgtcgaccgtgcccgcgccatccccgctgtctgctgccgcagtctcgccctccaagctccctgaggacgacgagcctccggcccggcctccccctcctcccccggccagcgtgagcccccaggcagagcccgtgtggaccccgccagccccggctcccgccgcgcccccctccaccccggccgcgcccaagcgcaggggctcctcgggctcagtggttgttgacctcctgtactggagagacattaagaagactggagtggtgtttggtgccagcctattcctgctgctttcattgacagtattcagcattgtgagcgtaacagcctacattgccttggccctgctctctgtgaccatcagctttaggatatacaagggtgtgatccaagctatccagaaatcagatgaaggccacccattcagggcatatctggaatctgaagttgctatatctgaggagttggttcagaagtacagtaattctgctcttggtcatgtgaactgcacgataaaggaactcaggcgcctcttcttagttgatgatttagttgattctctgaagtttgcagtgttgatgtgggtatttacctatgttggtgccttgtttaatggtctgacactactgattttggctctcatttcactcttcagtgttcctgttatttatgaacggcatcaggcacagatagatcattatctaggacttgcaaataagaatgttaaagatgctatggctaaaatccaagcaaaaatccctggattgaagcgcaaagctgaatgaaaacgcccaaaataattagtaggagttcatctttaaaggggatattcatttgattatacgggggagggtcagggaagaacgaaccttgacgttgcagtgcagtttcacagatcgttgttagatctttatttttagccatgcactgttgtgaggaaaaattacctgtcttgactgccatgtgttcatcatcttaagtattgtaagctgctatgtatggatttaaaccgtaatcatatctttttcctatctatctgaggcactggtggaataaaaaacctgtatattttactttgttgcagatagtcttgccgcatcttggcaagttgcagagatggtggagctagaaaaaaaaaaaaaaaagcccttttcagtttgtgcactgtgtatggtccgtgtagattgatgcagattttctgaaatgaaatgtttgtttagacgagatcataccggtaaagcaggaatgacaaagcttgcttttctggtatgttctaggtgtattgtgacttttactgttatattaattgccaatataagtaaatatagattatatatgtatagtgtttcacaaagcttagacctttaccttccagccaccccacagtgcttgatatttcagagtcagtcattggttatacatgtgtagttccaaagcacataagctagaagaagaaatatttctaggagcactaccatctgttttcaacatgaaatgccacacacatagaactccaacatcaatttcattgcacagactgactgtagttaattttgtcacagaatctatggactgaatctaatgcttccaaaaatgttgtttgtttgcaaatatcaaacattgttatgcaagaaattattaattacaaaatgaagatttataccattgtggtttaagctgtactgaactaaatctgtggaatgcattgtgaactgtaaaagcaaagtatcaataaagcttatagacttaaaa

SEQ ID NO: 25986 - DNA, 4790 bp, Homo sapiens
  source 1..4790: mol_type = unassigned DNA
gctggcctcactcctagctcatctgggcggcggcggcaagtggggacagggcgggtggcgcatcaccggcgcggaggcaggaggagcagtctcattgttccgggagccgtcaccacagtaggtccctcggctcagtcggcccagcccctctcagtcctccccaacccccacaaccgcccgcggctctgagacgcggccccggcggcggcggcagcagctgcagcatcatctccaccctccagccatggaagacctggaccagtctcctctggtctcgtcctcggacagcccaccccggccgcagcccgcgttcaagtaccagttcgtgagggagcccgaggacgaggaggaagaagaggaggaggaagaggaggacgaggacgaagacctggaggagctggaggtgctggagaggaagcccgccgccgggctgtccgcggccccagtgcccaccgcccctgccgccggcgcgcccctgatggacttcggaaatgacttcgtgccgccggcgccccggggacccctgccggccgctccccccgtcgccccggagcggcagccgtcttgggacccgagcccggtgtcgtcgaccgtgcccgcgccatccccgctgtctgctgccgcagtctcgccctccaagctccctgaggacgacgagcctccggcccggcctccccctcctcccccggccagcgtgagcccccaggcagagcccgtgtggaccccgccagccccggctcccgccgcgcccccctccaccccggccgcgcccaagcgcaggggctcctcgggctcagtggatgagaccctttttgctcttcctgctgcatctgagcctgtgatacgctcctctgcagaaaatatggacttgaaggagcagccaggtaacactatttcggctggtcaagaggatttcccatctgtcctgcttgaaactgctgcttctcttccttctctgtctcctctctcagccgcttctttcaaagaacatgaataccttggtaatttgtcaacagtattacccactgaaggaacacttcaagaaaatgtcagtgaagcttctaaagaggtctcagagaaggcaaaaactctactcatagatagagatttaacagagttttcagaattagaatactcagaaatgggatcatcgttcagtgtctctccaaaagcagaatctgccgtaatagtagcaaatcctagggaagaaataatcgtgaaaaataaagatgaagaagagaagttagttagtaataacatccttcataatcaacaagagttacctacagctcttactaaattggttaaagaggatgaagttgtgtcttcagaaaaagcaaaagacagttttaatgaaaagagagttgcagtggaagctcctatgagggaggaatatgcagacttcaaaccatttgagcgagtatgggaagtgaaagatagtaaggaagatagtgatatgttggctgctggaggtaaaatcgagagcaacttggaaagtaaagtggataaaaaatgttttgcagatagccttgagcaaactaatcacgaaaaagatagtgagagtagtaatgatgatacttctttccccagtacgccagaaggtataaaggatcgttcaggagcatatatcacatgtgctccctttaacccagcagcaactgagagcattgcaacaaacatttttcctttgttaggagatcctacttcagaaaataagaccgatgaaaaaaaaatagaagaaaagaaggcccaaatagtaacagagaagaatactagcaccaaaacatcaaacccttttcttgtagcagcacaggattctgagacagattatgtcacaacagataatttaacaaaggtgactgaggaagtcgtggcaaacatgcctgaaggcctgactccagatttagtacaggaagcatgtgaaagtgaattgaatgaagttactggtacaaagattgcttatgaaacaaaaatggacttggttcaaacatcagaagttatgcaagagtcactctatcctgcagcacagctttgcccatcatttgaagagtcagaagctactccttcaccagttttgcctgacattgttatggaagcaccattgaattctgcagttcctagtgctggtgcttccgtgatacagcccagctcatcaccattagaagcttcttcagttaattatgaaagcataaaacatgagcctgaaaaccccccaccatatgaagaggccatgagtgtatcactaaaaaaagtatcaggaataaaggaagaaattaaagagcctgaaaatattaatgcagctcttcaagaaacagaagctccttatatatctattgcatgtgatttaattaaagaaacaaagctttctgctgaaccagctccggatttctctgattattcagaaatggcaaaagttgaacagccagtgcctgatcattctgagctagttgaagattcctcacctgattctgaaccagttgacttatttagtgatgattcaatacctgacgttccacaaaaacaagatgaaactgtgatgcttgtgaaagaaagtctcactgagacttcatttgagtcaatgatagaatatgaaaataaggaaaaactcagtgctttgccacctgagggaggaaagccatatttggaatcttttaagctcagtttagataacacaaaagataccctgttacctgatgaagtttcaacattgagcaaaaaggagaaaattcctttgcagatggaggagctcagtactgcagtttattcaaatgatgacttatttatttctaaggaagcacagataagagaaactgaaacgttttcagattcatctccaattgaaattatagatgagttccctacattgatcagttctaaaactgattcattttctaaattagccagggaatatactgacctagaagtatcccacaaaagtgaaattgctaatgccccggatggagctgggtcattgccttgcacagaattgccccatgacctttctttgaagaacatacaacccaaagttgaagagaaaatcagtttctcagatgacttttctaaaaatgggtctgctacatcaaaggtgctcttattgcctccagatgtttctgctttggccactcaagcagagatagagagcatagttaaacccaaagttcttgtgaaagaagctgagaaaaaacttccttccgatacagaaaaagaggacagatcaccatctgctatattttcagcagagctgagtaaaacttcagttgttgacctcctgtactggagagacattaagaagactggagtggtgtttggtgccagcctattcctgctgctttcattgacagtattcagcattgtgagcgtaacagcctacattgccttggccctgctctctgtgaccatcagctttaggatatacaagggtgtgatccaagctatccagaaatcagatgaaggccacccattcagggcatatctggaatctgaagttgctatatctgaggagttggttcagaagtacagtaattctgctcttggtcatgtgaactgcacgataaaggaactcaggcgcctcttcttagttgatgatttagttgattctctgaagtttgcagtgttgatgtgggtatttacctatgttggtgccttgtttaatggtctgacactactgattttggctctcatttcactcttcagtgttcctgttatttatgaacggcatcaggcacagatagatcattatctaggacttgcaaataagaatgttaaagatgctatggctaaaatccaagcaaaaatccctggattgaagcgcaaagctgaatgaaaacgcccaaaataattagtaggagttcatctttaaaggggatattcatttgattatacgggggagggtcagggaagaacgaaccttgacgttgcagtgcagtttcacagatcgttgttagatctttatttttagccatgcactgttgtgaggaaaaattacctgtcttgactgccatgtgttcatcatcttaagtattgtaagctgctatgtatggatttaaaccgtaatcatatctttttcctatctatctgaggcactggtggaataaaaaacctgtatattttactttgttgcagatagtcttgccgcatcttggcaagttgcagagatggtggagctagaaaaaaaaaaaaaaaagcccttttcagtttgtgcactgtgtatggtccgtgtagattgatgcagattttctgaaatgaaatgtttgtttagacgagatcataccggtaaagcaggaatgacaaagcttgcttttctggtatgttctaggtgtattgtgacttttactgttatattaattgccaatataagtaaatatagattatatatgtatagtgtttcacaaagcttagacctttaccttccagccaccccacagtgcttgatatttcagagtcagtcattggttatacatgtgtagttccaaagcacataagctagaagaagaaatatttctaggagcactaccatctgttttcaacatgaaatgccacacacatagaactccaacatcaatttcattgcacagactgactgtagttaattttgtcacagaatctatggactgaatctaatgcttccaaaaatgttgtttgtttgcaaatatcaaacattgttatgcaagaaattattaattacaaaatgaagatttataccattgtggtttaagctgtactgaactaaatctgtggaatgcattgtgaactgtaaaagcaaagtatcaataaagcttatagacttaaaa

SEQ ID NO: 25987 - DNA, 3225 bp, Homo sapiens
  source 1..3225: mol_type = unassigned DNA
atggaagacctggaccagtctcctctggtctcgtcctcggacagcccaccccggccgcagcccgcgttcaagtaccagttcgtgagggagcccgaggacgaggaggaagaagaggaggaggaagaggaggacgaggacgaagacctggaggagctggaggtgctggagaggaagcagttttcagaattagaatactcagaaatgggatcatcgttcagtgtctctccaaaagcagaatctgccgtaatagtagcaaatcctagggaagaaataatcgtgaaaaataaagatgaagaagagaagttagttagtaataacatccttcataatcaacaagagttacctacagctcttactaaattggttaaagaggatgaagttgtgtcttcagaaaaagcaaaagacagttttaatgaaaagagagttgcagtggaagctcctatgagggaggaatatgcagacttcaaaccatttgagcgagtatgggaagtgaaagatagtaaggaagatagtgatatgttggctgctggaggtaaaatcgagagcaacttggaaagtaaagtggataaaaaatgttttgcagatagccttgagcaaactaatcacgaaaaagatagtgagagtagtaatgatgatacttctttccccagtacgccagaaggtataaaggatcgttcaggagcatatatcacatgtgctccctttaacccagcagcaactgagagcattgcaacaaacatttttcctttgttaggagatcctacttcagaaaataagaccgatgaaaaaaaaatagaagaaaagaaggcccaaatagtaacagagaagaatactagcaccaaaacatcaaacccttttcttgtagcagcacaggattctgagacagattatgtcacaacagataatttaacaaaggtgactgaggaagtcgtggcaaacatgcctgaaggcctgactccagatttagtacaggaagcatgtgaaagtgaattgaatgaagttactggtacaaagattgcttatgaaacaaaaatggacttggttcaaacatcagaagttatgcaagagtcactctatcctgcagcacagctttgcccatcatttgaagagtcagaagctactccttcaccagttttgcctgacattgttatggaagcaccattgaattctgcagttcctagtgctggtgcttccgtgatacagcccagctcatcaccattagaagcttcttcagttaattatgaaagcataaaacatgagcctgaaaaccccccaccatatgaagaggccatgagtgtatcactaaaaaaagtatcaggaataaaggaagaaattaaagagcctgaaaatattaatgcagctcttcaagaaacagaagctccttatatatctattgcatgtgatttaattaaagaaacaaagctttctgctgaaccagctccggatttctctgattattcagaaatggcaaaagttgaacagccagtgcctgatcattctgagctagttgaagattcctcacctgattctgaaccagttgacttatttagtgatgattcaatacctgacgttccacaaaaacaagatgaaactgtgatgcttgtgaaagaaagtctcactgagacttcatttgagtcaatgatagaatatgaaaataaggaaaaactcagtgctttgccacctgagggaggaaagccatatttggaatcttttaagctcagtttagataacacaaaagataccctgttacctgatgaagtttcaacattgagcaaaaaggagaaaattcctttgcagatggaggagctcagtactgcagtttattcaaatgatgacttatttatttctaaggaagcacagataagagaaactgaaacgttttcagattcatctccaattgaaattatagatgagttccctacattgatcagttctaaaactgattcattttctaaattagccagggaatatactgacctagaagtatcccacaaaagtgaaattgctaatgccccggatggagctgggtcattgccttgcacagaattgccccatgacctttctttgaagaacatacaacccaaagttgaagagaaaatcagtttctcagatgacttttctaaaaatgggtctgctacatcaaaggtgctcttattgcctccagatgtttctgctttggccactcaagcagagatagagagcatagttaaacccaaagttcttgtgaaagaagctgagaaaaaacttccttccgatacagaaaaagaggacagatcaccatctgctatattttcagcagagctgagtaaaacttcagttgttgacctcctgtactggagagacattaagaagactggagtggtgtttggtgccagcctattcctgctgctttcattgacagtattcagcattgtgagcgtaacagcctacattgccttggccctgctctctgtgaccatcagctttaggatatacaagggtgtgatccaagctatccagaaatcagatgaaggccacccattcagggcatatctggaatctgaagttgctatatctgaggagttggttcagaagtacagtaattctgctcttggtcatgtgaactgcacgataaaggaactcaggcgcctcttcttagttgatgatttagttgattctctgaagtttgcagtgttgatgtgggtatttacctatgttggtgccttgtttaatggtctgacactactgattttggctctcatttcactcttcagtgttcctgttatttatgaacggcatcaggcacagatagatcattatctaggacttgcaaataagaatgttaaagatgctatggctaaaatccaagcaaaaatccctggattgaagcgcaaagctgaatgaaaacgcccaaaataattagtaggagttcatctttaaaggggatattcatttgattatacgggggagggtcagggaagaacgaaccttgacgttgcagtgcagtttcacagatcgttgttagatctttatttttagccatgcactgttgtgaggaaaaattacctgtcttgactgccatgtgttcatcatcttaagtattgtaagctgctatgtatggatttaaaccgtaatcatatctttttcctatctatctgaggcactggtggaataaaaaacctgtatattttactttgttgcagatagtcttgccgcatcttggcaagttgcagagatggtggagct

SEQ ID NO: 25988 - DNA, 4110 bp, Homo sapiens
  source 1..4110: mol_type = unassigned DNA
ctcctcctgtgctcgtggggagctggccgagtggaaaacgtccacattgacccaaccgcagtgaagggagagcgcctccagtggtgtggtgcgtggagaaatgggaaggagagagttctgatgagaccctttttgctcttcctgctgcatctgagcctgtgatacgctcctctgcagaaaatatggacttgaaggagcagccaggtaacactatttcggctggtcaagaggatttcccatctgtcctgcttgaaactgctgcttctcttccttctctgtctcctctctcagccgcttctttcaaagaacatgaataccttggtaatttgtcaacagtattacccactgaaggaacacttcaagaaaatgtcagtgaagcttctaaagaggtctcagagaaggcaaaaactctactcatagatagagatttaacagagttttcagaattagaatactcagaaatgggatcatcgttcagtgtctctccaaaagcagaatctgccgtaatagtagcaaatcctagggaagaaataatcgtgaaaaataaagatgaagaagagaagttagttagtaataacatccttcataatcaacaagagttacctacagctcttactaaattggttaaagaggatgaagttgtgtcttcagaaaaagcaaaagacagttttaatgaaaagagagttgcagtggaagctcctatgagggaggaatatgcagacttcaaaccatttgagcgagtatgggaagtgaaagatagtaaggaagatagtgatatgttggctgctggaggtaaaatcgagagcaacttggaaagtaaagtggataaaaaatgttttgcagatagccttgagcaaactaatcacgaaaaagatagtgagagtagtaatgatgatacttctttccccagtacgccagaaggtataaaggatcgttcaggagcatatatcacatgtgctccctttaacccagcagcaactgagagcattgcaacaaacatttttcctttgttaggagatcctacttcagaaaataagaccgatgaaaaaaaaatagaagaaaagaaggcccaaatagtaacagagaagaatactagcaccaaaacatcaaacccttttcttgtagcagcacaggattctgagacagattatgtcacaacagataatttaacaaaggtgactgaggaagtcgtggcaaacatgcctgaaggcctgactccagatttagtacaggaagcatgtgaaagtgaattgaatgaagttactggtacaaagattgcttatgaaacaaaaatggacttggttcaaacatcagaagttatgcaagagtcactctatcctgcagcacagctttgcccatcatttgaagagtcagaagctactccttcaccagttttgcctgacattgttatggaagcaccattgaattctgcagttcctagtgctggtgcttccgtgatacagcccagctcatcaccattagaagcttcttcagttaattatgaaagcataaaacatgagcctgaaaaccccccaccatatgaagaggccatgagtgtatcactaaaaaaagtatcaggaataaaggaagaaattaaagagcctgaaaatattaatgcagctcttcaagaaacagaagctccttatatatctattgcatgtgatttaattaaagaaacaaagctttctgctgaaccagctccggatttctctgattattcagaaatggcaaaagttgaacagccagtgcctgatcattctgagctagttgaagattcctcacctgattctgaaccagttgacttatttagtgatgattcaatacctgacgttccacaaaaacaagatgaaactgtgatgcttgtgaaagaaagtctcactgagacttcatttgagtcaatgatagaatatgaaaataaggaaaaactcagtgctttgccacctgagggaggaaagccatatttggaatcttttaagctcagtttagataacacaaaagataccctgttacctgatgaagtttcaacattgagcaaaaaggagaaaattcctttgcagatggaggagctcagtactgcagtttattcaaatgatgacttatttatttctaaggaagcacagataagagaaactgaaacgttttcagattcatctccaattgaaattatagatgagttccctacattgatcagttctaaaactgattcattttctaaattagccagggaatatactgacctagaagtatcccacaaaagtgaaattgctaatgccccggatggagctgggtcattgccttgcacagaattgccccatgacctttctttgaagaacatacaacccaaagttgaagagaaaatcagtttctcagatgacttttctaaaaatgggtctgctacatcaaaggtgctcttattgcctccagatgtttctgctttggccactcaagcagagatagagagcatagttaaacccaaagttcttgtgaaagaagctgagaaaaaacttccttccgatacagaaaaagaggacagatcaccatctgctatattttcagcagagctgagtaaaacttcagttgttgacctcctgtactggagagacattaagaagactggagtggtgtttggtgccagcctattcctgctgctttcattgacagtattcagcattgtgagcgtaacagcctacattgccttggccctgctctctgtgaccatcagctttaggatatacaagggtgtgatccaagctatccagaaatcagatgaaggccacccattcagggcatatctggaatctgaagttgctatatctgaggagttggttcagaagtacagtaattctgctcttggtcatgtgaactgcacgataaaggaactcaggcgcctcttcttagttgatgatttagttgattctctgaagtttgcagtgttgatgtgggtatttacctatgttggtgccttgtttaatggtctgacactactgattttggctctcatttcactcttcagtgttcctgttatttatgaacggcatcaggcacagatagatcattatctaggacttgcaaataagaatgttaaagatgctatggctaaaatccaagcaaaaatccctggattgaagcgcaaagctgaatgaaaacgcccaaaataattagtaggagttcatctttaaaggggatattcatttgattatacgggggagggtcagggaagaacgaaccttgacgttgcagtgcagtttcacagatcgttgttagatctttatttttagccatgcactgttgtgaggaaaaattacctgtcttgactgccatgtgttcatcatcttaagtattgtaagctgctatgtatggatttaaaccgtaatcatatctttttcctatctatctgaggcactggtggaataaaaaacctgtatattttactttgttgcagatagtcttgccgcatcttggcaagttgcagagatggtggagctagaaaaaaaaaaaaaaaagcccttttcagtttgtgcactgtgtatggtccgtgtagattgatgcagattttctgaaatgaaatgtttgtttagacgagatcataccggtaaagcaggaatgacaaagcttgcttttctggtatgttctaggtgtattgtgacttttactgttatattaattgccaatataagtaaatatagattatatatgtatagtgtttcacaaagcttagacctttaccttccagccaccccacagtgcttgatatttcagagtcagtcattggttatacatgtgtagttccaaagcacataagctagaagaagaaatatttctaggagcactaccatctgttttcaacatgaaatgccacacacatagaactccaacatcaatttcattgcacagactgactgtagttaattttgtcacagaatctatggactgaatctaatgcttccaaaaatgttgtttgtttgcaaatatcaaacattgttatgcaagaaattattaattacaaaatgaagatttataccattgtggtttaagctgtactgaactaaatctgtggaatgcattgtgaactgtaaaagcaaagtatcaataaagcttatagacttaaaa

SEQ ID NO: 25989 - DNA, 2390 bp, Homo sapiens
  source 1..2390: mol_type = unassigned DNA
gctggcctcactcctagctcatctgggcggcggcggcaagtggggacagggcgggtggcgcatcaccggcgcggaggcaggaggagcagtctcattgttccgggagccgtcaccacagtaggtccctcggctcagtcggcccagcccctctcagtcctccccaacccccacaaccgcccgcggctctgagacgcggccccggcggcggcggcagcagctgcagcatcatctccaccctccagccatggaagacctggaccagtctcctctggtctcgtcctcggacagcccaccccggccgcagcccgcgttcaagtaccagttcgtgagggagcccgaggacgaggaggaagaagaggaggaggaagaggaggacgaggacgaagacctggaggagctggaggtgctggagaggaagcccgccgccgggctgtccgcggccccagtgcccaccgcccctgccgccggcgcgcccctgatggacttcggaaatgacttcgtgccgccggcgccccggggacccctgccggccgctccccccgtcgccccggagcggcagccgtcttgggacccgagcccggtgtcgtcgaccgtgcccgcgccatccccgctgtctgctgccgcagtctcgccctccaagctccctgaggacgacgagcctccggcccggcctccccctcctcccccggccagcgtgagcccccaggcagagcccgtgtggaccccgccagccccggctcccgccgcgcccccctccaccccggccgcgcccaagcgcaggggctcctcgggctcagtggatgagaccctttttgctcttcctgctgcatctgagcctgtgatacgctcctctgcagttgttgacctcctgtactggagagacattaagaagactggagtggtgtttggtgccagcctattcctgctgctttcattgacagtattcagcattgtgagcgtaacagcctacattgccttggccctgctctctgtgaccatcagctttaggatatacaagggtgtgatccaagctatccagaaatcagatgaaggccacccattcagggcatatctggaatctgaagttgctatatctgaggagttggttcagaagtacagtaattctgctcttggtcatgtgaactgcacgataaaggaactcaggcgcctcttcttagttgatgatttagttgattctctgaagtttgcagtgttgatgtgggtatttacctatgttggtgccttgtttaatggtctgacactactgattttggctctcatttcactcttcagtgttcctgttatttatgaacggcatcaggcacagatagatcattatctaggacttgcaaataagaatgttaaagatgctatggctaaaatccaagcaaaaatccctggattgaagcgcaaagctgaatgaaaacgcccaaaataattagtaggagttcatctttaaaggggatattcatttgattatacgggggagggtcagggaagaacgaaccttgacgttgcagtgcagtttcacagatcgttgttagatctttatttttagccatgcactgttgtgaggaaaaattacctgtcttgactgccatgtgttcatcatcttaagtattgtaagctgctatgtatggatttaaaccgtaatcatatctttttcctatctatctgaggcactggtggaataaaaaacctgtatattttactttgttgcagatagtcttgccgcatcttggcaagttgcagagatggtggagctagaaaaaaaaaaaaaaaagcccttttcagtttgtgcactgtgtatggtccgtgtagattgatgcagattttctgaaatgaaatgtttgtttagacgagatcataccggtaaagcaggaatgacaaagcttgcttttctggtatgttctaggtgtattgtgacttttactgttatattaattgccaatataagtaaatatagattatatatgtatagtgtttcacaaagcttagacctttaccttccagccaccccacagtgcttgatatttcagagtcagtcattggttatacatgtgtagttccaaagcacataagctagaagaagaaatatttctaggagcactaccatctgttttcaacatgaaatgccacacacatagaactccaacatcaatttcattgcacagactgactgtagttaattttgtcacagaatctatggactgaatctaatgcttccaaaaatgttgtttgtttgcaaatatcaaacattgttatgcaagaaattattaattacaaaatgaagatttataccattgtggtttaagctgtactgaactaaatctgtggaatgcattgtgaactgtaaaagcaaagtatcaataaagcttatagacttaaaa

SEQ ID NO: 25990 - DNA, 1896 bp, Homo sapiens
  source 1..1896: mol_type = unassigned DNA
tcttttggtagcctgccctctccctgcaaatgcagctccatttggtatgagcaacaaggcaaatgcctaaaacaatcaacagatagaaggaaagcattaatgctggagtattagtagcctagttacagattgcactgcgtcagactgttccacacccagaagacgtcaggtgacttcagtcctgctgcagttgtgcagcagaggagactgcagacttcggttgaggaaacgggtatttcatgtctcagggagtaggtttgtgcagttacagcttttctgttggtatgcataattaataattggagctgcaaagcagatcgtgacaagagatggacggtcagaagaaaaattggaaggacaaggttgttgacctcctgtactggagagacattaagaagactggagtggtgtttggtgccagcctattcctgctgctttcattgacagtattcagcattgtgagcgtaacagcctacattgccttggccctgctctctgtgaccatcagctttaggatatacaagggtgtgatccaagctatccagaaatcagatgaaggccacccattcagggcatatctggaatctgaagttgctatatctgaggagttggttcagaagtacagtaattctgctcttggtcatgtgaactgcacgataaaggaactcaggcgcctcttcttagttgatgatttagttgattctctgaagtttgcagtgttgatgtgggtatttacctatgttggtgccttgtttaatggtctgacactactgattttggctctcatttcactcttcagtgttcctgttatttatgaacggcatcaggcacagatagatcattatctaggacttgcaaataagaatgttaaagatgctatggctaaaatccaagcaaaaatccctggattgaagcgcaaagctgaatgaaaacgcccaaaataattagtaggagttcatctttaaaggggatattcatttgattatacgggggagggtcagggaagaacgaaccttgacgttgcagtgcagtttcacagatcgttgttagatctttatttttagccatgcactgttgtgaggaaaaattacctgtcttgactgccatgtgttcatcatcttaagtattgtaagctgctatgtatggatttaaaccgtaatcatatctttttcctatctatctgaggcactggtggaataaaaaacctgtatattttactttgttgcagatagtcttgccgcatcttggcaagttgcagagatggtggagctagaaaaaaaaaaaaaaaagcccttttcagtttgtgcactgtgtatggtccgtgtagattgatgcagattttctgaaatgaaatgtttgtttagacgagatcataccggtaaagcaggaatgacaaagcttgcttttctggtatgttctaggtgtattgtgacttttactgttatattaattgccaatataagtaaatatagattatatatgtatagtgtttcacaaagcttagacctttaccttccagccaccccacagtgcttgatatttcagagtcagtcattggttatacatgtgtagttccaaagcacataagctagaagaagaaatatttctaggagcactaccatctgttttcaacatgaaatgccacacacatagaactccaacatcaatttcattgcacagactgactgtagttaattttgtcacagaatctatggactgaatctaatgcttccaaaaatgttgtttgtttgcaaatatcaaacattgttatgcaagaaattattaattacaaaatgaagatttataccattgtggtttaagctgtactgaactaaatctgtggaatgcattgtgaactgtaaaagcaaagtatcaataaagcttatagacttaaaa

SEQ ID NO: 25991 - DNA, 4161 bp, Homo sapiens
  source 1..4161: mol_type = unassigned DNA
agtccctgccctcccctggggagggtgagtcacgccaaactgggcggagagtccgctggcctcactcctagctcatctgggcggcggcggcaagtggggacagggcgggtggcgcatcaccggcgcggaggcaggaggagcagtctcattgttccgggagccgtcaccacaatgagaccctttttgctcttcctgctgcatctgagcctgtgatacgctcctctgcagaaaatatggacttgaaggagcagccaggtaacactatttcggctggtcaagaggatttcccatctgtcctgcttgaaactgctgcttctcttccttctctgtctcctctctcagccgcttctttcaaagaacatgaataccttggtaatttgtcaacagtattacccactgaaggaacacttcaagaaaatgtcagtgaagcttctaaagaggtctcagagaaggcaaaaactctactcatagatagagatttaacagagttttcagaattagaatactcagaaatgggatcatcgttcagtgtctctccaaaagcagaatctgccgtaatagtagcaaatcctagggaagaaataatcgtgaaaaataaagatgaagaagagaagttagttagtaataacatccttcataatcaacaagagttacctacagctcttactaaattggttaaagaggatgaagttgtgtcttcagaaaaagcaaaagacagttttaatgaaaagagagttgcagtggaagctcctatgagggaggaatatgcagacttcaaaccatttgagcgagtatgggaagtgaaagatagtaaggaagatagtgatatgttggctgctggaggtaaaatcgagagcaacttggaaagtaaagtggataaaaaatgttttgcagatagccttgagcaaactaatcacgaaaaagatagtgagagtagtaatgatgatacttctttccccagtacgccagaaggtataaaggatcgttcaggagcatatatcacatgtgctccctttaacccagcagcaactgagagcattgcaacaaacatttttcctttgttaggagatcctacttcagaaaataagaccgatgaaaaaaaaatagaagaaaagaaggcccaaatagtaacagagaagaatactagcaccaaaacatcaaacccttttcttgtagcagcacaggattctgagacagattatgtcacaacagataatttaacaaaggtgactgaggaagtcgtggcaaacatgcctgaaggcctgactccagatttagtacaggaagcatgtgaaagtgaattgaatgaagttactggtacaaagattgcttatgaaacaaaaatggacttggttcaaacatcagaagttatgcaagagtcactctatcctgcagcacagctttgcccatcatttgaagagtcagaagctactccttcaccagttttgcctgacattgttatggaagcaccattgaattctgcagttcctagtgctggtgcttccgtgatacagcccagctcatcaccattagaagcttcttcagttaattatgaaagcataaaacatgagcctgaaaaccccccaccatatgaagaggccatgagtgtatcactaaaaaaagtatcaggaataaaggaagaaattaaagagcctgaaaatattaatgcagctcttcaagaaacagaagctccttatatatctattgcatgtgatttaattaaagaaacaaagctttctgctgaaccagctccggatttctctgattattcagaaatggcaaaagttgaacagccagtgcctgatcattctgagctagttgaagattcctcacctgattctgaaccagttgacttatttagtgatgattcaatacctgacgttccacaaaaacaagatgaaactgtgatgcttgtgaaagaaagtctcactgagacttcatttgagtcaatgatagaatatgaaaataaggaaaaactcagtgctttgccacctgagggaggaaagccatatttggaatcttttaagctcagtttagataacacaaaagataccctgttacctgatgaagtttcaacattgagcaaaaaggagaaaattcctttgcagatggaggagctcagtactgcagtttattcaaatgatgacttatttatttctaaggaagcacagataagagaaactgaaacgttttcagattcatctccaattgaaattatagatgagttccctacattgatcagttctaaaactgattcattttctaaattagccagggaatatactgacctagaagtatcccacaaaagtgaaattgctaatgccccggatggagctgggtcattgccttgcacagaattgccccatgacctttctttgaagaacatacaacccaaagttgaagagaaaatcagtttctcagatgacttttctaaaaatgggtctgctacatcaaaggtgctcttattgcctccagatgtttctgctttggccactcaagcagagatagagagcatagttaaacccaaagttcttgtgaaagaagctgagaaaaaacttccttccgatacagaaaaagaggacagatcaccatctgctatattttcagcagagctgagtaaaacttcagttgttgacctcctgtactggagagacattaagaagactggagtggtgtttggtgccagcctattcctgctgctttcattgacagtattcagcattgtgagcgtaacagcctacattgccttggccctgctctctgtgaccatcagctttaggatatacaagggtgtgatccaagctatccagaaatcagatgaaggccacccattcagggcatatctggaatctgaagttgctatatctgaggagttggttcagaagtacagtaattctgctcttggtcatgtgaactgcacgataaaggaactcaggcgcctcttcttagttgatgatttagttgattctctgaagtttgcagtgttgatgtgggtatttacctatgttggtgccttgtttaatggtctgacactactgattttggctctcatttcactcttcagtgttcctgttatttatgaacggcatcaggcacagatagatcattatctaggacttgcaaataagaatgttaaagatgctatggctaaaatccaagcaaaaatccctggattgaagcgcaaagctgaatgaaaacgcccaaaataattagtaggagttcatctttaaaggggatattcatttgattatacgggggagggtcagggaagaacgaaccttgacgttgcagtgcagtttcacagatcgttgttagatctttatttttagccatgcactgttgtgaggaaaaattacctgtcttgactgccatgtgttcatcatcttaagtattgtaagctgctatgtatggatttaaaccgtaatcatatctttttcctatctatctgaggcactggtggaataaaaaacctgtatattttactttgttgcagatagtcttgccgcatcttggcaagttgcagagatggtggagctagaaaaaaaaaaaaaaaagcccttttcagtttgtgcactgtgtatggtccgtgtagattgatgcagattttctgaaatgaaatgtttgtttagacgagatcataccggtaaagcaggaatgacaaagcttgcttttctggtatgttctaggtgtattgtgacttttactgttatattaattgccaatataagtaaatatagattatatatgtatagtgtttcacaaagcttagacctttaccttccagccaccccacagtgcttgatatttcagagtcagtcattggttatacatgtgtagttccaaagcacataagctagaagaagaaatatttctaggagcactaccatctgttttcaacatgaaatgccacacacatagaactccaacatcaatttcattgcacagactgactgtagttaattttgtcacagaatctatggactgaatctaatgcttccaaaaatgttgtttgtttgcaaatatcaaacattgttatgcaagaaattattaattacaaaatgaagatttataccattgtggtttaagctgtactgaactaaatctgtggaatgcattgtgaactgtaaaagcaaagtatcaataaagcttatagacttaaaa

SEQ ID NO: 25992 - DNA, 1456 bp, Homo sapiens
  source 1..1456: mol_type = unassigned DNA
cacaaccgcccgcggctctgagacgcggccccggcggcggcggcagcagctgcagcatcatctccaccctccagccatggagcccgaggacgaggaggaagaagaggaggaggaagaggaggacgaggacgaagacctggaggagctggaggtgctggagaggaagcccgccgccgggctgtccgcggccccagtgcccaccgcccctgccgccggcgcgcccctgatggacttcggaaatgacttcgtgccgccggcgccccggggacccctgccggccgctccccccgtcgccccggagcggcagccgtcttgggacccgagcccggtgtcgtcgaccgtgcccgcgccatccccgctgtctgctgccgcagtctcgccctccaagctccctgaggacgacgagcctccggcccggcctccccctcctcccccggccagcgtgagcccccaggcagagcccgtgtggaccccgccagccccggctcccgccgcgcccccctccaccccggccgcgcccaagcgcaggggctcctcgggctcagtggttgttgacctcctgtactggagagacattaagaagactggagtggtgtttggtgccagcctattcctgctgctttcattgacagtattcagcattgtgagcgtaacagcctacattgccttggccctgctctctgtgaccatcagctttaggatatacaagggtgtgatccaagctatccagaaatcagatgaaggccacccattcagggcatatctggaatctgaagttgctatatctgaggagttggttcagaagtacagtaattctgctcttggtcatgtgaactgcacgataaaggaactcaggcgcctcttcttagttgatgatttagttgattctctgaagtttgcagtgttgatgtgggtatttacctatgttggtgccttgtttaatggtctgacactactgattttggctctcatttcactcttcagtgttcctgttatttatgaacggcatcaggcacagatagatcattatctaggacttgcaaataagaatgttaaagatgctatggctaaaatccaagcaaaaatccctggattgaagcgcaaagctgaatgaaaacgcccaaaataattagtaggagttcatctttaaaggggatattcatttgattatacgggggagggtcagggaagaacgaaccttgacgttgcagtgcagtttcacagatcgttgttagatctttatttttagccatgcactgttgtgaggaaaaattacctgtcttgactgccatgtgttcatcatcttaagtattgtaagctgctatgtatggatttaaaccgtaatcatatctttttcctatctatctgaggcactggtggaataaaaaacctgtatattttactttgttgcagatagtcttgccgcatcttggcaagttgcagagatggtggagct

SEQ ID NO: 25993 - DNA, 4102 bp, Homo sapiens
  source 1..4102: mol_type = unassigned DNA
atacggacgccagctgcgggcaaggccaagaccccaccccaactcacggttacccaaagtgggggtggagctcccagctctcagccccgcccattgaacgcaatcccagccgatgagaccctttttgctcttcctgctgcatctgagcctgtgatacgctcctctgcagaaaatatggacttgaaggagcagccaggtaacactatttcggctggtcaagaggatttcccatctgtcctgcttgaaactgctgcttctcttccttctctgtctcctctctcagccgcttctttcaaagaacatgaataccttggtaatttgtcaacagtattacccactgaaggaacacttcaagaaaatgtcagtgaagcttctaaagaggtctcagagaaggcaaaaactctactcatagatagagatttaacagagttttcagaattagaatactcagaaatgggatcatcgttcagtgtctctccaaaagcagaatctgccgtaatagtagcaaatcctagggaagaaataatcgtgaaaaataaagatgaagaagagaagttagttagtaataacatccttcataatcaacaagagttacctacagctcttactaaattggttaaagaggatgaagttgtgtcttcagaaaaagcaaaagacagttttaatgaaaagagagttgcagtggaagctcctatgagggaggaatatgcagacttcaaaccatttgagcgagtatgggaagtgaaagatagtaaggaagatagtgatatgttggctgctggaggtaaaatcgagagcaacttggaaagtaaagtggataaaaaatgttttgcagatagccttgagcaaactaatcacgaaaaagatagtgagagtagtaatgatgatacttctttccccagtacgccagaaggtataaaggatcgttcaggagcatatatcacatgtgctccctttaacccagcagcaactgagagcattgcaacaaacatttttcctttgttaggagatcctacttcagaaaataagaccgatgaaaaaaaaatagaagaaaagaaggcccaaatagtaacagagaagaatactagcaccaaaacatcaaacccttttcttgtagcagcacaggattctgagacagattatgtcacaacagataatttaacaaaggtgactgaggaagtcgtggcaaacatgcctgaaggcctgactccagatttagtacaggaagcatgtgaaagtgaattgaatgaagttactggtacaaagattgcttatgaaacaaaaatggacttggttcaaacatcagaagttatgcaagagtcactctatcctgcagcacagctttgcccatcatttgaagagtcagaagctactccttcaccagttttgcctgacattgttatggaagcaccattgaattctgcagttcctagtgctggtgcttccgtgatacagcccagctcatcaccattagaagcttcttcagttaattatgaaagcataaaacatgagcctgaaaaccccccaccatatgaagaggccatgagtgtatcactaaaaaaagtatcaggaataaaggaagaaattaaagagcctgaaaatattaatgcagctcttcaagaaacagaagctccttatatatctattgcatgtgatttaattaaagaaacaaagctttctgctgaaccagctccggatttctctgattattcagaaatggcaaaagttgaacagccagtgcctgatcattctgagctagttgaagattcctcacctgattctgaaccagttgacttatttagtgatgattcaatacctgacgttccacaaaaacaagatgaaactgtgatgcttgtgaaagaaagtctcactgagacttcatttgagtcaatgatagaatatgaaaataaggaaaaactcagtgctttgccacctgagggaggaaagccatatttggaatcttttaagctcagtttagataacacaaaagataccctgttacctgatgaagtttcaacattgagcaaaaaggagaaaattcctttgcagatggaggagctcagtactgcagtttattcaaatgatgacttatttatttctaaggaagcacagataagagaaactgaaacgttttcagattcatctccaattgaaattatagatgagttccctacattgatcagttctaaaactgattcattttctaaattagccagggaatatactgacctagaagtatcccacaaaagtgaaattgctaatgccccggatggagctgggtcattgccttgcacagaattgccccatgacctttctttgaagaacatacaacccaaagttgaagagaaaatcagtttctcagatgacttttctaaaaatgggtctgctacatcaaaggtgctcttattgcctccagatgtttctgctttggccactcaagcagagatagagagcatagttaaacccaaagttcttgtgaaagaagctgagaaaaaacttccttccgatacagaaaaagaggacagatcaccatctgctatattttcagcagagctgagtaaaacttcagttgttgacctcctgtactggagagacattaagaagactggagtggtgtttggtgccagcctattcctgctgctttcattgacagtattcagcattgtgagcgtaacagcctacattgccttggccctgctctctgtgaccatcagctttaggatatacaagggtgtgatccaagctatccagaaatcagatgaaggccacccattcagggcatatctggaatctgaagttgctatatctgaggagttggttcagaagtacagtaattctgctcttggtcatgtgaactgcacgataaaggaactcaggcgcctcttcttagttgatgatttagttgattctctgaagtttgcagtgttgatgtgggtatttacctatgttggtgccttgtttaatggtctgacactactgattttggctctcatttcactcttcagtgttcctgttatttatgaacggcatcaggcacagatagatcattatctaggacttgcaaataagaatgttaaagatgctatggctaaaatccaagcaaaaatccctggattgaagcgcaaagctgaatgaaaacgcccaaaataattagtaggagttcatctttaaaggggatattcatttgattatacgggggagggtcagggaagaacgaaccttgacgttgcagtgcagtttcacagatcgttgttagatctttatttttagccatgcactgttgtgaggaaaaattacctgtcttgactgccatgtgttcatcatcttaagtattgtaagctgctatgtatggatttaaaccgtaatcatatctttttcctatctatctgaggcactggtggaataaaaaacctgtatattttactttgttgcagatagtcttgccgcatcttggcaagttgcagagatggtggagctagaaaaaaaaaaaaaaaagcccttttcagtttgtgcactgtgtatggtccgtgtagattgatgcagattttctgaaatgaaatgtttgtttagacgagatcataccggtaaagcaggaatgacaaagcttgcttttctggtatgttctaggtgtattgtgacttttactgttatattaattgccaatataagtaaatatagattatatatgtatagtgtttcacaaagcttagacctttaccttccagccaccccacagtgcttgatatttcagagtcagtcattggttatacatgtgtagttccaaagcacataagctagaagaagaaatatttctaggagcactaccatctgttttcaacatgaaatgccacacacatagaactccaacatcaatttcattgcacagactgactgtagttaattttgtcacagaatctatggactgaatctaatgcttccaaaaatgttgtttgtttgcaaatatcaaacattgttatgcaagaaattattaattacaaaatgaagatttataccattgtggtttaagctgtactgaactaaatctgtggaatgcattgtgaactgtaaaagcaaagtatcaataaagcttatagacttaaaa

SEQ ID NO: 25994 - DNA, 4061 bp, Homo sapiens
  source 1..4061: mol_type = unassigned DNA
aatattgcctgttctacagagttccctaattccatattgatgatacctattgggaaactttagtttttttaatgagaccctttttgctcttcctgctgcatctgagcctgtgatacgctcctctgcagaaaatatggacttgaaggagcagccaggtaacactatttcggctggtcaagaggatttcccatctgtcctgcttgaaactgctgcttctcttccttctctgtctcctctctcagccgcttctttcaaagaacatgaataccttggtaatttgtcaacagtattacccactgaaggaacacttcaagaaaatgtcagtgaagcttctaaagaggtctcagagaaggcaaaaactctactcatagatagagatttaacagagttttcagaattagaatactcagaaatgggatcatcgttcagtgtctctccaaaagcagaatctgccgtaatagtagcaaatcctagggaagaaataatcgtgaaaaataaagatgaagaagagaagttagttagtaataacatccttcataatcaacaagagttacctacagctcttactaaattggttaaagaggatgaagttgtgtcttcagaaaaagcaaaagacagttttaatgaaaagagagttgcagtggaagctcctatgagggaggaatatgcagacttcaaaccatttgagcgagtatgggaagtgaaagatagtaaggaagatagtgatatgttggctgctggaggtaaaatcgagagcaacttggaaagtaaagtggataaaaaatgttttgcagatagccttgagcaaactaatcacgaaaaagatagtgagagtagtaatgatgatacttctttccccagtacgccagaaggtataaaggatcgttcaggagcatatatcacatgtgctccctttaacccagcagcaactgagagcattgcaacaaacatttttcctttgttaggagatcctacttcagaaaataagaccgatgaaaaaaaaatagaagaaaagaaggcccaaatagtaacagagaagaatactagcaccaaaacatcaaacccttttcttgtagcagcacaggattctgagacagattatgtcacaacagataatttaacaaaggtgactgaggaagtcgtggcaaacatgcctgaaggcctgactccagatttagtacaggaagcatgtgaaagtgaattgaatgaagttactggtacaaagattgcttatgaaacaaaaatggacttggttcaaacatcagaagttatgcaagagtcactctatcctgcagcacagctttgcccatcatttgaagagtcagaagctactccttcaccagttttgcctgacattgttatggaagcaccattgaattctgcagttcctagtgctggtgcttccgtgatacagcccagctcatcaccattagaagcttcttcagttaattatgaaagcataaaacatgagcctgaaaaccccccaccatatgaagaggccatgagtgtatcactaaaaaaagtatcaggaataaaggaagaaattaaagagcctgaaaatattaatgcagctcttcaagaaacagaagctccttatatatctattgcatgtgatttaattaaagaaacaaagctttctgctgaaccagctccggatttctctgattattcagaaatggcaaaagttgaacagccagtgcctgatcattctgagctagttgaagattcctcacctgattctgaaccagttgacttatttagtgatgattcaatacctgacgttccacaaaaacaagatgaaactgtgatgcttgtgaaagaaagtctcactgagacttcatttgagtcaatgatagaatatgaaaataaggaaaaactcagtgctttgccacctgagggaggaaagccatatttggaatcttttaagctcagtttagataacacaaaagataccctgttacctgatgaagtttcaacattgagcaaaaaggagaaaattcctttgcagatggaggagctcagtactgcagtttattcaaatgatgacttatttatttctaaggaagcacagataagagaaactgaaacgttttcagattcatctccaattgaaattatagatgagttccctacattgatcagttctaaaactgattcattttctaaattagccagggaatatactgacctagaagtatcccacaaaagtgaaattgctaatgccccggatggagctgggtcattgccttgcacagaattgccccatgacctttctttgaagaacatacaacccaaagttgaagagaaaatcagtttctcagatgacttttctaaaaatgggtctgctacatcaaaggtgctcttattgcctccagatgtttctgctttggccactcaagcagagatagagagcatagttaaacccaaagttcttgtgaaagaagctgagaaaaaacttccttccgatacagaaaaagaggacagatcaccatctgctatattttcagcagagctgagtaaaacttcagttgttgacctcctgtactggagagacattaagaagactggagtggtgtttggtgccagcctattcctgctgctttcattgacagtattcagcattgtgagcgtaacagcctacattgccttggccctgctctctgtgaccatcagctttaggatatacaagggtgtgatccaagctatccagaaatcagatgaaggccacccattcagggcatatctggaatctgaagttgctatatctgaggagttggttcagaagtacagtaattctgctcttggtcatgtgaactgcacgataaaggaactcaggcgcctcttcttagttgatgatttagttgattctctgaagtttgcagtgttgatgtgggtatttacctatgttggtgccttgtttaatggtctgacactactgattttggctctcatttcactcttcagtgttcctgttatttatgaacggcatcaggcacagatagatcattatctaggacttgcaaataagaatgttaaagatgctatggctaaaatccaagcaaaaatccctggattgaagcgcaaagctgaatgaaaacgcccaaaataattagtaggagttcatctttaaaggggatattcatttgattatacgggggagggtcagggaagaacgaaccttgacgttgcagtgcagtttcacagatcgttgttagatctttatttttagccatgcactgttgtgaggaaaaattacctgtcttgactgccatgtgttcatcatcttaagtattgtaagctgctatgtatggatttaaaccgtaatcatatctttttcctatctatctgaggcactggtggaataaaaaacctgtatattttactttgttgcagatagtcttgccgcatcttggcaagttgcagagatggtggagctagaaaaaaaaaaaaaaaagcccttttcagtttgtgcactgtgtatggtccgtgtagattgatgcagattttctgaaatgaaatgtttgtttagacgagatcataccggtaaagcaggaatgacaaagcttgcttttctggtatgttctaggtgtattgtgacttttactgttatattaattgccaatataagtaaatatagattatatatgtatagtgtttcacaaagcttagacctttaccttccagccaccccacagtgcttgatatttcagagtcagtcattggttatacatgtgtagttccaaagcacataagctagaagaagaaatatttctaggagcactaccatctgttttcaacatgaaatgccacacacatagaactccaacatcaatttcattgcacagactgactgtagttaattttgtcacagaatctatggactgaatctaatgcttccaaaaatgttgtttgtttgcaaatatcaaacattgttatgcaagaaattattaattacaaaatgaagatttataccattgtggtttaagctgtactgaactaaatctgtggaatgcattgtgaactgtaaaagcaaagtatcaataaagcttatagacttaaaa

SEQ ID NO: 25995 - DNA, 589 bp, Homo sapiens
  source 1..589: mol_type = unassigned DNA
agggcctctgaggactgctgcagacacagctgaggcagcccggctccaggctcgctggaggggctgtgtctggggagatgcttctctataaaaagcttagagagagttgtcatcgaaaataacaagactattctggatatgagtaacactgaggaataagatactaagccattaaagaagggtataaaaattatgtctgacacaggatatggagagaaatatgatgaagatgaaatatgacaacagaatcaagatgagaccctttttgctcttcctgctgcatctgagcctgtgatacgctcctctgcagaaaatatggacttgaaggagcagccaggtaacactatttcggctggtcaagaggatttcccatctgtcctgcttgaaactgctgcttctcttccttctctgtctcctctctcagccgcttctttcaaagaacatgaataccttggtaatttgtcaacagtattacccactgaaggaacacttcaagaaaatgtcagtgaagcttctaaagaggtctcagagaaggcaaaaactctactcatagatagagatttaacagagttttcagaattagaatact

SEQ ID NO: 25996 - DNA, 1682 bp, Homo sapiens
  source 1..1682: mol_type = unassigned DNA
ccggcggctaaggagagcgggcaggcaaggagattccgggccagggtcgcggcggcagtcggcaagcgttcgattctctggcgttggatcgcgagcggtgtctgcttgtcccgccgagggctcccaggacagggcagggatctagggggtttgcgcacctgctttttaatgccccgcccccccttttttttttaaagtggagggggtgaaagtgagggaggagaatggacagaatactgactggaacgttaattcgagcatttcatatgcgaagagcggaataacagttccgtattcttctttcagtttctccattagattagcttcattttcgaatgctccgttttgcatgcttaattttgaaactagcccgtggtttggcagaatttgactgaattcaggggtgagagtttgatccagtccaagtgtatttgaatttgagcacgcagttcaaccagtgtttacaatggaatttctgaagacttgtgtacttagaagaaatgcatgcactgcggtttgcttctggagaagcaaagttgtccaaaagccttcagttagaaggattagtactacctctcctaggagcactgtcatgcctgcttgggtgatagataaatatgggaagaatgaagtgcttcgattcactcagaacatgatgatgcctatcatacactatccaaatgaagtcattgtcaaagttcacgctgccagtgtaaatcctatagacgttaatatgagaagtggttatggagctacagctttaaatatgaagcgtgatcctttacacgtgaaaatcaaaggagaagaatttcctctgactctgggtcgggatgtctctggcgtggtgatggaatgtgggcttgatgtgaaatacttcaagcctggagatgaggtctgggctgcagttcctccttggaaacaaggcactctttcagagtttgttgtagtcagtgggaatgaggtctctcacaaacccaaatcactcactcatactcaagctgcctctttgccatatgtggctctcacagcctggtctgctataaacaaagttggtggcctgaatgacaagaattgcacaggaaaacgtgttctaatcttaggcgcttcaggcggagttggtacttttgctatacaggtaatgaaagcatgggatgctcatgtgacagcagtttgctcccaagatgccagtgaacttgtaaggaagcttggtgcagacgatgtaattgattacaaatctggaagtgtggaagagcagttgaaatccttaaaaccatttgattttatccttgataatgttggcggatccactgaaacatgggctccagattttctcaagaaatggtcaggagccacctatgtgactttggtgactcctttcctcctgaacatggaccgattgggcatagcagatggcatgttgcagacaggagtcactgtaggttcaaaggcattaaagcatttctggaaaggagtccattatcgctgggcatttttcatggccagtggcccatgtttagatgacattgcagaactggtggatgcgggaaagatccggccagttattgaacaaacctttcctttttctaaagttccagaagccttcctgaaggtggaaagaggacacgcacgaggaaagactgtaattaatgttgtttaaataaaaatgcagtttagtgattgtt

SEQ ID NO: 25997 - DNA, 2266 bp, Homo sapiens
  source 1..2266: mol_type = unassigned DNA
gcaaagccatcccggcggctaaggagagcgggcaggcaaggagattccgggccagggtcgcggcggcagtcggcaagcgttcgattctctggcgttggatcgcgagcggtgtctgcttgtcccgccgagggctcccaggacagggcagggatctagggggtttgcgcacctgctttttaatgccccgcccccccttttttttttaaagtggagggggtgaaagtgagggaggagaatggacagaatactgactggaacgttaattcgagcatttcatatgcgaagagcggaataacagttccgtattcttctttcagtttctccattagattagcttcattttcgaatgctccgttttgcatgcttaattttgaaactagcccgtggtttggcagaatttgactgaattcaggggtgagagtttgatccagtccaagtgtatttgaatttgagcacgcagttcaaccagtgtttacaatggaatttctgaagacttgtgtacttagaagaaatgcatgcactgcggtttgcttctggagaagcaaagttgtccaaaagccttcagttagaaggattagtactacctctcctaggagcactgtcatgcctgcttgggtgatagataaatatgggaagaatgaagtgcttcgattcactcagaacatgatgatgcctatcatacactatccaaatgaagtcattgtcaaagttcacgctgccagtgtaaatcctatagacgttaatatgagaagtggttatggagctacagctttaaatatgaagcgtgatcctttacacgtgaaaatcaaaggagaagaatttcctctgactctgggtcgggatgtctctggcgtggtgatggaatgtgggcttgatgtgaaatacttcaagcctggagatgaggtctgggctgcagttcctccttggaaacaaggcactctttcagagtttgttgtagtcagtgggaatgaggtctctcacaaacccaaatcactcactcatactcaagctgcctctttgccatatgtggctctcacagcctggtctgctataaacaaagttggtggcctgaatgacaagaattgcacaggaaaacgcatttctggaaaggagtccattatcgctgggcatttttcatggccagtggcccatgtttagatgacattgcagaactggtggatgcgggaaagatccggccagttattgaacaaacctttcctttttctaaagttccagaagccttcctgaaggtggaaagaggacacgcacgaggaaagactgtaattaatgttgtttaaataaaaatgcagtttagtgattgttgacgttcttatttggtgagtgcctgtgagcccaaatttttttctagccatccctttcaaacatttttccagattagattatacattccatgatacaagctttaaaaaataaacacaccattttggccagtaattgatataaaaatatcagcacttggatttgtctgtagtcagtagaaattcgaagttttttcaagctgttccttcacactggctttgcaggttgttgtggcaccttctgttttactagcttaaactactttattgtcttttttgttttagagacagggtctcgctgtgtcacccaggctggagtgcagtggcacaatcacagctcactgcagccttgaccttaagcgattctcctgcttcagcctctcaagtaggtaggactacaggtatgcatcaccacacccagctagtttttttgtatttttagtagagacagttttgccatgttgcccaggctggtctcaaactcctgggcttaagtgatccaccatgtcagtctcccaaagttctgggattacaggcgtgaaccaccctgctgggcctgatcgtcttaatgtacaatactaaaactttcagtgtatagatggatgttggcatgaagagataatttaaagctggttccttcttgaattcatcactgagcagctttctaactgccaaggtttccttttttgttcctccaccataatgtggtcaccacagctcttaaagttctaaatctcttagtgtcatatataaaaatctgcctggtgattcatttgtttatgctcttaatattgaaaggtgagagcagagtttctaactttttaaaacccttacatcttgcataaggattaggcctgtttcggcaattgaaacatgcttctctgagggcttttccatggaaattgcagccttccaatggagcccaaagcttgccactttgatgtcaa

SEQ ID NO: 25998 - DNA, 2157 bp, Homo sapiens
  source 1..2157: mol_type = unassigned DNA
ccgggccagcctaggccgccacaccctcgggcccgcgtccccggccggctccggcccgggccgccatcccctccgccgcctgcaggggccgccgcctcttcaggaatgcgccgcctttgtctgggaccgcgcggcgccggtgcaccgggcgggctgagcgcctcctgcggcccggcctgcgcgccccggcccgccgcgccgcccacgccccaacccccgcgccgccgccgccctcgccctgtgcgccctgcgcgccctgcgcacccgcggcccgagcccagccagagccgggcggagcggagcgcgccgagcctcgtcccgcggccgggccggggccgggccgtagcggcggcgcctggatgcggacccggccgcggggagacgggcgcccgccccgaaacgactttcagtccccgacgcgccccgcccaacccctacgatgaagagggcgtccgctggagggagccggctgctggcatgggtgctgtggctgcaggcctggcaggtggcagccccatgcccaggtgcctgcgtatgctacaatgagcccaaggtgacgacaagctgcccccagcagggcctgcaggctgtgcccgtgggcatccctgctgccagccagcgcatcttcctgcacggcaaccgcatctcgcatgtgccagctgccagcttccgtgcctgccgcaacctcaccatcctgtggctgcactcgaatgtgctggcccgaattgatgcggctgccttcactggcctggccctcctggagcagctggacctcagcgataatgcacagctccggtctgtggaccctgccacattccacggcctgggccgcctacacacgctgcacctggaccgctgcggcctgcaggagctgggcccggggctgttccgcggcctggctgccctgcagtacctctacctgcaggacaacgcgctgcaggcactgcctgatgacaccttccgcgacctgggcaacctcacacacctcttcctgcacggcaaccgcatctccagcgtgcccgagcgcgccttccgtgggctgcacagcctcgaccgtctcctactgcaccagaaccgcgtggcccatgtgcacccgcatgccttccgtgaccttggccgcctcatgacactctatctgtttgccaacaatctatcagcgctgcccactgaggccctggcccccctgcgtgccctgcagtacctgaggctcaacgacaacccctgggtgtgtgactgccgggcacgcccactctgggcctggctgcagaagttccgcggctcctcctccgaggtgccctgcagcctcccgcaacgcctggctggccgtgacctcaaacgcctagctgccaatgacctgcagggctgcgctgtggccaccggcccttaccatcccatctggaccggcagggccaccgatgaggagccgctggggcttcccaagtgctgccagccagatgccgctgacaaggcctcagtactggagcctggaagaccagcttcggcaggcaatgcgctgaagggacgcgtgccgcccggtgacagcccgccgggcaacggctctggcccacggcacatcaatgactcaccctttgggactctgcctggctctgctgagcccccgctcactgcagtgcggcccgagggctccgagccaccagggttccccacctcgggccctcgccggaggccaggctgttcacgcaagaaccgcacccgcagccactgccgtctgggccaggcaggcagcgggggtggcgggactggtgactcagaaggctcaggtgccctacccagcctcacctgcagcctcacccccctgggcctggcgctggtgctgtggacagtgcttgggccctgctgacccccagcggacacaagagcgtgctcagcagccaggtgtgtgtacatacggggtctctctccacgccgccaagccagccgggcggccgacccgtggggcaggccaggccaggtcctccctgatggacgcctgccgcccgccacccccatctccaccccatcatgtttacagggttcggcggcagcgtttgttccagaacgccgcctcccacccagatcgcggtatatagagatatgcattttattttacttgtgtaaaaatatcggacgacgtggaataaagagctcttttcttaa

SEQ ID NO: 25999 - DNA, 3197 bp, Homo sapiens
  source 1..3197: mol_type = unassigned DNA
ctgggactaaggcggcagcgggctgagcgctcggccacccccagcgtgcgcagcccgggcgggcttcgcccgcggagcttgacctagggtcgggacccgtcgggttgcaccgccgcactcgggaagacccggcttcgagcctctcctctccgtctccaaagcgccctcccgcctcccggcgctccccatgcacctgccgggctgcgcgccagccatggccgacgggagcttctcgcttgccggccacctgctccgcagcccgggcgggagcacctcgcgacttcacagcatcgaggccatcctggggtttaccaaggacgacgggatcctcggcaccttcccggcggagcggggcgcccggggcgcgaaggagcgggataggaggctgggcgcgcggcccgcctgccccaaggcgcccgaggaaggctccgagccctccccgccgccagccccggcgcccgcccccgagtacgaagcccctcgaccctactgccccaaggagcccggggaggcacggccgagcccagggctgcccgtcgggccagccaccggcgaagcgaaactgtcagaggaggaacagcccaagaaaaagcatcggcggaaccgcacgactttcaccacgtaccagctgcatgagctggagcgcgcgttcgagaagtcccactacccggacgtgtacagccgcgaggagctggccggcaaggtcaacctaccagaggtccgggtccaggtgtggttccagaaccgacgggctaagtggcggcggcaggagaagctggaagtgtcctccatgaagctgcaggactcgcccctcctctccttcagccgctccccgccctccgcgacgctgtcgcccctcggggcgggcccgggcagcggtggcgggccggctgggggcgcgctgccgctggagtcctggctcgggccgccgctgccgggcgggggcgccacggcgctgcagagcctgccgggcttcgggccgccggcgcagagcctgcctgccagctacacgccaccgccgccgcctccgcccttcctgaactccccgccgttgggccccggcctgcaacctctcgcgccgccgccgccctcctacccgtgcgggcccggcttcggggacaagttcccgctggacgaggcggacccgcgcaacagcagcatcgcggcgctgcgtctgaaagccaaggagcacatccaggccatcgggaagccgtggcaggccctctaggggcactggggaacgtcttgggatccgaccccgggccgaccgcaccgtacccgcatcctctctcccagggacaacccccctccccagctcggcccctctttccctgtcgcctgcagccacccgccaagcatagttcagggccacgcgcctgctcccgatgcacggggagaagggcgactttcaggcctgaggagaggccctctggccgcctcaacgcacttcgcggacctcagccctgcagctggagggcaacaggctgccgggccccgctggccacgccgctcccatcaccgcaggcgctggagcctccaggcccaaacaggctgaagctcctaaacttggccattcccaggaggcttggagacccccagataaccataacagggaagcaggggaggcggaaaaatagagtttgagaaacttttgtataagtagtttcaaactatttgagaggagaattaaagacatgcttgttttgtttcgactctgtttaagcacgctcaggacttggggagaggagtgaatattggggtacgggaggagggtgcgttgacggacagggtgggtcagggaaagaggaggactgagaagaagctcagggtttccttgtgaaaattctagggacacttcgctgcagcagagaatcgtccccattccgaacgcttcggcggcctagaccagaggcgcccttccctggagccggcgtgcgcgcttggggtccggagtggatggggctaaggctcagatgctagcgcgctcccagttcccccgctagccccatagtccagcggcagctgatattttcaagtttgacttcaatagaaagcgtcaagaccaccttccctagggcgagagcgaagtgtcccccggcccctggcgtccccgctctcctaaggactcctctcagttcaccaagcagatctccggttcggtgccagtccctaacacccaaggttgatcaccagcggtacaagaactgaggcaaagagatgcttttccttttcggagccgcgagactctctaacctccccaactcgctccacactcgccaacccagagttcggtaaaaggcgcgtctggtgaggtgccgcgctcggagagtgtcctggagcgccctacgccaccgccccgagagctagttcttgcgggcgtgccctggacagtatctgcagttctttggcgccggctctagggcgaggaaggaatctcgaaatctcagcccgcttcacaatctcctgagactctctgaagaaggagagtcccggactcccgcctgagcgtgctcgatatccaccgttgacactggaagctgggcgaccgccagcagaacctggatgcccgccaacaggtcctggcacggggggggggggggcgtccaccccacaacccccgtccctaagcgtgctttcaggatgatgcccccagagccttaattagcatcaactggctactgtctgtcggtcctgagcaaattagtgaagctcccagtcccctttcctcgtctaaataaactctgtctctctggaaggtgggaaagatggaataagatcacctgtaaaggctttgtggaaagtaccaagaccctggcatgacgcaatatggattgtaatcatcgtccccatttccccgaaattccctggctgttctccggttcctgaaaccgacttgggaaaaggatgaccacgctggagctgggaatatgggaagcctcatcatagtttccagtcctttctctgcgggtctaagaggctattgcataaccagggctgtgtacccctagacctccagatggtgccttgcacacagtaggctgatcagtaaaaatgtactgaataaattattcccccccaagaggtagggagtaatatctgcacttttcctcacaaggatgtctccttgggggaggaggatggagcagcccgtgtgttatcaccttttagcaagaaaacaaaacaaaacaaaaccagaa

SEQ ID NO: 26000 - DNA, 473 bp, Homo sapiens
  source 1..473: mol_type = unassigned DNA
gccggcgctcaagtccgaggggactgggaggagttacaacagatatagacggacaaactaaacgcgaggtccgggacttcgtacaacccagccaagaaaggagtgggtcccgaaaagggagccagcgaggggaaattcaaactgcgacgagtgcggggctgggaagccttcggctgggtctcggcgcttccagggggcacaggccagggtggcggccccgcggagcgccctcccgcctcccggcgctccccatgcacctgccgggctgcgcgccagccatggccgacgggagcttctcgcttgccggccacctgctccgcagcccgggcgggagcacctcgcgacttcacagcatcgaggccatcctggggtttaccaaggacgacgggatcctcggcaccttcccggcggagcggggcgcccggggcgcgaaggagcgggataggaggctgggcgcgcggcccgcctgcccc

SEQ ID NO: 26001 - DNA, 4266 bp, Homo sapiens
  source 1..4266: mol_type = unassigned DNA
ttcatgcccattacagtattcccatgcccctcacagggcagtgtgcatctgttttagtgctacctaatgtctgttaggtgcaagctggcccacacatggcttctaggcagaacagtctacaagtgacagcgtgaccagagagcagagacaggaaggaggcccagacatgagtgtgggatgctgcagaacagcaacaggatgcttctgctatccccaaatgttatctcaaatacctcaacgtcaatgctttctgttccatgttcctcttctccctggacagcccctccttctgaaagtcagaactgtctgctcttgagcttgccttgagggaaggaaataatttagataagcagagaggaagacaggcaagggatgtggtggggcaaaggcggagatgtatcttcacaggtccctgtcctcagcacccagaatcaccccttccctgtaggagggagctgatagaaagaggggatctccatccaggagccacccaccaggcagctggaaacatttgccaacagcaggtacacctagggctcagcagagggttgggtgagaatggtcttgcccagtttgtgccacactgagcaccggctggaggaggaagcggacagaatgccatctggacacaagtgctccctcactgcctgggcctgggtcgcctcaggcttttgtgtcagatcagccactccctctacagataatgctgctccaggcaaagaggcttaggtgggtctccagggcaaccgcagctcaggagctggcccgcctccatggttcatcagggaagctgtggctccagcctcgcgggatacatacacgcatacacacacacacacacacacacacacacacacacacacacacacctacacaccccacaaacaatagtccaggctggatctctcctcctgtctcttctcttggtaaaacttctcagagaaccaaagagaggcaaaatttgaggccagccggcagcagcagagaagctgagggagacttgaggatgtagactgccctgccctgctgtggctgctcaactttctttttttttcctgaaaatatccagacactctcttctcccagactgggaagcagaacgcaggccccctgctgtgacgctgcacctgagcagaggctgacctcagagcagggccaggggctatgtctctcatctcatggcttcggtggaacgaggccccatcccggctgtccaccaggagccctgctgagatggtgctggagacgcttatgatggagctgacggggcagatgcgagaggctgagaggcagcagcgggagcgcagcaatgcggtcagaaaggtctgcaccggtgtggactacagctggctggccagcacaccccggtccacctatgacctcagccccattgagcggttgcagctggaagatgtctgcgttaagatccacccatcctattgtgggcctgctatcctcaggttccggcagctgctggcggagcaggagcccgaggtgcaggaggtgtcccagctcttccgctcggtgctgcaggaggtcctggagaggatgaagcaggaagaggaggcccacaagctgacgcgccagtggagcctgcggccccgcggcagcctggccaccttcaagacccgcgcgcgcatctcgcccttcgccagcgacatcaggaccatctccgaggacgtggagcgggacacaccgccgccactgcggtcctggagcatgcccgaattccgggcgcccaaagccgactgaccccggccgcttccctgcccagaagcggagccttctgcagggggaatgataggccggtgaccggagcgccgggccctggaacctccccacctaggcctgacgaggagacccaagaggcggccccatcccaagacgctgctataaaatgaagcgactccctgccccatcctcttcctctggccacaaagctgagttaggtcgtagagcggcaccgccctctccctctcctgcgctagtctgcaggagcagccccttccctaactggcagattcaaggttttggaagacagaccattgccccatcctcatctcctggttctgtctaaaaggggacagttgccctgccttttggcaagacctaggttctcaccccaatttcagggatgtcccattcacccccctacccccatccccaatgagaagggacctgttggctggtatgccttcttgctagtgactggctgagctcaccactgcaggtgggtcacacacagcctcataggcaggcacagctggaagggaccagagagacatttagatccactctcttcagctagtaaatgtggaacttgaggctcagagagggacacttcttctgcctttaactgcagccagctcctcatgaacagtgagattgttcctgcatgaatagtgtctgttcctgagtttggaatcctgggctatgaagggacaggtccaaaggctacatctctacctacctgtggcctgatccatctcttaccttggcagtgggatgagaatctaagctgctctccaagaagtgtagctaggggtggaggtaggttactcattaccccacgccacaatgtcatcgcatgggctgtggccagtccctaacagcttcttccagaggctcagctccaaggacttcagatgctgccctaaagagcccaggtttctcaattccagggttccgctttctgcagctggtcacacctgctctctggctttctccagaaagtgatgcccaaacccctgactgaccttgaggcagctgagtgaaatgttctagaagagcttcctgcagcttcattgtccttcccttttctaacatggttaggccttgatgatgggcatgtggattacccaatgtgtggatcacccatggaaaatctggaaggccaggaggccttcccacacactctggggttgaagtggggtgtaagggggatgggtggggaagtgtctaccctcaactaccagcacacatgcagaaaatgcaagtggaccttaatagtagcctaaataaaatacccggaggagatataatcaacaggggggaaaagtgtgtattccctcagtggaaaaaagtttttttgaatgatttggttttgaacttcccttttgaagtttttttggattttcacttgaatctggacagagaatcataggatggtggaaaacctctgatccaacactatcaagatgaaagagttgattggcttattaatgtaattggtagaagttgagaatcacttaaaatatacatcttaaacatcttacgtattttatttgaagacataaaaagttcacttggttgccaaacttttttttttttttttgagactgagtctcactctgttacccaggctgcagtgcagtggcgtgatctcggctcaccacaacctttgcctcccgggttcaagtgattcttctgcctcagcctcctaagtagctgggactacaggcacgtgccatcaccccagctaatttttgtatttttattagagatggggtttcactatgttgcccagaatggtcttgaactcctgacctcgtgatccactcgccttggcctcccaaagtgctgggattacagacatgagccactgtgcctggctgccaaacttttgatgtgggtccaagctgtgcttttttgtgacctatatgttttgtctggtgggagttctacacttaagttttcttggtttgcactttaatcataacaataagaacaactggcgtaaaagagttttggaacaagcagaagtgacccttggtaagcagactgctcagctggtaggggcaaaagtgttgggggaggattagaaaaaggcctccacattgtgggctttccgggtgccctggatgtgggtcagcaaatgttttagaggaagtagttaacctggagggagattcaaaggaggctggataagagaatgtctatttttctccttccctatcaccttacatgtacctattctccccaaagagaaggaagaccttaggctttcaatgtggtgttctttcttaagtttaagtaactggctgccaatgaaaaccttcccttcgagccgcaggcatgtggacagaatccaccaccctccttagacactcctcagactactacaggctatccccagctggtggctctcaaattcatgagggtccagaagttgttcctctggattcaggttgttaaagggactaatgaggtctgcttccattactattattgaaacctcaataaccacaaataaaagaacaaaaagtt

SEQ ID NO: 26002 - DNA, 2094 bp, Homo sapiens
  source 1..2094: mol_type = unassigned DNA
gggagagtgaggatggcagagaccagtgccctgcccactggcttcggggagctcgaggtgctggctgtggggatggtgctactggtggaagctctctccggtctcagcctcaataccctgaccatcttctctttctgcaagaccccggagctgcggactccctgccacctactggtgctgagcttggctcttgcggacagtgggatcagcctgaatgccctcgttgcagccacatccagccttctccggcgctggccctacggctcggacggctgccaggctcacggcttccagggctttgtgacagcgttggccagcatctgcagcagtgcagccatcgcatgggggcgttatcaccactactgcacccgtagccagctggcctggaactcagccgtctctctggtgctcttcgtgtggctgtcttctgccttctgggcagctctgccccttctgggttggggtcactacgactatgagccactggggacatgctgcaccctggactactccaagggggacagaaacttcaccagcttcctcttcaccatgtccttcttcaacttcgccatgcccctcttcatcacgatcacttcctacagtctcatggagcagaaactggggaagagtggccatctccaggtgcccgccctcattgccaaaatggtgcccacgatcaatgccatcaactatgccctgggcaatgagatggtctgcaggggaatctggcagtgcctctcaccgcagaagagggagaaggaccgaaccaagtgagcctgccaccctggagtgagccccaggccaggaggctgttccaggagtcctgcccagcagcctcagtggccaagcccagacactcacccaccttccccagtggccccgtggatcctggtcctaggctggacacaggattcagaaagacaccaggctgcacagaaagagccagatggacctgagtgtcggtcacagccccctacactcaaggctgagaggcctcaggaaagtcattcctttttaaaaataataataaatgtaagggggtacagtgcagttttgttacatggatagattgcctagtggtgaagtctgggcttttagtgtaaccatcaccctaataatatacgttgtacccattaagttatttctcatccctcaccccctcccaccttgtcacccttctgagtctccaatgtctattattccacactccatgtccacgtgtacacattatttagctcccacttacaagtgagaacatgtggtatttgactttctgtttttgagttatttcacttaaaataatgacctccagtttcatccatgttgctgcaaaagacatgatctcgttcttttttatggcagtgtagtattccattccatatacatatataaacgttatatatatgtaacgttttctttatccaatcatctgttgatggatagattccatatctttgctactgtaaacagctgtgataagcatacaagtgcaggtttctttttgatatactgatttcttttcctttgggtagataccagtagtaggactgctggatcaaatggtagctctatttttaagacagtatggagaaatcaccatactgttttccataggggttgtactaatttacagtcccaccaacagtgtataggtgttcccttttctctgcatccttaccaatatctgtaattttttgactttttaataatagccattctcacttgtgtgagataaggtctcattgtggttttaatttccatttctctgatgacttttgatgttaagcattttttcatatgcttcttagccacgtgtatgtattctttttgaaaaaatgtttattcatgtcttttgcccactttttaatggcattatttggattttttttgttgagttatttgagtttcttatatattctggataatagtctggataatatattctggataatatataatagtcttatatattctggatatattctggatacatggtttgcaaatattttctccggttctgcacgttgttcattctgttgatggtttattttgctgtgcagaaacttttttagtttaattaagtcccatttgtct

SEQ ID NO: 26003 - DNA, 2247 bp, Homo sapiens
  source 1..2247: mol_type = unassigned DNA
agagacagctgggccactggcagtgagggagagtgaggatggcagagaccagtgccctgcccactggcttcggggagctcgaggtgctggctgtggggatggtgctactggtggaagctctctccggtctcagcctcaataccctgaccatcttctctttctgcaagaccccggagctgcggactccctgccacctactggtgctgagcttggctcttgcggacagtgggatcagcctgaatgccctcgttgcagccacatccagccttctccgtgtctcccacaggcgctggccctacggctcggacggctgccaggctcacggcttccagggctttgtgacagcgttggccagcatctgcagcagtgcagccatcgcatgggggcgttatcaccactactgcacccgtagccagctggcctggaactcagccgtctctctggtgctcttcgtgtggctgtcttctgccttctgggcagctctgccccttctgggttggggtcactacgactatgagccactggggacatgctgcaccctggactactccaagggggacagaaacttcaccagcttcctcttcaccatgtccttcttcaacttcgccatgcccctcttcatcacgatcacttcctacagtctcatggagcagaaactggggaagagtggccatctccaggtaaacaccactctgccagcaaggacgctgctgctcggctggggcccctatgccatcctgtatctatacgcagtcatcgcagacgtgacttccatctcccccaaactgcagatggtgcccgccctcattgccaaaatggtgcccacgatcaatgccatcaactatgccctgggcaatgagatggtctgcaggggaatctggcagtgcctctcaccgcagaagagggagaaggaccgaaccaagtgagcctgccaccctggagtgagccccaggccaggaggctgttccaggagtcctgcccagcagcctcagtggccaagcccagacactcacccaccttccccagtggccccgtggatcctggtcctaggctggacacaggattcagaaagacaccaggctgcacagaaagagccagatggacctgagtgtcggtcacagccccctacactcaaggctgagaggcctcaggaaagtcattcctttttaaaaataataataaatgtaagggggtacagtgcagttttgttacatggatagattgcctagtggtgaagtctgggcttttagtgtaaccatcaccctaataatatacgttgtacccattaagttatttctcatccctcaccccctcccaccttgtcacccttctgagtctccaatgtctattattccacactccatgtccacgtgtacacattatttagctcccacttacaagtgagaacatgtggtatttgactttctgtttttgagttatttcacttaaaataatgacctccagtttcatccatgttgctgcaaaagacatgatctcgttcttttttatggcagtgtagtattccattccatatacatatataaacgttatatatatgtaacgttttctttatccaatcatctgttgatggatagattccatatctttgctactgtaaacagctgtgataagcatacaagtgcaggtttctttttgatatactgatttcttttcctttgggtagataccagtagtaggactgctggatcaaatggtagctctatttttaagacagtatggagaaatcaccatactgttttccataggggttgtactaatttacagtcccaccaacagtgtataggtgttcccttttctctgcatccttaccaatatctgtaattttttgactttttaataatagccattctcacttgtgtgagataaggtctcattgtggttttaatttccatttctctgatgacttttgatgttaagcattttttcatatgcttcttagccacgtgtatgtattctttttgaaaaaatgtttattcatgtcttttgcccactttttaatggcattatttggattttttttgttgagttatttgagtttcttatatattctggataatagtctggataatatattctggataatatataatagtcttatatattctggatatattctggatacatggtttgcaaatattttctccggttctgcacgttgttcattctgttgatggtttattttgctgtgcagaaacttttttagtttaattaagtcccatttgtcta

SEQ ID NO: 26004 - DNA, 868 bp, Homo sapiens
  source 1..868: mol_type = unassigned DNA
tgaggatggcagagaccagtgccctgcccactggcttcggggagctcgaggtgctggctgtggggatggtgctactggtggaagaccccggagctgcggactccctgccacctactggtgctgagcttggctcttgcggacagtgggatcagcctgaatgccctcgttgcagccacatccagccttctccgtgtctcccacaggcgctggccctacggctcggacggctgccaggctcacggcttccagggctttgtgacagcgttggccagcatctgcagcagtgcagccatcgcatgggggcgttatcaccactactgcacccgccaaaatgctgccatcggtctcatcattttgagtggcgataggttagccctcttgtccacttggcctcagagcacttctcccactccttacatcccagcccctgcccctaatgctcccttggaccatcttatacacacacacacacacacacacacacacacacacacaccaccttctcagatagcaacaggcttctctgcctcaatatagaacagttaatccctgtgccagaggccttagatcaaagccctttctatactgagagcatggcagagcagtgtgaaggcaggcaaaggggaatgaggaggtctgaattcatctactccatccctgggtggttgtaggcatgtcaccttggccatctgtttctaaagctgaaagtctgaggcagcacaatggtccaggtagatattaattattgtgcccacagagaattgtttgaacctggaaggcagaggttgcagtgagctgagatggcaccactgcactccagcctgggcaacagaatgagactccgcctcaataaaaaaaaaaaaaaaaa

SEQ ID NO: 26005 - DNA, 1878 bp, Homo sapiens
  source 1..1878: mol_type = unassigned DNA
acaaacaggcgccggacgcggagccgccaggaagcgcgggagggggggcgggcccgagggggggccgggccgcttggtaacccctccctgtccgggcctcgccgctcagtacgggggcggggctagccggctgaccccctggcctactcccggcctccggctccaggcccttcccggatccccgcccccggattcccaggggacggggaagggagcgcccgccccgatatctccgccccccagcccctaacccctcagggttgagcggaccaaccccaccacttccgcgaggggcaggggcggggtcacaaaacgggccctcggcctaggggcggagtttctcgtaaggggcaaggccaaggcatcttgtattggggctgacaggggggcgggttattagggctgaggatgggaggatgctcagggtattggggtcagggtggcattagcccagctcaagccgggccgggctgactcagcatcctgccccagccagcttccatccctgacacctctgcattcccttgggcagagatgggagatggcgccggtgttgcccctggtgctgcccctgcagccccgcatccgcctggcacaagggctctggctcctctcctggctgctggcgctggctggtggcgtcatcctcctctgtagtgggcacctcctggtccagctaaggcaccttggcaccttcctggctccctcctgtcagttccctgtcctgccccaggctgccctggcagcgggcgcggtggctctgggcacaggactagtgggtgtaggagccagccgggcaagtctgaatgcagctctataccctccctggcgaggggtcctgggcccgctgctggtggctggcacggctggtgggggggggctcctggtcgtcggcctcgggctagccctggctttgcctgggagtctggatgaggcgctggaggagggcctggtgactgccttggctcactacaaggacacagaggtgcctgggcactgtcaggccaaaaggctggtggatgagctgcaactgaggtaccactgctgcgggcgccacgggtacaaggattggtttggggtccagtgggtcagcagccgttacctggatcccggtgaccgggatgtggctgaccggatccagagcaatgtagaaggcctatacctgactgatggggtccctttctcctgttgcaacccccactcaccccggccttgcctgcaaaaccgtctttcagactcctacgcccaccccctgttcgatccccgacaacccaaccaaaacctctgggcccaagggtgccatgaggtgctgctggagcacttgcaggacttggcaggcacactgggtagcatgctggctgtcaccttcctactgcaggctctggtgctccttggcctgcggtacctgcaaacagcactggaggggcttggaggggtcattgatgcgggaggagagacccagggctatctctttcccagtgggctgaaagatatgctgaaaacagcatggctacagggaggggttgcctgcaggccagcacctgaggaggccccaccaggagaagcacctcccaaggaggatctatctgaggcctagaggcctggagcttggggtgaggaagagggagggatggacaagtctgaaaacctcacaactccttaccaaggctccaggttggggggatcgtaggattagaggggctaaggatagtcagcgagctggactggggtaagaaagaaaaccagatgtcctagggcctagcccttgtagtcagaaccaccagggaacagcaaagaacagagtgatgggaaagtgacatgagaaggcctggaggctgattctgatatagactcaataaagtttttggatggaagcaa

SEQ ID NO: 26006 - DNA, 2610 bp, Homo sapiens
  source 1..2610: mol_type = unassigned DNA
tccttcttcattctgcagttggtgccagaactctggatcctgaactggaagaaaatgtctatccaggttgagcatcctgctggtggttacaagaaactgtttgaaactgtggaggaactgtcctcgccgctcacagctcatgtaacaggcaggatccccctctggctcaccggcagtctccttcgatgtgggccaggactctttgaagttggatctgagccattttaccacctgtttgatgggcaagccctcctgcacaagtttgactttaaagaaggacatgtcacataccacagaaggttcatccgcactgatgcttacgtacgggcaatgactgagaaaaggatcgtcataacagaatttggcacctgtgctttcccagatccctgcaagaatatattttccaggtttttttcttactttcgaggagtagaggttactgacaatgcccttgttaatgtctacccagtgggggaagattactacgcttgcacagagaccaactttattacaaagattaatccagagaccttggagacaattaagcaggttgatctttgcaactatgtctctgtcaatggggccactgctcacccccacattgaaaatgatggaaccgtttacaatattggtaattgctttggaaaaaatttttcaattgcctacaacattgtaaagatcccaccactgcaagcagacaaggaagatccaataagcaagtcagagatcgttgtacaattcccctgcagtgaccgattcaagccatcttacgttcatagttttggtctgactcccaactatatcgtttttgtggagacaccagtcaaaattaacctgttcaagttcctttcttcatggagtctttggggagccaactacatggattgttttgagtccaatgaaaccatgggggtttggcttcatattgctgacaaaaaaaggaaaaagtacctcaataataaatacagaacttctcctttcaacctcttccatcacatcaacacctatgaagacaatgggtttctgattgtggatctctgctgctggaaaggatttgagtttgtttataattacttatatttagccaatttacgtgagaactgggaagaggtgaaaaaaaatgccagaaaggctccccaacctgaagttaggagatatgtacttcctttgaatattgacaaggctgacacaggcaagaatttagtcacgctccccaatacaactgccactgcaattctgtgcagtgacgagactatctggctggagcctgaagttctcttttcagggcctcgtcaagcatttgagtttcctcaaatcaattaccagaagtattgtgggaaaccttacacatatgcgtatggacttggcttgaatcactttgttccagataggctctgtaagctgaatgtcaaaactaaagaaacttgggtttggcaagagcctgattcatacccatcagaacccatctttgtttctcacccagatgccttggaagaagatgatggtgtagttctgagtgtggtggtgagcccaggagcaggacaaaagcctgcttatctcctgattctgaatgccaaggacttaagtgaagttgcccgggctgaagtggagattaacatccctgtcacctttcatggactgttcaaaaaatcttgagcatactccagcaagatatgtttttggtagcaaaactgagaaaatcagcttcaggtctgcaatcaaattctgttcaattttagcctgctatatgtcatggttttaacttgcagatgcgcacaattttgcaatgttttacagaaagcactgagttgagcaagcaattcctttatttaaaaaaaaaagtacgtatttagataatcatacttcctctgtgagacaggccataactgaaaaactcttaaatatttagcaatcaaataggaaatgaatgtggacttactaaatggcttttaattcctattataagagcatattttaggtacctatctgctccaattatatttttaacatttaaaaaccaaagtcctctacacttgatttatattatatgtggctttgctgagtcaaggaagtatcatgcaataaggcttaattactaaatgtcaaaccaaactttttctcaaaccagggactatcatctaagattaattacagtaattattttgcgtatacgtaactgctcaaagattatgaatcttatgaatgttaacctttccgtttattacaagcaagtactattatttctgattttataataagaaaatctgtgtttaatcaactgaggcctctcaaccaaataacatctcagagattaagttatatattaaaagcttatgtaacataaaagcaagtacatatagtagtgactatatttaaaaaaacagcataaaatgcttaaaaatgtaatatttactaaaatcagattatgggataatgttgcaggattatactttattgcatcttttttgtttaattgtatttaagcattgtgcaatcacttgggaaaaatattaaattattaacattgaggtattaatacattttaagccttttgtttttaaatttcttttcttccagagattgtttaaaaataaatattgacaaaaataa

SEQ ID NO: 26007 - DNA, 1752 bp, Homo sapiens
  source 1..1752: mol_type = unassigned DNA
gagcccgatttaacggaaactgtgggcggtgagaagttccttatgacacactaatcccaacctgctgaccggaccacgcctccagcggagggaacctctagagctccaggacattcaggtaccaggtagccccaaggaggagctgccgacctggcagggaacaaccaagactggggttaaatctcacagcctgcaagtggaagagaagaacttgaacccaggtccaacttttgcgccacagcaggctgcctcttggtcctgacaggaagtcacaacttggccctgacttcctatcctagggaaggggccggctggagaggccaggacagagaaagcagatcccttctttttccaaggactctgtgtcttccataggcaacatgtcagaaggggtgggcacgttccgcatggtacctgaagaggaacaggagctccgtgcccaactggagcagctcacaaccaaggaccatggacctgtctttggcccgtgcagccagctgccccgccacaccttgcagaaggccaaggatgagctgaacgagagagaggagacccgggaggaggcagtgcgagagctgcaggagatggtgcaggcgcaggcggcctcgggggaggagctggcggtggccgtggcggagagggtgcaagagaaggacagcggcttcttcctgcgcttcatccgcgcacggaagttcaacgtgggccgtgcctatgagctgctcagaggctatgtgaatttccggctgcagtaccctgagctctttgacagcctgtccccagaggctgtccgctgcaccattgaagctggctaccctggtgtcctctctagtcgggacaagtatggccgagtggtcatgctcttcaacattgagaactggcaaagtcaagaaatcacctttgatgagatcttgcaggcatattgcttcatcctggagaagctgctggagaatgaggaaactcaaatcaatggcttctgcatcattgagaacttcaagggctttaccatgcagcaggctgctagtctccggacttcagatctcaggaagatggtggacatgctccaggattccttcccagcccggttcaaagccatccacttcatccaccagccatggtacttcaccacgacctacaatgtggtcaagcccttcttgaagagcaagctgcttgagagggtctttgtccacggggatgacctttctggtttctaccaggagatcgatgagaacatcctgccctctgacttcgggggcacgctgcccaagtatgatggcaaggccgttgctgagcagctctttggcccccaggcccaagctgagaacacagccttctgaaaacatctcctgccagctgaactgtagttagaatctctgggcctctcctcaactgtcctggacccaaggctaggaaagggctgcttgagatgactgtggtccccccttagactccctaagcccgagtgagctcaggtgtcaccctgttctcaagttgggggatgggtaataaaggagggggaattcccttgaacaagaagaactggggatagttatatttccacctgcccttgaagctttaagacagtgatttttgtgtaaggttgtatttcaaagactcgaattcattttctcagtcatttcctttgtaacagagttttacgacttagagtctgtgaaaacaggcaaggagcccgggttaaaatatccccctattcgcccccaaaatgcaataaaagaagataaaagagagaggata

SEQ ID NO: 26008 - DNA, 7100 bp, Homo sapiens
  source 1..7100: mol_type = unassigned DNA
gacatactgagaataaatccaaagacattagtttctttgcacgaaatgaggttacatatccagtgacatttatttgagctatttaaacaacttaaacatctttttcttttcttaataagggacgtttcaagttgtggtctcagccaaaatgagtgataccccttctactggtttttccatcattcatcctacgtcttctgaaggtcaagttccaccccctcgccatttgagcctcactcatcctgttgtggccaagcgaatcagtttctacaagagcggagacccccaattcggcggggtcagggtggtggtcaaccctcgctcctttaagtcctttgatgctctgctggataacttgtccaggaaggtgcccctcccttttggagtgaggaacatcagcacccctcggggcaggcacagcatcacgcgcctggaggagctggaggacggcgagtcctacctatgttcccacggcaggaaggtgcagcctgtagacctggacaaagcccgtcggcgcccgcggccctggctcagcagccgggccattagcgcgcactcaccgccccaccccgtagccgtcgctgctcccggcatgccccgccccccacggagcctagtggtcttcaggaatggcgacccgaagacgaggcgtgcggttcttctgagcaggagggtcacccagagcttcgaggcatttctacagcacctgacagaggtcatgcagcgccctgtggtcaagctgtacgctacggacggaaggagggttcccagcctccaggcagtgatcctgagctctggagctgtggtggcggcaggaagggagccatttaaaccaggaaattatgacatccaaaaatacttgcttcctgctagattaccagggatctctcagcgtgtgtaccccaagggaaatgcaaagtcagaaagcagaaagataagcacacatatgtcttcaagctcaaggtcccagatttattctgtttcttctgagaaaacacataataatgattgctacttagactattcttttgttcctgaaaagtacttggccttagaaaagaatgattctcagaatttaccaatatatccttctgaagatgatattgagaaatcaattatttttaatcaagacggcactatgacagttgagatgaaagttcgattcagaataaaagaggaagaaaccataaaatggacaactactgtcagtaaaactggtccttctaataatgatgaaaagagtgagatgagttttccaggaagaacagaaagtcgatcatctggtttaaagcttgcagcatgttcattctctgcagatgtgtcacctatggagcgaagcagtaatcaagagggcagtttggcagaggagataaacattcaaatgacagatcaagtggctgaaacttgcagttctgctagttgggagaatgctactgtggacacagatatcatccagggaactcaagaccaagcaaagcatcgtttttataggccccctacacctggactaagaagagtgagacaaaagaaatctgtgattggcagtgtgaccttagtatctgaaactgaggttcaagagaaaatgattggacagttttcatatagtgaagaaagggaaagtggggaaaacaagtctgagtatcacatgtttacacattcttgcagtaaaatgtcatcagtatctaacaaaccagtacttgttcagatcaataacaatgatcaaatggaggagtcatcattagaaagaaaaaaggaaaacagtctgcttaagtcaagtgcaataagtgctggtgttatagaaattacaagtcagaagatgttagagatgtcacataataatggtttgccatcaactatatcaaataactcaattgtggaggaagatgtagttgattgtgtggtattggacaacaaaactggtatcaagaacttcaaaacttatggtaacaccaatgataggttcagtcctatttcagcagatgcaacccatttttcaagtaataactctggaactgacaaaaatatttctgaggctccagcttcagaagcatcctctactgtcactgcaagaattgacagactaattaatgaatttgctcagtgtggtttaacaaaacttccaaaaaatgaaaagaagattttgtcatctgttgccagcaaaaagaagaaaaaatctcgacagcaagcaataaattccaggtatcaagatggacagcttgcaaccaaaggaattcttaataagaatgagagaataaacacaaaaggtagaattacaaaggaaatgatagtgcaagattcagatagtccccttaaaggagggatactttgtgaggaagacctccagaaaagtgatactgtaattgaatcaaatactttttgttccaaaagtaatctcaattccacgatttccaagaatttccatagaaataaattaaatactactcaaaattccaaggttcaaggacttttaaccaaaagaaaatctagatcactaaataaaataagcttaggagcacctaaaaaaagagaaatcggtcaaagagataaagtgtttcctcacaatgaatctaaatattgcaaaagtacttttgaaaacaaaagtttatttcatgtatttaacatccttgagcaaaaacccaaagatttttatgcaccgcaatctcaagcagaagtggcatctgggtatttgagaggaatggcaaagaagagtttagtttcaaaagttactgattcacacataactttaaaaagccagaaaaaacgtaaaggggataaagtgaaagcaagtgctattttaagtaaacaacatgctacaaccagggcaaattctttagcttctttgaaaaaacctgattttcctgaggctattgctcatcattcaattcaaaattatatacagagttggttgcagaacataaatccatatccaactttaaagcctataaaatcagctccagtatgtagaaatgaaacgagtgtggtaaattgtagcaataatagtttttcagggaatgatccccatacaaattctggaaaaataagtaattttgttatggaaagtaataagcacataactaaaattgccggtttgacaggagataatctatgtaaagagggagataagtcttttattgccaatgacactggtgaagaagatctccatgagacacaggttggatctctgaatgatgcttatttggttcccctgcatgaacactgtactttgtcacagtcagctattaatgatcataatactaaaagtcatatagctgctgaaaaatcaggaccagagaaaaaacttgtttaccaggaaataaacctagctagaaaaaggcaaagtgtagaggctgccattcaagtagatcctatagaagaggaaactccaaaagacctcttaccagtcctgatgcttcaccaattgcaagcttcagttcctggtattcacaagactcagaatggagttgttcaaatgccaggttcacttgcaggtgttccctttcattctgcaatatgtaattcatccactaatctccttctagcttggctcttggtgctaaacctaaagggaagtatgaatagcttctgtcaagttgatgctcacaaggctaccaacaaatcttcagaaacacttgcattgttggagattctaaagcacatagctatcacagaggaagctgatgacttgaaagctgctgttgccaatttagtggagtcaactacaagccactttggactcagtgagaaagaacaagacatggttccaatagatctttctgcaaattgttccacggtcaacattcagagtgttcctaagtgcagtgaaaatgaaagaacacaaggaatctcctctttggatggaggttgctctgccagtgaggcatgtgcccctgaagtctgtgttttggaagtgacttgctctccatgtgagatgtgcactgtaaataaggcttattctccaaaagagacatgtaaccccagtgacactttttttcctagtgatggttatggtgtggatcagacttctatgaataaggcttgtttcctaggagaggtctgttcacttactgatactgtgttttctgataaggcttgtgctcaaaaggagaaccatacctatgagggagcttgcccaattgatgagacctacgttcctgtcaatgtctgcaataccattgactttttaaactccaaagaaaacacatatactgataacttggattcaactgaagagttagaaagaggtgatgacattcagaaagatctaaatattttgacagaccctgaatataaaaatggatttaatacattggtgtcacatcaaaatgtcagtaatttaagctcctgtggcctttgcctaagtgaaaaagaagcagaacttgataagaaacatagttctctagatgattttgaaaattgttcactaaggaagtttcaggatgaaaatgcatatacttcctttgatatggaagaaccacggacttctgaagaaccaggctcaataaccaacagcatgacatcaagtgaaagaaacatttcagaattggaatcttttgaagaattagaaaaccatgacactgatatctttaatacagtggtaaatggaggagagcaagccactgaagaattaatccaagaagaggtagaggctagtaaaactttagaattgatagacatctctagtaagaatattatggaagaaaaaagaatgaacggtataatttatgaaataatcagtaagaggctggcaacaccaccatctttagatttttgctatgattctaagcaaaatagtgaaaaggagaccaatgaaggagaaactaagatggtaaaaatgatggtgaaaactatggaaactggaagttattcagagtcctctcctgatttaaaaaaatgcatcaaaagtccagtgacttctgattggtcagactatcggcctgacagtgacagtgagcagccatataaaacatccagtgatgatcccaatgacagtggcgaacttacccaagagaaagaatataacataggatttgttaaaagggcaatagaaaaactgtacggtaaagcagatattatcaaaccatctttttttcctgggtctacccgcaaatctcaggtttgtccttataattctgtggaatttcagtgttccaggaaagcaagtctttatgattctgaagggcagtcatttggctcttctgaacaggtatctagtagttcatctatgttgcaggaattccaggaggaaagacaagataagtgtgatgttagtgctgtgagggacaattattgtaggggtgacattgtagaacctggtacaaaacaaaatgatgatagcagaatcctcacagacatagaggaaggagtactgattgacaaaggcaaatggcttctgaaagaaaatcatttgctaaggatgtcatctgaaaatcctggcatgtgtggcaatgcagacaccacatcagtggacaccctacttgataataacagcagtgaggtaccatattcacattttggtaatttggccccaggcccaacgatggatgaactctcctcttcagaactcgaggaactgactcaaccccttgaactaaaatgcaattactttaacatgcctcatggtagtgactcagaaccttttcatgaggacttgctggatgttcgcaatgaaacctgtgccaaggaaagaatagcaaatcatcatacagaggagaagggtagtcatcagtcagaaagagtatgcacatctgtcactcattcctttatttctgctggtaacaaagtctaccctgtctctgatgatgctattaaaaaccaaccattgcctggcagtaatatgattcatggtacacttcaggaagctgactctttggataaactgtatgctctttgtggtcaacattgcccaatactaactgttattatccaacccatgaatgaggaagaccgaggatttgcatatcgcaaagaatctgatattgaaaatttcttgggtttttatttatggatgaaaatacacccatatttacttcagacagacaaaaatgtgttcagggaagagaacaataaagcaagtatgagacaaaatcttattgataatgccattggtgatatatttgatcagttttatttcagtaacacatttgacttgatgggtaaaagaagaaaacaaaaaagaattaacttcttggggttagaggaagaaggtaatttaaagaaatttcaaccagatttgaaggaaaggttttgtatgaatttcttgcacacatcattgttagttgtgggtaatgtggattcaaatacacaagacctcagcggtcagacaaatgaaatctttaaagcagtcgatgagaataacaacttattaaataacagattccagggctcaagaacaaatctcaaccaagtagtaagagaaaatatcaactgtcattacttctttgaaatgcttggtcaagcttgcctcttagatatttgccaagttgagacctccttaaatattagcaacagaaatattttagaactttgtatgtttgagggtgaaaatcttttcatttgggaagaggaagacatattaaatttaactgatcttgaaagcagtagagaacaagaagatttataatttcaatatcagcacactcattctttgtcaattcattttttcccatgagatgaagcacatgtgacgaatacggactagataacctctaagaattttccacttcttcaaaatgaacttactctagaaagcttacccttggataaccagtttgactttcataatgtctctgttttttgtttttccaacaattacagactcaggttctcttattttggaagtttctatctggttttgttctgaacttacattttttttttttttggtatctatgattttttttgctcagggcatcaaaatgtgctaaggacaagaattatatcctttttaaaaaatgttgttagcttggtgtaaaatgtatattgactgtattggtgaataaattgaatagacataacctcaaagtacttcacttattctttttaactactgatttgataaaaagtatgattataagatatccacgacaatctcatagtttctt

SEQ ID NO: 26009 - DNA, 3606 bp, Homo sapiens
  source 1..3606: mol_type = unassigned DNA
aattagaggagggttcactcgtaggcagcatctgagcaacaggctcaccagacttcagcctcttcactccgactcttccacgctccagctctcttcattaagatattctagaagcaactgaggagtttctacaaacattttggaaattacaggtctcagccaaaatgagtgataccccttctactggtttttccatcattcatcctacgtcttctgaaggtcaagttccaccccctcgccatttgagcctcactcatcctgttgtggccaagcgaatcagtttctacaagagcggagacccccaattcggcggggtcagggtggtggtcaaccctcgctcctttaagtcctttgatgctctgctggataacttgtccaggaaggtgcccctcccttttggagtgaggaacatcagcacccctcggggcaggcacagcatcacgcgcctggaggagctggaggacggcgagtcctacctatgttcccacggcaggaaggtgcagcctgtagacctggacaaagcccgtcggcgcccgcggccctggctcagcagccgggccattagcgcgcactcaccgccccaccccggagcctagtggtcttcaggaatggcgacccgaagacgaggcgtgcggttcttctgagcaggagggtcacccagagcttcgaggcatttctacagcacctgacagaggtcatgcagcgccctgtggtcaagctgtacgctacggacggaaggagggttcccagcctccaggcagtgatcctgagctctggagctgtggtggcggcaggaagggagccatttaaaccaggaaattatgacatccaaaaatacttgcttcctgctagattaccagggatctctcagcgtgtgtaccccaagggaaatgcaaagtcagaaagcagaaagagtagtaactggaaagtttttataatcaccagtgacttgccagatgcagggaccagctcacagatttatattattctgtatggacaacatagaagttcagcccccatatatctttatggaacagatggggctcgatttcaggttggccatgaagacatatttactataacagttggagacattggagcactctttaagattcgtattggtcataccaactctggatcctccccttcctggcactgcaaggagatacagctgcataatatgaattctggaaaacagttttatgtacctgttcaacgatggttggcacgagatcaagaggatggggaaatctgtcgagaatttcctcttttaagtaaaggacaacctgtccttccagtgacaatatatgaagtgaatgtggcaacgggtgagctatggaatgctggaacagtagcaaacgtctacatttctatccatggggaaaagggagatacaggatccagacaactatttagatcgaagagctccttcaattttttaagaggacaaactgacacctttttcctggaggctgtgcaccttggagatttgtgtaagattgtgataggccatgatggacttggcccaggaaatggttggtttcttgatgatgttgttatcaaggatcccacaacaaattacgaatatgccttcttctgtcacagatggctagatcagggggaagatgattgtaaaattgtcagagaactgtatgccagggataacagtatcttctctgcgaggcagaaattggaacttaagagaaaagaaacatggactgcagaaagctggaagtttacaaaaggaaatactcttcagttctataacaagctgactggagggtttgtccgtttgcatccagatggcacagttgacgccattggagagaagacagacaaatatggtgtctttgatgttattttcaacaaaagaaatatatgcattttccaaagtcatgagatgaggcatctttctcttgctcttgacaatggcattgtcactggaatggttagtggtgaagccaccactgagctgcgggtgctttatcagcctaaccgctgtgcacttcttgagtcggcactggttcctggtcacacagttgtttttgatcgtcatggcaaaatagctgatgcatcatcagcaggctatgcaaatctttcaaaagaatttgtgatttttgtcaagggggtgttcctcaacagtgctgtggttctgcttgctacaagcctgtgtcaggccctgtgtctccagcctgatggaagctgcactggagtgggaagccagtctgaaaaatcctactggaaagtgcataaaatcagctctgggatttgcatgtttgaaagtgtgaaaaatgcacaaatgtatctaagaatcaaggatggccgatgcgatggaacaggtacaggagatgttgactgtcattttaaaattaagaagaacttgaagaatgcatccataagcctggaatctacgaagagcccaggattgtttgttggacttcagtcagatgggcaggcaaaaccaatgatttataccaaggatgagaatgtttgcttctatccacaagtcatccaatttggcagagaaaacccaatgggaatgtctgcaacacccagccaagaagaagaaaagatccatgagtcaaaaaaacagaaaaaaatacccccagaatctgaggctaggagtcccttaccttcttcaactgcaaaagaaatcagacatttccaaagtagtgagactcttctgtcagaagatgaatggaaggtgttagtgctgacaggaaatacaggaactcaagccaatgtcactctctgggtgtatggagataaaggagtcactgggccaataagtcttcgcaaggacagctcagagcagctcttccttccaggacacgaggatgagtttcaggttgaaataagaaacactggaaacatatataagataaggataggacatgatggaaccagtgagcaacccgagtggaacttgcagagggtgaccatgcaacatatgaaaagcaagaagatcctagattttgcagcaaacgtatggctgtctcggattcaggcagatggggatgttgtctgtgagcttcctgtagtaaaaggaggacaagctatttttccattagtgagataccaggttgacgtctacactgggcagctgaagcatgcagagacggagtctgaggttttcctctgtctctttggggagaggggagactctggcctcagacagctgtacaaatctaacatgcaagtaaaatttcaaagaggacagattgataaatttcaagtagcagcagtgtcgcttggaaaactgcagaaggtgctgttgcgctgtgaggccagtgacaaatcacagtactggtactgtgaacaagtcatagtcagagagcccggcaccacatccgagtccatctttacctgtcaaagatggcttcctttcatgtctcagggcataattcattcagaaattgaactttatcttcaaggtgaggattactgaaaccatcagtagaagaaagtacaagatgattttgttacatctggacatcatggaacactattccccagttttcctcagaacatcccctttgatatttatcttttattattggatttatagtattcctcacagtgaaataaaaacatatgtaaagctgt

SEQ ID NO: 26010 - DNA, 7973 bp, Homo sapiens
  source 1..7973: mol_type = unassigned DNA
gcccaagggactggggcctcaggctctcaggccaaggagagtggccccgaggactgtccggaggagggtggccagccctgctgcccagagggactgagccactggcagggaaggaggcggtgttccccctggcctgactttcctccaaaggacgtccccctgaggcttaggggctgagccatgcccttgtgctccctggaggacgcggccagagcccccacaccatgaacagcacccccaggaatgcccaggccccgagccaccgtgagtgcttcctgccctctgtggctcgcaccccctcggtcaccaaggtcacgccagccaagaagatcaccttcctcaagcgaggggatccacggtttgctggggtccgcctggccgttcaccagcgcgcctttaagaccttcagcgccctcatggacgagctctcccagcgcgtgcctctctcctttggggtgcgctctgtcaccacaccccggggcctgcatagcctcagcgccctggagcagctggaagatggaggctgctacctctgctctgataagaagccccccaagacccccagtggaccaggccggccacaggagagaaaccccactgctcagcagttgcgggatgtcgaaggccagcgtgaagccccaggcacctcctcctcccggaagagtcttaaaaccccccggaggatactgctgattaagaacatggaccctcgcctccagcagacagtggttctcagtcacaggaatactaggaacctggccgcctttctcggcaaagcctcagatctcctgcgctttcctgtgaagcagttgtacacgaccagcgggaaaaaggtggactcgctgcaggccctgctgcacagcccctctgtgctggtgtgtgccgggcatgaggccttcagaaccccagccatgaaaaatgccaggagaagcgaggctgaaactttatctgggctgacttcaagaaacaaaaacgggagctgggggccaaagaccaagccgagtgtgatccattcgcggtctccgccaggcagcacgccacggctgccagaaaggcctggtcctagcaaccccccggtgggccctgctcctggcaggcaccctcaggacacgccagctcagtcgggcccgctggtggctggcgatgacatgaagaagaaggtccgcatgaatgaggacggcagcctgtccgtggagatgaaagtccgcttccacctggtcggcgaggacacgctcctatggtcccggaggatgggcagggccagcgccctcacggcagccagtggggaagaccccgttctgggggaggtagaccccctctgctgtgtgtgggagggctacccttggggcttctcagagcctggggtgtggggaccccggccctgcagggtgggatgcagggaagtctttggccgaggcgggcagccagggcccaagtatgaaatctggacgaatcccctgcatgcctcccagggagagagagtggcagctcggaagaggtggggactggcccagcacgtccgctgcagtggcctgtggggccacgggactgccgggagggagagatgcagccaggacagtgccagcccagcctccagcaccggcctccccgagggctcggagccagagtcctcctgctgccccaggaccccggaggacggggtggacagtgccagcccctctgcccagataggggctgagcggaaagctggagggagcctgggtgaggaccccggcctatgcatagatggagcagggctgggcggcccagagcaaggcggccgcctgacaccgagggcccggagtgaggagggggcttcttcggactcgtcagccagcaccggctctcatgagggatccagcgaatggggtgggcggccccagggctgtccaggcaaggcaagggccgagacctctcagcaggaggccagcgagggaggcgaccccgcttctccagccctgagtctttcatctttaaggagtgacgacctgcaggcagagacgcaaggacagggcaccgagcaggccacgggagcggctgtgacaagggagcctctggttctgggcctttcctgctcctgggactcggaaggagcctcttccaccccttccacctgcacttcatcccagcaggggcagagaaggcacagaagccgggccagtgcaatgtcctcacccagcagccctggccttggccgagtggccccgagaggccatcccaggcattctcactaccgcaaggacacccacagcccactggactcctctgtaaccaagcaagtgccgaggcctcctgagcggcgaagggcctgccaggatggctcagtgccacgatattctggaagctcatcgagcaccaggacacaggcctctgggaacctgagacctccctcctcgggctctcttccttcccaggaccttctgggaaccagcagtgccactgtcacccctgcagtccactcggattttgtttctggagtctccccgcacaacgctccctctgccgggtgggcaggggacgcggggtccaggacatgctcgccggcccccatacctccccacacatccgactcctgctcaaaatctggggctgccagcctgggggaagaggccagggacacgcctcagccctcctcacccttggttctgcaggttggacggcctgagcaaggggcggtgggcccccaccgaagccactgctgctcacagcctgggacgcagccggcccaagaggcccagcggggaccctcccctgaggctagctggctgtgtggcaggtactgtcccaccccgcccagggggcggccctgcccccagaggcgctcttccagctgtgggagcaccggcagcagccaccaaagcactgcccgggggccaggtgggagcccgcaggaggggacacgccagccaggccccacgccgtccccaggccccaattcaggggcatcaaggagaagcagtgccagccagggtgcggggtctcgggggctgtccgaggagaagaccttgaggagtgggggaggcccccaggggcaggaggaggccagtggtgtgtcacccagctctctgccccgctcgtctccagaggctgtggtccgcgaatggctggacaacattccagaagagcccatactcatgacatatgagttggcggacgagaccacaggtgcagctgggggtggcctgagaggccccgaggtggaccctggggatgaccattctctggaaggcctgggggagccagctcaggcgggacagcagtccctggaaggggaccccggccaggacccagagccagagggagccctcctggggagtagtgacactggtccccaatcaggagagggtgtcccccaaggggcagctccagagggagtttccgaggcccctgcagaggccggagcagacagagaggccccagcaggctgcagggtgagcctgcgggcacttcctggccgggtgtctgcctccacgcagatcatgagggcgctgatgggctccaagcagggccggcccagcagcgtgcccgaagtgtctaggcccatggccaggaggctcagctgctcagccggggccctcattacttgtctggccagtctgcagttatttgaggaagaccttgggtctcctgccagcaaagtgaggttcaaagactcccctcggtaccaggagctgctcagcatctcgaaggacctgtggccaggatgtgacgttggggaagaccagctggactcaggcctctgggagctcacatggagccaggctctgccagaccttgggtcccatgccatgacggagaacttcacgcccacatcctcctctggtgtggacatcagcagcggctctggaggctcaggggagagtagcgtaccctgtgccatggacggcaccctggtgacacaggggacagagctgcccctgaaaacctccaaccagaggcctgattcaagaacttatgagagcccaggggatctggaaaaccaacagcagtgttgtttcccaaccttcttgaacgcccgagcctgcgcttgtgccaccaatgaggatgaagcagaaagagacagtgaggagcagagggcgagctcgaacctggagcagttagctgaaaacacagtgcaagaagaggtgcaattagaggaaactaaagaaggaacagaaggagaagggctgcaagaagaggcggtgcagttagaggaaactaaaacagaagaagggctgcaagaagagggggtgcagttagaggaaactaaagaaacagaaggagaaggacagcaagaagaagaggcgcagttagaggaaattgaagaaacaggaggagaagggctgcaagaagagggggtgcagttagaggaagttaaagaagggccagaaggaggactgcaaggagaggctcttgaagagggtctcaaagaggaaggacttccagaagaaggaagcgtccacgggcaggaattgtcagaggccagctctccggatgggaaaggctcccaggaagatgacccagtccaggaggaggaagcaggaagagcctctgcctctgcagagccgtgccccgcagagggcacagaggaacccacagagccccctagtcatctcagcgagacggacccaagtgccagcgagaggcagagtggctcccagcttgagcctggtttggaaaagccgcccggagccaccatgatgggccaagagcacacgcaggcccaacccacccagggggctgcagagaggagctcttcggtggcctgcagcgcggctctggactgcgaccccatctgggtgtccgtgttactgaagaagacggagaaggccttcctggcccaccttgccagtgcggtggctgagctccgagcacgctggggcctgcaggacaatgatctgctggaccagatggcggccgagctgcagcaggacgtggcccaacgcctccaggacagcaccaagagagagctccagaagctccagggccgggcgggtaggatggtgctggagcctccaagggaggccctcaccggggagctgctcctgcagacccagcagcgcagacaccgtctccggggcctgcgaaacctctcggccttctctgagcggaccctgggcctggggcccctctccttcaccctggaggacgagccagccctcagcacagccctggggagccagctgggcgaggaggcggagggggaggagttctgtccctgcgaggcctgcgtgaggaagaaagtgagccctatgtcccccaaggccacaatgggggcaaccagaggtcccatcaaagaggcctttgacctgcagcagattctgcagaggaagaggggagaacacactgatggggaggcagcagaggtggcccctggcaagacccacacggaccccacgagcactaggactgtccagggagctgagggagggctggggccggggctgagccaggggcctggagtggacgagggtgaggatggcgaggggagccagagactcaacagagacaaagatcccaaactcggggaggcagagggagatgcaatggctcaggagagagaagggaaaacccacaacagtgaaaccagtgcgggcagtgagttgggggaagctgagcaggagggagagggcataagtgaaaggggagaaactgggggtcaaggctctgggcatgaggacaacttgcagggtgaagctgcggcaggaggtgaccaagatccaggacagagtgatggggccgaaggcatagaggccccggaggctgaaggggaggcccagccagagtcagaaggtgtagaggccccagaggcagaaggggatgcccaggaggctgaaggggaggcccagccagagtcagaagatgtagaggccccagaggcagaaggagaggcccagccagagtcagaagatgtagagaccccagaggcagaatgggaggtccagccagagtcagaaggtgcagaagccccggaggcagaaaaggaggcccagccagagacagaaagtgtagaggccctggagactgaaggggaggacgagccagagtcagaaggtgcagaggcccaagaggcagaagaggcggcccaggaggcagaagggcagacccagccagagtcagaagttatagagtcccaggaggcagaagaggaagcccagccagagtcagaagatgtagaggccctggaggttgaagtggagacccaggaggcagaaggggaggcccagccagagtcagaagatgtagaggccccagaggctgaaggggagatgcaagaggcagaagaggaggcccagccagagtcagacggtgtagaggcccagccaaagtcagaaggtgaagaggcccaggaggttgaaggggagacccagaagacagaaggggatgcccagccagagtcagacggtgtagaggccccggaggcagaagaggaggcacaggaggctgaaggggaggtccaggaggcagaaggggaggcccacccagagtcagaagatgtagatgcccaggaggcagaaggggaggcccagccagaatcagaaggtgtagaggccccagaggcagaaggggaggcccagaaggcagaaggtatagaggccccagagactgaaggggaggcccagccagagtcagaaggtatagaggccccagaggctgaaggggaggcccagcctgagtcagaaggtgtagaggcccaggatgcagaaggggaggcccagccagagtcagaaggtatagaggcccaggaggctgaagaggaggcccaaccagagttagaaggtgtagaggccccagaggcagaaggggaggcccagccagagtcagaaggtatagaggccccagaggcagaaggggaggcccaaccagagttagaaggtgtagaggccccggaggctgaagaggaggcccagccagagccagaaggcgtagagaccccggaggctgaaggggaggcccagccagagtcagaaggagaaactcaaggtgagaaaaaggggagccctcaggtcagtctaggagatggccaatctgaggaggcttctgaaagcagcagcccagtccctgaggacaggcccactccacccccttccccaggtggagacactccccaccaaaggccaggctcccaaacaggcccttcctcctccagagcatcctcttggggcaactgctggcagaaagactcagaaaatgaccatgtacttggagacacaaggagccctgatgccaagtccacggggacccctcatgcagagaggaaggccaccaggatgtacccagaaagttctacttctgagcaagaagaggcccctttgggctcaaggactccagagcagggggccagtgaaggttatgacctacaagaggaccaggcactcggaagtctcgcccccactgaggcagtgggcagggcagacggctttggccaagatgacttagatttctagacaagatcaagctagaaaacaatcacgagcttgggagctctgtttttattcatattttttctacaaaactgagcaacgttcagtccactggagatgtccatagtacatggacaaagaccaaggacttgccaaggacacagcccatgccatgctgtcctgggactcttaagtccagaagtgtcagagagctctgcggcccgtcccacacgcagtgtgaagaaagggggtgtctgcggatctgcccggttatcggaggtcagcccggctcctatttatttgtctgcagagcccgaaagatggaactgattggaaaggctccagtttagcttttgtttgtgggtttgttttctgctagcaagtgttgctctctgtcttttccctgttgatctcctgttacttttctccttggcttctgttggcactcacctcatttgactttgaggtgctttttttctagtcttgaatatatttgatgactctgcagaaatacttgggcaaagcaggtaacttcagagtcattggataaagtttgttctcaactccaaa

SEQ ID NO: 26011 - DNA, 3803 bp, Homo sapiens
  source 1..3803: mol_type = unassigned DNA
ggggtgctgggcctggcgggcaaactaaggctgcggaccgttgggcggttccgcggggcgttgtccggagagctgcgaggccggggttcccagggttcacgccacactctaggaagtgcctgagctagtgagctggccaacgagctccgcgggctgggaccatgggctgcttcttctccaagagacggaaggctgacaaggagtcgcggcccgagaacgaggaggagcggccaaagcagtacagctgggatcagcgcgagaaggttgatccaaaagactacatgttcagtggactgaaggatgaaacagtaggtcgcttacctgggacggtagcaggacaacagtttctcattcaagactgtgagaactgtaacatctatatttttgatcactctgctacagttaccattgatgactgtactaactgcataatttttctgggacccgtgaaaggcagcgtgtttttccggaattgcagagattgcaagtgcacattagcctgccaacaatttcgtgtgcgagattgtagaaagctggaagtctttttgtgttgtgccactcaacccatcattgagtcttcctcaaatatcaaatttggatgttttcaatggtactatcctgaattagctttccagttcaaagatgcagggctaagtatcttcaacaatacatggagtaacattcatgactttacacctgtgtcaggagaactcaactggagccttcttccagaagatgctgtggttcaggactatgttcctatacctactaccgaagagctcaaagctgttcgtgtttccacagaagccaatagaagcattgttccaatatcccggggtcagagacagaagagcagcgatgaatcatgcttagtggtattatttgctggtgattacactattgcaaatgccagaaaactaattgatgagatggttggtaaaggctttttcctagttcagacaaaggaagtgtccatgaaagctgaggatgctcaaagggtttttcgggaaaaagcacctgacttccttcctcttctgaacaaaggtcctgttattgccttggagtttaatggggatggtgctgtagaagtatgtcaacttattgtaaacgagatattcaatgggaccaagatgtttgtatctgaaagcaaggagacggcatctggagatgtagacagcttctacaactttgctgatatacagatgggaatatgaagtgcaatgtggaaccaggacttggtattaagcctttcccaacttgtgaatatagaatttgataatacacttttgtgtattagcaatggtttttactaatgctaaaacttttaaagtttattttttaataaattgttgagtattacatcatttacttgaggttcaaaaataattcattttaaattaagtagttttaatcagcttaaaagctatttaacccattttaataagcttgcagttttgtttctctgcatatgatattcttattagaaaacagaagtagctaaaagtttattattttaatcctatttaaatgttctttcaaatctctaataatttaaactttcctcagtgctccatgatactttttttgagactccatatcattgcttattttacctttttcaatttagagggatttgttactagtcgatcaattagaatgaacctatgcacatttttatgtacacatatccagttatataattgcttcctagttgcattatatggcaaatgagattttgtacatggagttgacataatactttgtaaattgaattttttaaagaaataggcatttgataaccagcttggcaagtaactctactaacagatgttggtatagctatttaaagactacttcgtaagtagtatgattatttgaataaattacacattgtttagttttttaatacaactgctatatgactcttctgcttcctgataagaaaaggtatatgcaatgctaaaactgtagaagcccaatcaccagcagtttttaaaaaggtgataacttttattagctcttgtgggctatcaagagaattggaacaaaaccttgtgacttttaggtaagaaataggcatgatgataagctatgcagattattaaaaagcttgatacatttgatttttcattagatatgccattcatatcaagtaatgttcaagtatgataaaattattttggttgctttaaagcactgtttcccaaatctacctgatcataataatttaccaggaagcagaggagagctacttgtttaaaaatccacattcttggacccaatcctcagatgcacggattcagtcttcaggggaaactctgttttaaggggtatgttgtaatctaaagtaattggttcaggaggtgtcaataggttgaacttgtgagaaggcactgaatctgccatccacatcacatatagcagctattatgaaatcagctttcataggcctatttttaaaaggaatctgaaatttaattctattttgataaaactaagactgaaaataaccacttgtaaacattcctatgattgttactaaaatgtattttcatgtttaaaatgtttttggatatttttgggttaataactactacattgaattgcatgttaaggtgcagaaataatacattaaaagattttcactttaaattaattagtaatattgagcgctcaccctgtgcgtggccttgtgctaaccattagcactgcatcatttcaattcttttataagggcattcaatactacaaaatcaacatgatttcataaggtgcaaataaaagttggtgacagatttaatataattttgatcacaatttacaaatgatctttgcaaatagtggtcagacggcattagtttttcccttagttaagctaaattaaagggactccatcctgttatgattatattattattattattattattatttttgaggtggagtttcactcttgttgcccaagctggagtgcaatggcgcgatctcggctcaccacaacatccgcctcctgggttcaagcgattctcctgcctcagcctcctgagtagctgggaatacaggcatgcgccactacacctggctaatttttgtatttttagttgagatggggtttttccacgttggtcaggctggtctcgaactcctgacctcaggtgatccgtccacctcagcctcccaaagagctgggattacaggtgtgagctaccgcgcctggccatgatgatattattaaacaccattattcacatttcaaataataacaatactttttgtttttcaaaaataaaatgcaatgttatataaagctataaactaagttctttatgatatttgagcaacaactcaggaatataacatataagggagatgttaatttaaaaatttccactacacttattatctattaaccaaagcttaaaattttgtattcttctgttagataagaccttttacccatttaatttgtctttaaggacagtcatttggcttctgaatgtttgaaacgattttaaaaaataagtagtgctatggttgtttctataattctaacctttgatagtaatcagaatgtattacatttcatttctgaatagcttttgaatttatgaaaaattattaacaatgaaaaattggtaattttattaagttatatgtgtttaaatattatattagcttatttctcttgcattaatagtactgctgtttttgttttgcttctttatatttatgtctagcttttatatgtaatttatctagtgtttataaaatgtgatttgtaataaatgttgttaaaatgaaaa

SEQ ID NO: 26012 - DNA, 1121 bp, Homo sapiens
  source 1..1121: mol_type = unassigned DNA
ggcgctgcgggggctgacatgtcgtcccggcctgggcgcgaggacgtgggggctgcgggcgcgcggcggccgcgtgagccgccggagcaggagctgcagcgacgtcgggagcagaagcggcggcgacacgacgcgcagcagctgcagcagctcaagcacctggagtccttttacgaaaaacctcctcctgggcttatcaaggaagatgagactaagccagaagattgcataccagatgtaccaggcaatgaacacgccagggaatttctggctcatgcaccaactaaaggactttggatgccactggggaaagaagtcaaagttatgcagtgttggcgttgcaaacgctatggtcaccgaacgggtgacaaagaatgccctttctttatcaaaggcaaccaaaagttagagcagttcagagtggcacatgaagatcccatgtatgacatcatacgagacaataaacgacatgaaaaggacgtaaggatacagcagttaaaacagttactggaggattctacctcagatgaagataggagcagctccagttcctctgaaggtaaagagaaacacaagaaaaagaagaagaaagaaaagcataagaaaaggaagaaagaaaagaaaaagaagaaaaaacggaagcacaaatcttccaagtcaaatgagggttctgactcagagtgacaaggatgtgacttgttcaacattctcttctcaaacactgaccaaggaacagaggaagatgcagtcagagaaagcagcaggatagagacgccgagagaggagtatatgtgggtcacagcagtgagctcccacccgccttgcagtgaagatgtgaccccaggagagggagtgtctccttccaggtgctagctctggacagcagctgattttaggcaggaaagtttcttcatcgttgtcctccctgctggtcacatgagtttacgattcctttgaagtgtctcccacagggtggcaggactgggagaatctctgaggcgtgtcttccaggccctcccacagcttgtgccctccacagtgtggactcaggtcccatagacatcaggctggagtcttctctgttgttgagaataataaaagctcattatttattttttaaa

SEQ ID NO: 26013 - DNA, 2885 bp, Homo sapiens
  source 1..2885: mol_type = unassigned DNA
gtttgttgacttccgggagcgcggttgtagttgatctccggagtttcgccatgcggaacttgggggctttcgcggcccgcgtcggtgcggagtagctgctttagccccgaccaaaccgtcctctacagcctcctggccccggcgcaggctgcccgtactgcccgtggcatgagggagccggaagagctgatgcccgattcgggtgctgtgtttacatttgggaaaagtaaatttgctgaaaataatcccggtaaattctggtttaaaaatgatgtccctgtacatctttcatgtggagatgaacattctgctgttgttaccggaaataataaactttacatgtttggcagtaacaactggggtcagttaggattaggatcaaagtcagccatcagcaagccaacatgtgtcaaagctctaaaacctgaaaaagtgaaattagctgcctgtggaaggaaccacaccctggtgtcaacagaaggaggcaatgtatatgcaactggtggaaataatgaaggacagttggggcttggtgacaccgaagaaagaaacacttttcatgtaattagcttttttacatccgagcataagattaagcagctgtctgctggatctaatacttcagctgccctaactgaggatggaagactttttatgtggggtgacaattccgaagggcaaattggtttaaaaaatgtaagtaatgtctgtgtccctcagcaagtgaccattgggaaacctgtctcctggatctcttgtggatattaccattcagcttttgtaacaacagatggtgagctatatgtgtttggagaacctgagaatgggaagttaggtcttcccaatcagctcctgggcaatcacagaacaccccagctggtgtctgaaattccggagaaggtgatccaagtagcctgtggtggagagcatactgtggttctcacggagaatgctgtgtatacctttgggctgggacaatttggtcagctgggtcttggcacttttctttttgaaacttcagaacccaaagtcattgagaatattagggatcaaacaataagttatatttcttgtggagaaaatcacacagctttgataacagatatcggccttatgtatacttttggagatggtcgccacggaaaattaggacttggactggagaattttaccaatcacttcattcctactttgtgctctaattttttgaggtttatagttaaattggagaggtctccagattctttttcaatgaggagaacactacctccaatagaagggactcttggcctttctgcttgttttctccccaattcagtctttccacgatgttctgagagaaacctccaagagagtgtcttatctgaacaggacctcatgcagccagaggaaccagattatttgctagatgaaatgaccaaagaagcagagatagataattcttcaactgtagaaagccttggagaaactactgatatcttaaacatgacacacatcatgagcctgaattccaatgaaaagtcattaaaattatcaccagttcagaaacaaaagaaacaacaaacaattggggaactgacgcaggatacagctcttactgaaaacgatgatagtgatgaatatgaagaaatgtcagaaatgaaagaagggaaagcatgtaaacaacatgtgtcacaagggattttcatgacgcagccagctacgactatcgaagcattttcagatgaggaagtagagatcccagaggagaaggaaggagcagaggattcaaaaggaaatggaatagaggagcaagaggtagaagcaaatgaggaaaatgtgaaggtgcatggaggaagaaaggagaaaacagagatcctatcagatgaccttacagacaaagcagaggatcatgaattttctaaaactgaggaactaaaactagaagatgtggatgaggaaattaatgctgaaaatgtggaaagcaagaagaaaactgtgggagatgatgaaagtgttcctacaggttatcacagtaaaacagaaggagcagaaagaaccaatgatgatagctcagctgaaactattgaaaagaaagaaaaagccaacctagaggaacgggccatttgtgagtacaatgaaaacccaaaaggatacatgcttgatgatgcagatagcagttcattagaaatcctagaaaacagtgaaacaacaccaagcaaagacatgaaaaaaacaaagaagatttttctgttcaaaagagtcccctcaataaatcaaaagattgtcaagaataacaatgagccgctcccagagataaaatccataggagaccagatcattttaaaaagtgataataaagatgccgaccagaaccacatgagtcagaatcatcagaatatcccaccaacaaatacagagagaagatcaaaatcctgtacaatactataaatatatatttatgttttcacagtcaccaagtgtattgtaatgtatacttgaaaaatgttataacttatgaagtaaagtttctgatagtagtctttaaaagatataagacttaatatgttttattcagcttctataagtgtgaccagttttgatatttatttatgctaatatttttaacaagtcatttcaaaatatgtgtatctcaaattctccctaaagtgttgtggccttaactgttcagtattgcaataaaaaatatatttttatatgtggaaaattgaaataagatatttcctagtttttactaaacaattttacttctttataattttataaggcaatatttgcaatcttacgacactgtaacagtttttgatgtatttacaatttttacaaaactgaggtaaaattgtttataatgaacatattttaataaactatatctggtcagttcc

SEQ ID NO: 26014 - DNA, 2918 bp, Homo sapiens
  source 1..2918: mol_type = unassigned DNA
aagctccgcccccgttgcccgtagcggctgtttgttgacttccgggagcgcggttgtagttgatctccggagtttcgccatgcggaacttgggggctttcgcggcccgcgtcggtgcggagtagctgctttagccccgaccaaaccgtcctctacagcctcctggccccggcgcaggctgcccgtactgcccgtggcatgagggagccggaagagctgatgcccgattcgggtgctgtgtttacatttgggaaaagtaaatttgctgaaaataatcccggtaaattctggtttaaaaatgatgtccctgtacatctttcatgtggagatgaacattctgctgttgttaccggaaataataaactttacatgtttggcagtaacaactggggtcagttaggattaggatcaaagtcagccatcagcaagccaacatgtgtcaaagctctaaaacctgaaaaagtgaaattagctgcctgtggaaggaaccacaccctggtgtcaacagaaggaggcaatgtatatgcaactggtggaaataatgaaggacagttggggcttggtgacaccgaagaaagaaacacttttcatgtaattagcttttttacatccgagcataagattaagcagctgtctgctggatctaatacttcagctgccctaactgaggatggaagactttttatgtggggtgacaattccgaagggcaaattggtttaaaaaatgtaagtaatgtctgtgtccctcagcaagtgaccattgggaaacctgtctcctggatctcttgtggatattaccattcagcttttgtaacaacagatggtgagctatatgtgtttggagaacctgagaatgggaagttaggtcttcccaatcagctcctgggcaatcacagaacaccccagctggtgtctgaaattccggagaaggtgatccaagtagcctgtggtggagagcatactgtggttctcacggagaatgctgtgtatacctttgggctgggacaatttggtcagctgggtcttggcacttttctttttgaaacttcagaacccaaagtcattgagaatattagggatcaaacaataagttatatttcttgtggagaaaatcacacagctttgataacagatatcggccttatgtatacttttggagatggtcgccacggaaaattaggacttggactggagaattttaccaatcacttcattcctactttgtgctctaattttttgaggtttatagttaaattggttgcttgtggtggatgtcacatggtagtttttgctgctcctcatcgtggtgtggcaaaagaaattgaattcgatgaaataaatgatacttgcttatctgtggcgacttttctgccgtatagcagtttaacctcaggaaatgtactgcagaggactctatcagcacgtatgcggcgaagagagagggagaggtctccagattctttttcaatgaggagaacactacctccaatagaagggactcttggcctttctgcttgttttctccccaattcagtctttccacgatgttctgagagaaacctccaagagagtgtcttatctgaacaggacctcatgcagccagaggaaccagattatttgctagatgaaatgaccaaagaagcagagatagataattcttcaactgtagaaagccttggagaaactactgatatcttaaacatgacacacatcatgagcctgaattccaatgaaaagtcattaaaattatcaccagttcagaaacaaaagaaacaacaaacaattggggaactgacgcaggatacagctcttactgaaaacgatgatagtgatgaatatgaagaaatgtcagaaatgaaagaagggaaagcatgtaaacaacatgtgtcacaagggattttcatgacgcagccagctacgactatcgaagcattttcagatgaggaagtagagatcccagaggagaaggaaggagcagaggattcaaaaggaaatggaatagaggagcaagaggtagaagcaaatgaggaaaatgtgaaggtgcatggaggaagaaaggagaaaacagagatcctatcagatgaccttacagacaaagcagaggatcatgaattttctaaaactgaggaactaaaactagaagatgtggatgaggaaattaatgctgaaaatgtggaaagcaagaagaaaactgtgggagatgatgaaagtgttcctacaggttatcacagtaaaacagaaggagcagaaagaaccaatgatgatagctcagctgaaactattgaaaagaaagaaaaagccaacctagaggaacgggccatttgtgagtacaatgaaaacccaaaaggatacatgcttgatgatgcagatagcagttcattagaaatcctagaaaacagtgaaacaacaccaagcaaagacatgaaaaaaacaaagaagatttttctgttcaaaagagtcccctcaataaatcaaaagattgtcaagaataacaatgagccgctcccagagataaaatccataggagaccagatcattttaaaaagtgataataaagatgccgaccagaaccacatgagtcagaatcatcagaatatcccaccaacaaatacagagagaagatcaaaatcctgtacaatactataaatatatatttatgttttcacagtcaccaagtgtattgtaatgtatacttgaaaaatgttataacttatgaagtaaagtttctgatagtagtctttaaaagatataagacttaatatgttttattcagcttctataagtgtgaccagttttgatatttatttatgctaatatttttaacaagtcatttcaaaatatgtgtatctcaaattctccctaaagtgttgtggccttaactgttcagtattgcaataaaaaatatatttttatatgtgg

SEQ ID NO: 26015 - DNA, 2979 bp, Homo sapiens
  source 1..2979: mol_type = unassigned DNA
gtttgttgacttccgggagcgcggttgtagttgatctccggagtttcgccatgcggaacttgggggctttcgcggcccgcgtcggtgcggagtagctgctttagccccgaccaaaccgtcctctacagcctcctggccccggcgcaggctgcccgtactgcccgtggcatgagggagccggaagagctgatgcccgattcgggtgctgtgtttacatttgggaaaagtaaatttgctgaaaataatcccggtaaattctggtttaaaaatgatgtccctgtacatctttcatgtggagatgaacattctgctgttgttaccggaaataataaactttacatgtttggcagtaacaactggggtcagttaggattaggatcaaagtcagccatcagcaagccaacatgtgtcaaagctctaaaacctgaaaaagtgaaattagctgcctgtggaaggaaccacaccctggtgtcaacagaaggaggcaatgtatatgcaactggtggaaataatgaaggacagttggggcttggtgacaccgaagaaagaaacacttttcatgtaattagcttttttacatccgagcataagattaagcagctgtctgctggatctaatacttcagctgccctaactgaggatggaagactttttatgtggggtgacaattccgaagggcaaattggtttaaaaaatgtaagtaatgtctgtgtccctcagcaagtgaccattgggaaacctgtctcctggatctcttgtggatattaccattcagcttttgtaacaacagatggtgagctatatgtgtttggagaacctgagaatgggaagttaggtcttcccaatcagctcctgggcaatcacagaacaccccagctggtgtctgaaattccggagaaggtgatccaagtagcctgtggtggagagcatactgtggttctcacggagaatgctgtgtatacctttgggctgggacaatttggtcagctgggtcttggcacttttctttttgaaacttcagaacccaaagtcattgagaatattagggatcaaacaataagttatatttcttgtggagaaaatcacacagctttgataacagatatcggccttatgtatacttttggagatggtcgccacggaaaattaggacttggactggagaattttaccaatcacttcattcctactttgtgctctaattttttgaggtttatagttaaattggttgcttgtggtggatgtcacatggtagtttttgctgctcctcatcgtggtgtggcaaaagaaattgaattcgatgaaataaatgatacttgcttatctgtggcgacttttctgccgtatagcagtttaacctcaggaaatgtactgcagaggactctatcagcacgtatgcggcgaagagagagggagaggtctccagattctttttcaatgaggagaacactacctccaatagaagggactcttggcctttctgcttgttttctccccaattcagtctttccacgatgttctgagagaaacctccaagagagtgtcttatctgaacaggacctcatgcagccagaggaaccagacacacatcatgagcctgaattccaatgaaaagtcattaaaattatcaccagttcagaaacaaaagaaacaacaaacaattggggaactgacgcaggatacagctcttactgaaaacgatgatagtgatgaatatgaagaaatgtcagaaatgaaagaagggaaagcatgtaaacaacatgtgtcacaagggattttcatgacgcagccagctacgactatcgaagcattttcagatgaggaagtagagatcccagaggagaaggaaggagcagaggattcaaaaggaaatggaatagaggagcaagaggtagaagcaaatgaggaaaatgtgaaggtgcatggaggaagaaaggagaaaacagagatcctatcagatgaccttacagacaaagcagaggatcatgaattttctaaaactgaggaactaaaactagaagatgtggatgaggaaattaatgctgaaaatgtggaaagcaagaagaaaactgtgggagatgatgaaagtgttcctacaggttatcacagtaaaacagaaggagcagaaagaaccaatgatgatagctcagctgaaactattgaaaagaaagaaaaagccaacctagaggaacgggccatttgtgagtacaatgaaaacccaaaaggatacatgcttgatgatgcagatagcagttcattagaaatcctagaaaacagtgaaacaacaccaagcaaagacatgaaaaaaacaaagaagatttttctgttcaaaagagtcccctcaataaatcaaaagattgtcaagaataacaatgagccgctcccagagataaaatccataggagaccagatcattttaaaaagtgataataaagatgccgaccagaaccacatgagtcagaatcatcagaatatcccaccaacaaatacagagagaagatcaaaatcctgtacaatactataaatatatatttatgttttcacagtcaccaagtgtattgtaatgtatacttgaaaaatgttataacttatgaagtaaagtttctgatagtagtctttaaaagatataagacttaatatgttttattcagcttctataagtgtgaccagttttgatatttatttatgctaatatttttaacaagtcatttcaaaatatgtgtatctcaaattctccctaaagtgttgtggccttaactgttcagtattgcaataaaaaatatatttttatatgtggaaaattgaaataagatatttcctagtttttactaaacaattttacttctttataattttataaggcaatatttgcaatcttacgacactgtaacagtttttgatgtatttacaatttttacaaaactgaggtaaaattgtttataatgaacatattttaataaactatatctggtcagttcc

SEQ ID NO: 26016 - DNA, 3686 bp, Homo sapiens
  source 1..3686: mol_type = unassigned DNA
gtttgttgacttccgggagcgcggttgtagttgatctccggagtttcgccatgcggaacttgggggctttcgcggcccgcgtcggtgcggagtagctgctttagccccgaccaaaccgtcctctacagcctcctggccccggcgcaggctgcccgtactgcccgtggcatgagggagccggaagagctgatgcccgattcgggtgctgtgtttacatttgggaaaagtaaatttgctgaaaataatcccggtaaattctggtttaaaaatgatgtccctgtacatctttcatgtggagatgaacattctgctgttgttaccggaaataataaactttacatgtttggcagtaacaactggggtcagttaggattaggatcaaagtcagccatcagcaagccaacatgtgtcaaagctctaaaacctgaaaaagtgaaattagctgcctgtggaaggaaccacaccctggtgtcaacagaaggaggcaatgtatatgcaactggtggaaataatgaaggacagttggggcttggtgacaccgaagaaagaaacacttttcatgtaattagcttttttacatccgagcataagattaagcagctgtctgctggatctaatacttcagctgccctaactgaggatggaagactttttatgtggggtgacaattccgaagggcaaattggtttaaaaaatgtaagtaatgtctgtgtccctcagcaagtgaccattgggaaacctgtctcctggatctcttgtggatattaccattcagcttttgtaacaacagatggtgagctatatgtgtttggagaacctgagaatgggaagttaggtcttcccaatcagctcctgggcaatcacagaacaccccagctggtgtctgaaattccggagaaggtgatccaagtagcctgtggtggagagcatactgtggttctcacggagaatgctgtgtatacctttgggctgggacaatttggtcagctgggtcttggcacttttctttttgaaacttcagaacccaaagtcattgagaatattagggatcaaacaataagttatatttcttgtggagaaaatcacacagctttgataacagatatcggccttatgtatacttttggagatggtcgccacggaaaattaggacttggactggagaattttaccaatcacttcattcctactttgtgctctaattttttgaggtttatagttaaattggttgcttgtggtggatgtcacatggtagtttttgctgctcctcatcgtggtgtggcaaaagaaattgaattcgatgaaataaatgatacttgcttatctgtggcgacttttctgccgtatagcagtttaacctcaggaaatgtactgcagaggactctatcagcacgtatgcggcgaagagagagggagaggtctccagattctttttcaatgaggagaacactacctccaatagaagggactcttggcctttctgcttgttttctccccaattcagtctttccacgatgttctgagagaaacctccaagagagtgtcttatctgaacaggacctcatgcagccagaggaaccagattatttgctagatgaaatgaccaaagaagcagagatagataattcttcaactgtagaaagccttggagaaactactgatatcttaaacatgacacacatcatgagcctgaattccaatgaaaagtcattaaaattatcaccagttcagaaacaaaagaaacaacaaacaattggggaactgacgcaggatacagctcttactgaaaacgatgatagtgatgaatatgaagaaatgtcagaaatgaaagaagggaaagcatgtaaacaacatgtgtcacaagggattttcatgacgcagccagctacgactatcgaagcattttcagatgaggaagtaggtaatgacacaggccaggtgggacctcaggctgacactgatggagagggtttacaaaaagaggtatatagacatgaaaataataatggtgttgatcaacttgatgctaaggaaatagaaaaggaaagtgatggaggacacagtcagaaggaatcagaagcagaagaaatagacagtgagaaggaaactaaactggcagaaatagcaggtatgaaggatttaagagaaagggaaaagagtacaaaaaagatgagtcctttctttggcaacttaccagatagaggtatgaatactgagagtgaagaaaataaagattttgttaagaaaagggaaagttgcaagcaagatgtgatctttgacagtgaaagagaatcagtagaaaagccagacagttacatggaaggtgcaagtgagagtcaacagggtatagctgatggattccagcagcctgaggcaatagaatttagtagtggagagaaagaggatgatgaagtggaaactgaccaaaacatacggtatggcaggaaattgattgaacaaggaaatgaaaaagagactaaacccataatatccaaatccatggcaaagtatgattttaaatgtgatcgcttgtcagagatcccagaggagaaggaaggagcagaggattcaaaaggaaatggaatagaggagcaagaggtagaagcaaatgaggaaaatgtgaaggtgcatggaggaagaaaggagaaaacagagatcctatcagatgaccttacagacaaagcagaggatcatgaattttctaaaactgaggaactaaaactagaagatgtggatgaggaaattaatgctgaaaatgtggaaagcaagaagaaaactgtgggagatgatgaaagtgttcctacaggttatcacagtaaaacagaaggagcagaaagaaccaatgatgatagctcagctgaaactattgaaaagaaagaaaaagccaacctagaggaacgggccatttgtgagtacaatgaaaacccaaaaggatacatgcttgatgatgcagatagcagttcattagaaatcctagaaaacagtgaaacaacaccaagcaaagacatgaaaaaaacaaagaagatttttctgttcaaaagagtcccctcaataaatcaaaagattgtcaagaataacaatgagccgctcccagagataaaatccataggagaccagatcattttaaaaagtgataataaagatgccgaccagaaccacatgagtcagaatcatcagaatatcccaccaacaaatacagagagaagatcaaaatcctgtacaatactataaatatatatttatgttttcacagtcaccaagtgtattgtaatgtatacttgaaaaatgttataacttatgaagtaaagtttctgatagtagtctttaaaagatataagacttaatatgttttattcagcttctataagtgtgaccagttttgatatttatttatgctaatatttttaacaagtcatttcaaaatatgtgtatctcaaattctccctaaagtgttgtggccttaactgttcagtattgcaataaaaaatatatttttatatgtggaaaattgaaataagatatttcctagtttttactaaacaattttacttctttataattttataaggcaatatttgcaatcttacgacactgtaacagtttttgatgtatttacaatttttacaaaactgaggtaaaattgtttataatgaacatattttaataaactatatctggtcagttcc

SEQ ID NO: 26017 - DNA, 2109 bp, Homo sapiens
  source 1..2109: mol_type = unassigned DNA
gtttgttgacttccgggagcgcggttgtagttgatctccggagtttcgccatgcggaacttgggggctttcgcggcccgcgtcggtgcggagtagctgctttagccccgaccaaaccgtcctctacagcctcctggccccggcgcaggctgcccgtactgcccgtggcatgagggagccggaagagctgatgcccgattcgggtgctgtgtttacatttgggaaaagtaaatttgctgaaaataatcccggtaaattctggtttaaaaatgatgtccctgtacatctttcatgtggagatgaacattctgctgttgttaccggaaataataaactttacatgtttggcagtaacaactggggtcagttaggattaggatcaaagtcagccatcagcaagccaacatgtgtcaaagctctaaaacctgaaaaagtgaaattagctgcctgtggaaggaaccacaccctggtgtcaacagaaggaggcaatgtatatgcaactggtggaaataatgaaggacagttggggcttggtgacaccgaagaaagaaacacttttcatgtaattagcttttttacatccgagcataagattaagcagctgtctgctggatctaatacttcagctgccctaactgaggatggaagactttttatgtggggtgacaattccgaagggcaaattggtttaaaaaatgtaagtaatgtctgtgtccctcagcaagtgaccattgggaaacctgtctcctggatctcttgtggatattaccattcagcttttgtaacaacagatggtgagctatatgtgtttggagaacctgagaatgggaagttaggtcttcccaatcagctcctgggcaatcacagaacaccccagctggtgtctgaaattccggagaaggtgatccaagtagcctgtggtggagagcatactgtggttctcacggagaatgctgtgtatacctttgggctgggacaatttggtcagctgggtcttggcacttttctttttgaaacttcagaacccaaagtcattgagaatattagggatcaaacaataagttatatttcttgtggagaaaatcacacagctttgataacagatatcggccttatgtatacttttggagatggtcgccacggaaaattaggacttggactggagaattttaccaatcacttcattcctactttgtgctctaattttttgaggtttatagttaaattggttgcttgtggtggatgtcacatggtagtttttgctgctcctcatcgtggtgtggcaaaagaaattgaattcgatgaaataaatgatacttgcttatctgtggcgacttttctgccgtatagcagtttaacctcaggaaatgtactgcagaggactctatcagcacgtatgcggcgaagagagagggagaggtctccagattctttttcaatgaggagaacactacctccaatagaagggactcttggcctttctgcttgttttctccccaattcagtctttccacgatgttctgagagaaacctccaagagagtgtcttatctgaacaggacctcatgcagccagaggaaccagattatttgctagatgaaatgaccaaagaagcagagatagataattcttcaactgtagaaagccttggagaaactactgatatcttaaacatgacacacatcatgagcctgaattccaatgaaaagtcattaaaattatcaccagttcagaaacaaaagaaacaacaaacaattggggaactgacgcaggatacagctcttactgaaaacgatgatagtgatgaatatgaagaaatgtcagaaatgaaagaagggaaagcatgtaaacaacatgtgtcacaagggattttcatgacgcagccagctacgactatcgaagcattttcagatgaggaagtagagatcccagaggagaaggaaggagcagaggattcaaaaggaaatggaatagaggagcaagaggtagaagcaaatgaggaaaatgtgaaggtgcatggaggaagaaaggagaaaacagagatcctatcagatgaccttacagacaaagcagagtattctgccagtcactcccaaattgtttcagtttaa

SEQ ID NO: 26018 - DNA, 4767 bp, Homo sapiens
  source 1..4767: mol_type = unassigned DNA
gtagcggctgtttgttgacttccgggagcgcggttgtagttgatctccggagtttcgccatgcggaacttgggggctttcgcggcccgcgtcggtgcggagtagctgctttagccccgaccaaaccgtcctctacagcctcctggccccggcgcaggctgcccgtactgcccgtggcatgagggagccggaagagctgatgcccgattcgggtgctgtgtttacatttgggaaaagtaaatttgctgaaaataatcccggtaaattctggtttaaaaatgatgtccctgtacatctttcatgtggagatgaacattctgctgttgttaccggaaataataaactttacatgtttggcagtaacaactggggtcagttaggattaggatcaaagtcagccatcagcaagccaacatgtgtcaaagctctaaaacctgaaaaagtgaaattagctgcctgtggaaggaaccacaccctggtgtcaacagaaggaggcaatgtatatgcaactggtggaaataatgaaggacagttggggcttggtgacaccgaagaaagaaacacttttcatgtaattagcttttttacatccgagcataagattaagcagctgtctgctggatctaatacttcagctgccctaactgaggatggaagactttttatgtggggtgacaattccgaagggcaaattggtttaaaaaatgtaagtaatgtctgtgtccctcagcaagtgaccattgggaaacctgtctcctggatctcttgtggatattaccattcagcttttgtaacaacagatggtgagctatatgtgtttggagaacctgagaatgggaagttaggtcttcccaatcagctcctgggcaatcacagaacaccccagctggtgtctgaaattccggagaaggtgatccaagtagcctgtggtggagagcatactgtggttctcacggagaatgctgtgtatacctttgggctgggacaatttggtcagctgggtcttggcacttttctttttgaaacttcagaacccaaagtcattgagaatattagggatcaaacaataagttatatttcttgtggagaaaatcacacagctttgataacagatatcggccttatgtatacttttggagatggtcgccacggaaaattaggacttggactggagaattttaccaatcacttcattcctactttgtgctctaattttttgaggtttatagttaaattggttgcttgtggtggatgtcacatggtagtttttgctgctcctcatcgtggtgtggcaaaagaaattgaattcgatgaaataaatgatacttgcttatctgtggcgacttttctgccgtatagcagtttaacctcaggaaatgtactgcagaggactctatcagcacgtatgcggcgaagagagagggagaggtctccagattctttttcaatgaggagaacactacctccaatagaagggactcttggcctttctgcttgttttctccccaattcagtctttccacgatgttctgagagaaacctccaagagagtgtcttatctgaacaggacctcatgcagccagaggaaccagattatttgctagatgaaatgaccaaagaagcagagatagataattcttcaactgtagaaagccttggagaaactactgatatcttaaacatgacacacatcatgagcctgaattccaatgaaaagtcattaaaattatcaccagttcagaaacaaaagaaacaacaaacaattggggaactgacgcaggatacagctcttactgaaaacgatgatagtgatgaatatgaagaaatgtcagaaatgaaagaagggaaagcatgtaaacaacatgtgtcacaagggattttcatgacgcagccagctacgactatcgaagcattttcagatgaggaagtagagatcccagaggagaaggaaggagcagaggattcaaaaggaaatggaatagaggagcaagaggtagaagcaaatgaggaaaatgtgaaggtgcatggaggaagaaaggagaaaacagagatcctatcagatgaccttacagacaaagcagaggtgagtgaaggcaaggcaaaatcagtgggagaagcagaggatgggcctgaaggtagaggggatggaacctgtgaggaaggtagttcaggagcagaacactggcaagatgaggagagggagaagggggagaaagacaagggtagaggagaaatggagaggccaggagagggagagaaggaactagcagagaaggaagaatggaagaagagggatggggaagagcaggagcaaaaggagagggagcagggccatcagaaggaaagaaaccaagagatggaggagggaggggaggaggagcatggagaaggagaagaagaggagggagacagagaagaggaagaagagaaggagggagaagggaaagaggaaggagaaggggaagaagtggagggagaacgtgaaaaggaggaaggagagaggaaaaaggaggaaagagcggggaaggaggagaaaggagaggaagaaggagaccaaggagagggggaagaggaggaaacagaggggagaggggaggaaaaagaggagggaggggaagtagagggaggggaagtagaggaggggaaaggagagagggaagaggaagaggaggagggtgagggggaagaggaggaaggggagggggaagaggaggaaggggagggggaagaggaggaaggagaagggaaaggggaggaagaaggggaagaaggagaaggggaggaagaaggggaggaaggagaaggggagggggaagaggaggaaggagaaggggagggagaagaggaaggagaaggggagggagaagaggaggaaggagaaggggagggagaagaggaaggagaaggggagggagaagaggaggaaggagaagggaaaggggaggaggaaggagaggaaggagaaggggagggggaagaggaggaaggagaaggggaaggggaggatggagaaggggagggggaagaggaggaaggagaatgggagggggaagaggaggaaggagaaggggagggggaagaggaaggagaaggggaaggggaggaaggagaaggggagggggaagaggaggaaggagaaggggagggggaagaggaggaaggggaagaagaaggggaggaagaaggagagggagaggaagaaggggagggagaaggggaggaagaagaggaaggggaagtggaaggggaggtggaaggggaggaaggagagggggaaggagaggaagaggaaggagaggaggaaggagaagaaagggaaaaggagggggaaggagaagaaaacaggaggaacagagaagaggaggaggaagaagaggggaagtatcaggagacaggcgaagaagagaatgaaaggcaggatggagaggagtacaaaaaagtgagcaaaataaaaggatctgtgaaatatggcaaacataaaacatatcaaaaaaagtcagttactaacacacagggaaatgggaaagagcagaggtccaaaatgccagtccagtcaaaacgacttttaaaaaacgggccatcaggttccaaaaagttctggaataatgtattaccacattacttggaattgaagtaacaaaccttaaatgtgacccgattatggccagtcagacaatttaaatgccttgcatataacgggcactcattacgtgttattaaattgattttatgtcaattattttatgtgtagtaaaaaaaaaagcaactgatgcagctgtgttaaggagccaaagacaataggaggcactggtaaattttggcctctctcaaactaaaattttcgtgtatttcccccccaaattataaaaacataactagaaaatattaaaaggtcatatcagattattaacattatatattcattaaaggcagctttaggaaacaggaatatactacaagagtgttttgtttgtgtatacaaatcattccatttttaaatggcacagatgcttaagggctataaaaacttctaatttcttataaatatgttagcactttttttaagttagtgattacagtttacctactgtatagaataattttctaataatggatggtattctaaaactcaattgaggcattcacattttaaagaaagtattgtctttcaccttttatgtgttctttttgcaaaaatctacaaagtgacagctgtgttcagagcttagatcccaaaaacgtgatctcttttagttactatctgggcagatggtagtatatctaatgaaatggtgattaatttaaatgtataatctggaaatatgtaaaacttgaagtattttttgtccaggcaaaggtactcattgggcctcagtttcttcatctctaaaatggagtggatgagatgatgtgataactgcagtcccttctaactcttaaattcttttcattctcacagattcactctatcattattgttattcatgtaagaaacgttttagggagaaaaattacactttaaaattaatttagttttctatacagttgttttctttactcttgaaaagttatgacagctttaacgtctcttgtcttctgtaattttttatttctaaactcctatcatttccaagctttaactgtactttatcagagccttcatttctggtatgtgttatatgccctcaatgtattcactgactgttctgtaatttcagtttgtctgttccttgtcagaatgtttcaagtaaaataaaaaattaaatgt

SEQ ID NO: 26019 - DNA, 3944 bp, Homo sapiens
  source 1..3944: mol_type = unassigned DNA
atgtcacatctggtggaccctacatcaggagacttgccagttagagacatagatgctatacctctggtgctaccagcctcaaaaggtaagaatatgaaaactcaaccacccttgagcaggatgaaccgggaggaattggaggacagtttctttcgacttcgcgaagatcacatgttggtgaaggagctttcttggaagcaacaggatgagatcaaaaggctgaggaccaccttgctgcggttgaccgctgctggccgggacctgcgggtcgcggaggaggcggcgccgctctcggagaccgcaaggcgcgggcagaaggcgggatggcggcagcgcctctccatgcaccagcgcccccagatgcaccgactgcaagggcatttccactgcgtcggccctgccagcccccgccgcgcccagcctcgcgtccaagtgggacacagacagctccacacagccggtgcaccggtgccggagaaacccaagagggggccaagggacaggctgagctacacagcccctccatcgtttaaggagcatgcgacaaatgaaaacagaggtgaagtagccagtaaacccagtgaacttgtttctggttctaacagcataatttctttcagcagtgtcataagtatggctaaacccattggtctatgcatgcctaacagtgcccacatcatggccagcaataccatgcaagtggaagagccacccaagtctcctgagaaaatgtggcctaaagatgaaaattttgaacagagaagctcattggagtgtgctcagaaggctgcagagcttcgagcttccattaaagagaaggtagagctgattcgacttaagaagctcttacatgaaagaaatgcttcattggttatgacaaaagcacaattaacagaagttcaagaggcatgtactttccttttgacccagaatcagggaatcctgagtgcagcccatgaggccctcctcaagcaagtgaatgagctcagggcagagctgaaggaagaaagcaagaaggctgtgagcttgaagagccaactggaagatgtgtctatcttgcagatgactctgaaggagtttcaggagagagttgaagatttggaaaaagaacgaaaattgctgaatgacaattatgacaaactcttagaaagcatgctggacagcagtgacagctccagtcagccccactggagcaacgagctcatagcggaacagctacagcagcaagtctctcagctgcaggatcagctggatgctgagctggaggacaagagaaaagttttacttgagctgtccagggagaaagcccaaaatgaggatctgaagcttgaagtcaccaacatacttcagaagcataaacaggaagtagagctcctccaaaatgcagccacaatttcccaacctcctgacaggcaatctgaaccagccactcacccagctgtattgcaagagaacactcagatcgagccaagtgaacccaaaaaccaagaagaaaagaaactgtcccaggtgctaaatgagttgcaagtatcacacgcagagaccacattggaactagaaaagaccagggacatgcttattctgcagcgcaaaatcaacgtgtgttatcaggaggaactggaggcaatgatgacaaaagctgacaatgataatagagatcacaaagaaaagctggagaggttgactcgactactagacctcaagaataaccgtatcaagcagctggaaggtattttaagaagccatgaccttccaacatctgaacagctcaaagatgttgcttatggcacccgaccgttgtcgttatgtttggaaacactgccagcccatggagatgaggataaagtggatatttctctgctgcatcagggtgagaatctttttgaactgcacatccaccaggccttcctgacatctgccgccctagctcaggctggagatacccaacctaccactttctgcacctattccttctatgactttgaaacccactgtaccccattatctgtggggccacagcccctctatgacttcacctcccagtatgtgatggagacagattcgcttttcttacactaccttcaagaggcttcagcccggcttgacatacaccaggccatggccagtgaacacagcactcttgctgcaggatggatttgctttgacagggtgctagagactgtggagaaagtccatggcttggccacactgattggagctggtggagaagagttcggggttctagagtactggatgaggctgcgtttccccataaaacccagcctacaggcgtgcaataaacgaaagaaagcccaggtctacctgtcaaccgatgtgcttggaggccggaaggcccaggaagaggagttcagatcggagtcttgggaacctcagaacgagctgtggattgaaatcaccaagtgctgtggcctccggagtcgatggctgggaactcaacccagtccatatgctgtgtaccgcttcttcaccttttctgaccatgacactgccatcattccagccagtaacaacccctactttagagaccaggctcgattcccagtgcttgtgacctctgacctggaccattatctgagacgggaggccttgtctatacatgtttttgatgatgaagacttagagcctggctcgtatcttggccgagcccgagtgcctttactgcctcttgcaaaaaatgaatctatcaaaggtgattttaacctcactgaccctgcagagaaacccaacggatctattcaagtgcaactggattggaagtttccctacataccccctgagagcttcctgaaaccagaagctcagactaaggggaaggataccaaggacagttcaaagatctcatctgaagaggaaaaggcttcatttccttcccaggatcagatggcatctcctgaggttcccattgaagctggccagtatcgatctaagagaaaacctcctcatgggggagaaagaaaggagaaggagcaccaggttgtgagctactcaagaagaaaacatggcaaaagaataggtgttcaaggaaagaatagaatggagtatcttagccttaacatcttaaatggaaatacaccagagcaggtgaattacactgagtggaagttctcagagactaacagcttcataggtgatggctttaaaaatcagcacgaggaagaggaaatgacattatcccattcagcactgaaacagaaggaacctctacatcctgtaaatgacaaagaatcctctgaacaaggttctgaagtcagtgaagcacaaactaccgacagtgatgatgtcatagtgccacccatgtctcagaaatatcctaaggcagattcagagaagatgtgcattgaaattgtctccctggccttctacccagaggcagaagtgatgtctgatgagaacataaaacaggtgtatgtggagtacaaattctacgacctacccttgtcggagacagagactccagtgtccctaaggaagcctagggcaggagaagaaatccactttcactttagcaaggtaatagacctggacccacaggagcagcaaggccgaaggcggtttctgttcgacatgctgaatggacaagatcctgatcaaggacatttaaagtttacagtggtaagtgatcctctggatgaagaaaagaaagaatgtgaagaagtgggatatgcatatcttcaactgtggcagatcctggagtcaggaagagatattctagagcaagagctagacattgttagccctgaagatctggctaccccaataggaaggctgaaggtttcccttcaagcagctgctgtcctccatgctatttacaaggagatgactgaagatttgttttcatgaaggaacaagtgctattccaatctaaaagtctctgagggaaccatagtaaaaagtctcttataaagttagcttgctataacatg

SEQ ID NO: 26020 - DNA, 2021 bp, Homo sapiens
  source 1..2021: mol_type = unassigned DNA
atgttgcttatggcacccgaccgttgtcgttatgtttggaaacactgccagcccatggagatgaggataaagtggatatttctctgctgcatcaggcccctctatgacttcacctcccagtatgtgatggagacagattcgcttttcttacactaccttcaagaggcttcagcccggcttgacatacaccaggccatggccagtgaacacagcactcttgctgcaggatggatttgctttgacagggtgctagagactgtggagaaagtccatggcttggccacactgattggagctggtggagaagagttcggggttctagagtactggatgaggctgcgtttccccataaaacccagcctacaggcgtgcaataaacgaaagaaagcccaggtctacctgtcaaccgatgtgcttggaggccggaaggcccaggaagaggagttcagatcggagtcttgggaacctcagaacgagctgtggattgaaatcaccaagtgctgtggcctccggagtcgatggctgggaactcaacccagtccatatgctgtgtaccgcttcttcaccttttctgaccatgacactgccatcattccagccagtaacaacccctactttagagaccaggctcgattcccagtgcttgtgacctctgacctggaccattatctgagacgggaggccttgtctatacatgtttttgatgatgaagacttagagcctggctcgtatcttggccgagcccgagtgcctttactgcctcttgcaaaaaatgaatctatcaaaggtgattttaacctcactgaccctgcagagaaacccaacggatctattcaagtgcaactggattggaagtttccctacataccccctgagagcttcctgaaaccagaagctcagactaaggggaaggataccaaggacagttcaaagatctcatctgaagaggaaaaggcttcatttccttcccaggatcagatggcatctcctgaggttcccattgaagctggccagtatcgatctaagagaaaacctcctcatgggggagaaagaaaggagaaggagcaccaggttgtgagctactcaagaagaaaacatggcaaaagaataggtgttcaaggaaagaatagaatggagtatcttagccttaacatcttaaatggaaatacaccagagcaggtgaattacactgagtggaagttctcagagactaacagcttcataggtgatggctttaaaaatcagcacgaggaagaggaaatgacattatcccattcagcactgaaacagaaggaacctctacatcctgtaaatgacaaagaatcctctgaacaaggttctgaagtcagtgaagcacaaactaccgacagtgatgatgtcatagtgccacccatgtctcagaaatatcctaaggcagattcagagaagatgtgcattgaaattgtctccctggccttctacccagaggcagaagtgatgtctgatgagaacataaaacaggtgtatgtggagtacaaattctacgacctacccttgtcggagacagagactccagtgtccctaaggaagcctagggcaggagaagaaatccactttcactttagcaaggtaatagacctggacccacaggagcagcaaggccgaaggcggtttctgttcgacatgctgaatggacaagatcctgatcaaggacatttaaagtttacagtggtaagtgatcctctggatgaagaaaagaaagaatgtgaagaagtgggatatgcatatcttcaactgtggcagatcctggagtcaggaagagatattctagagcaagagctagacattgttagccctgaagatctggctaccccaataggaaggctgaaggtttcccttcaagcagctgctgtcctccatgctatttacaaggagatgactgaagatttgttttcatgaaggaacaagtgctattccaatctaaaagtctctgagggaaccatagtaaaaagtctcttataaagttagcttgctataacatg

SEQ ID NO: 26021 - DNA, 2004 bp, Homo sapiens
  source 1..2004: mol_type = unassigned DNA
agttggtaaatgacagttatgaataaagcaagggcagaaaaaaacatgtaggggagagaatgaggaactaggtccaggagatgctgaaactggataataaagacgtcatatcacaccccttggggtatccatctgagagcttgctttccattgccagcatgctggacagcagtgacagctccagtcagccccactggagcaacgagctcatagcggaacagctacagcagcaagtctctcagctgcaggatcagctggatgctgagctggaggacaagagaaaagttttacttgagctgtccagggagaaagcccaaaatgaggatctgaagcttgaagtcaccaacatacttcagaagcataaacaggaagtagagctcctccaaaatgcagccacaatttcccaacctcctgacaggcaatctgaaccagccactcacccagctgtattgcaagagaacactcagatcgagccaagtgaacccaaaaaccaagaagaaaagaaactgtcccaggtgctaaatgagttgcaagtatcacacgcagagaccacattggaactagaaaagaccagggacatgcttattctgcagcgcaaaatcaacgtgtgttatcaggaggaactggaggcaatgatgacaaaagctgacaatgataatagagatcacaaagaaaagctggagaggttgactcgactactagacctcaagaataaccgtatcaagcagctggaaggtattttaagaagccatgaccttccaacatctggtgattttaacctcactgaccctgcagagaaacccaacggatctattcaagtgcaactggattggaagtttccctacataccccctgagagcttcctgaaaccagaagctcagactaaggggaaggataccaaggacagttcaaagatctcatctgaagaggaaaaggcttcatttccttcccaggatcagatggcatctcctgaggttcccattgaagctggccagtatcgatctaagagaaaacctcctcatgggggagaaagaaaggagaaggagcaccaggttgtgagctactcaagaagaaaacatggcaaaagaataggtgttcaaggaaagaatagaatggagtatcttagccttaacatcttaaatggaaatacaccagagcaggtgaattacactgagtggaagttctcagagactaacagcttcataggtgatggctttaaaaatcagcacgaggaagaggaaatgacattatcccattcagcactgaaacagaaggaacctctacatcctgtaaatgacaaagaatcctctgaacaaggttctgaagtcagtgaagcacaaactaccgacagtgatgatgtcatagtgccacccatgtctcagaaatatcctaaggcagattcagagaagatgtgcattgaaattgtctccctggccttctacccagaggcagaagtgatgtctgatgagaacataaaacaggtgtatgtggagtacaaattctacgacctacccttgtcggagacagagactccagtgtccctaaggaagcctagggcaggagaagaaatccactttcactttagcaaggtaatagacctggacccacaggagcagcaaggccgaaggcggtttctgttcgacatgctgaatggacaagatcctgatcaaggacatttaaagtttacagtggtaagtgatcctctggatgaagaaaagaaagaatgtgaagaagtgggatatgcatatcttcaactgtggcagatcctggagtcaggaagagatattctagagcaagagctagacattgttagccctgaagatctggctaccccaataggaaggctgaaggtttcccttcaagcagctgctgtcctccatgctatttacaaggagatgactgaagatttgttttcatgaaggaacaagtgctattccaatctaaaagtctctgagggaaccatagtaaaaagtctcttataaagttagcttgctataacatgaa

SEQ ID NO: 26022 - DNA, 3940 bp, Homo sapiens
  source 1..3940: mol_type = unassigned DNA
atgtcacatctggtggaccctacatcaggagacttgccagttagagacatagatgctatacctctggtgctaccagcctcaaaaggtaagaatatgaaaactcaaccacccttgagcaggatgaaccgggaggaattggaggacagtttctttcgacttcgcgaagatcacatgttggtgaaggagctttcttggaagcaacaggatgagatcaaaaggctgaggaccaccttgctgcggttgaccgctgctggccgggacctgcgggtcgcggaggaggcggcgccgctctcggagaccgcaaggcgcgggcagaaggcgggatggcggcagcgcctctccatgcaccagcgcccccagatgcaccgactgcaagggcatttccactgcgtcggccctgccagcccccgccgcgcccagcctcgcgtccaagtgggacacagacagctccacacagccggtgcaccggtgccggagaaacccaagagggggccaagggacaggctgagctacacagcccctccatcgtttaaggagcatgcgacaaatgaaaacagaggtgaagtagccagtaaacccagtgaacttgtttctggttctaacagcataatttctttcagcagtgtcataagtatggctaaacccattggtctatgcatgcctaacagtgcccacatcatggccagcaataccatgcaagtggaagagccacccaagtctcctgagaaaatgtggcctaaagatgaaaattttgaacagagaagctcattggagtgtgctcagaaggctgcagagcttcgagcttccattaaagagaaggtagagctgattcgacttaagaagctcttacatgaaagaaatgcttcattggttatgacaaaagcacaattaacagaagttcaagaggcatacgaaaccttgctccagaagaatcagggaatcctgagtgcagcccatgaggccctcctcaagcaagtgaatgagctcagggcagagctgaaggaagaaagcaagaaggctgtgagcttgaagagccaactggaagatgtgtctatcttgcagatgactctgaaggagtttcaggagagagttgaagatttggaaaaagaacgaaaattgctgaatgacaattatgacaaactcttagaaagcatgctggacagcagtgacagctccagtcagccccactggagcaacgagctcatagcggaacagctacagcagcaagtctctcagctgcaggatcagctggatgctgagctggaggacaagagaaaagttttacttgagctgtccagggagaaagcccaaaatgaggatctgaagcttgaagtcaccaacatacttcagaagcataaacaggaagtagagctcctccaaaatgcagccacaatttcccaacctcctgacaggcaatctgaaccagccactcacccagctgtattgcaagagaacactcagatcgagccaagtgaacccaaaaaccaagaagaaaagaaactgtcccaggtgctaaatgagttgcaagtatcacacgcagagaccacattggaactagaaaagaccagggacatgcttattctgcagcgcaaaatcaacgtgtgttatcaggaggaactggaggcaatgatgacaaaagctgacaatgataatagagatcacaaagaaaagctggagaggttgactcgactactagacctcaagaataaccgtatcaagcagctggaaggtattttaagaagccatgaccttccaacatctgaacagctcaaagatgttgcttatggcacccgaccgttgtcgttatgtttggaaacactgccagcccatggagatgaggataaagtggatatttctctgctgcatcagggtgagaatctttttgaactgcacatccaccaggccttcctgacatctgccgccctagctcaggctggagatacccaacctaccactttctgcacctattccttctatgactttgaaacccactgtaccccattatctgtggggccacagcccctctatgacttcacctcccagtatgtgatggagacagattcgcttttcttacactaccttcaagaggcttcagcccggcttgacatacaccaggccatggccagtgaacacagcactcttgctgcaggatggatttgctttgacagggtgctagagactgtggagaaagtccatggcttggccacactgattggagctggtggagaagagttcggggttctagagtactggatgaggctgcgtttccccataaaacccagcctacaggcgtgcaataaacgaaagaaagcccaggtctacctgtcaaccgatgtgcttggaggccggaaggcccaggaagaggagttcagatcggagtcttgggaacctcagaacgagctgtggattgaaatcaccaagtgctgtggcctccggagtcgatggctgggaactcaacccagtccatatgctgtgtaccgcttcttcaccttttctgaccatgacactgccatcattccagccagtaacaacccctactttagagaccaggctcgattcccagtgcttgtgacctctgacctggaccattatctgagacgggaggccttgtctatacatgtttttgatgatgaagacttagagcctggctcgtatcttggccgagcccgagtgcctttactgcctcttgcaaaaaatgaatctatcaaaggtgattttaacctcactgaccctgcagagaaacccaacggatctattcaagtgcaactggattggaagtttccctacataccccctgagagcttcctgaaaccagaagctcagactaaggggaaggataccaaggacagttcaaagatctcatctgaagaggaaaaggcttcatttccttcccaggatcagatggcatctcctgaggttcccattgaagctggccagtatcgatctaagagaaaacctcctcatgggggagaaagaaaggagaaggagcaccaggttgtgagctactcaagaagaaaacatggcaaaagaataggtgttcaaggaaagaatagaatggagtatcttagccttaacatcttaaatggaaatacaccagagcaggtgaattacactgagtggaagttctcagagactaacagcttcataggtgatggctttaaaaatcagcacgaggaagaggaaatgacattatcccattcagcactgaaacagaaggaacctctacatcctgtaaatgacaaagaatcctctgaacaaggttctgaagtcagtgaagcacaaactaccgacagtgatgatgtcatagtgccacccatgtctcagaaatatcctaaggcagattcagagaagatgtgcattgaaattgtctccctggccttctacccagaggcagaagtgatgtctgatgagaacataaaacaggtgtatgtggagtacaaattctacgacctacccttgtcggagacagagactccagtgtccctaaggaagcctagggcaggagaagaaatccactttcactttagcaaggtaatagacctggacccacaggagcagcaaggccgaaggcggtttctgttcgacatgctgaatggacaagatcctgatcaaggacatttaaagtttacagtggtaagtgatcctctggatgaagaaaagaaagaatgtgaagaagtgggatatgcatatcttcaactgtggcagatcctggagtcaggaagagatattctagagcaagagctagacattgttagccctgaagatctggctaccccaataggaaggctgaaggtttcccttcaagcagctgctgtcctccatgctatttacaaggagatgactgaagatttgttttcatgaaggaacaagtgctattccaatctaaaagtctctgagggaaccatagtaaaaagtctcttataaagttagcttgctataa

SEQ ID NO: 26023 - DNA, 4404 bp, Homo sapiens
  source 1..4404: mol_type = unassigned DNA
gcggggccttctaaggccgaaagtcttcggagcttgcgccagtctcttcgcggcgtccaccacttagacgcaagttgctgaagccggccggggagaaggtgttgttgccggagctgagaccgggcggccacagtccgcagggatgaacctcgagttgctggagtcctttgggcagaactatccagaggaagctgatggaactttggattgtatcagcatggctttgacttgcacctttaacaggtggggcacactgcttgcagttggctgtaatgatggccgaattgtcatctgggatttcttgacaagaggcattgctaaaataattagtgcacacatccatccagtgtgttctttatgctggagccgagatggtcataaactcgtgagtgcttccactgataacatagtgtcacagtgggatgttctttcaggcgactgtgaccagaggtttcgattcccttcacccatcttaaaagtccaatatcatccacgagatcagaacaaggttctcgtgtgtcccatgaaatctgctcctgtcatgttgaccctttcagattccaaacatgttgttctgccggtggacgatgactccgatttgaacgttgtggcatcttttgataggcgaggggaatatatttatacgggaaacgcaaaaggcaagattttggtcctaaaaacagattctcaggatcttgttgcttccttcagagtgacaactggaacaagcaataccacagccattaagtcaattgagtttgcccggaaggggagttgctttttaattaacacggcagatcgaataatcagagtttatgatggcagagaaatcttaacatgtggaagagatggagagcctgaacctatgcagaaattgcaggatttggtgaataggaccccatggaagaaatgttgtttctctggggatggggaatacatcgtggcaggttctgcccggcagcatgccctgtacatctgggagaagagcattggcaacctggtgaagattctccatgggacgagaggagaactcctcttggatgtagcttggcatcctgttcgacccatcatagcatccatttccagtggagtggtatctatctgggcacagaatcaagtagaaaactggagtgcatttgcaccagacttcaaagaattggatgaaaatgtagaatacgaagaaagggaatcagagtttgatattgaagatgaagataagagtgagcctgagcagacaggggctgatgctgcagaagatgaggaagtggatgtcaccagcgtggaccctattgctgccttctgtagcagtgatgaagagctggaagattcaaaggctctattgtatttacccattgcccctgaggtagaagacccagaagaaaatccttacggccccccaccggatgcagtccaaacctccttgatggatgaaggggctagttcagagaagaagaggcagtcctcagcagatgggtcccagccacctaagaagaaacccaaaacaaccaatatagaacttcaaggagtaccaaatgatgaagtccatccactactgggtgtgaagggggatggcaaatccaagaagaagcaagcaggccggcctaaaggatcaaaaggtaaagagaaagattctccatttaaaccgaaactctacaaaggggacagaggtttacctctggaaggatcagcgaagggtaaagtgcaggcggaactcagccagcccttgacagcaggaggagcaatctcagaactgttatgaagaccttcgaagttcttcattctttctcactttgccatcatgtggcctctggacactgtggtcagtcatttgaaaattgactttaatttaaaacaaaggcctgtgcctcccacccaggaggtgggagggtgaattttatgtttaaatgaagaagtgaattatggaagaagagtatacgaccttcccttccctttcaagcataagtccaaatagactctcaggaatgaagatttgtgaagacatcagataggaattttgactcatttaaactttgatgcttagttatgttgctggagaaaagatacttatgttttgctcatctaacttcattgtacccagcgtcattttgacatgtcatttcctatctcccatttgccttcggtcctcaatgcatgtctttgagtgacttcttatctgaaattttgctactggtatcctaggaaagcttttgttggatactctcattttaaacttctcctctccccagatacctcctatatttccatattgtgtgcaaaggatgggcagaaaagaaagtgcttgaaagatttcaaattttcagaaagggaacaacgaaggccctctcttcctctcataccacgttttgctcaagaagctgggctgtaacaattcagggttttcccttgttttcctctcattgcatgtttccctccaatattggttcattgtcatcaatcatggtttttgaagatagctagttttatccatctccagcaaagaatcatcaatagtttatattgctttacctgtgctggcttccagagatggaaacaaacccaggtgtctctcaacaagctacttttttactggggtgggggaatctatgcaaggagtaaagtaaaaccatccagaatcaaagcagcaaccacatagttcaaatcaaagatcaaggtgaattttttgtatcactgcctgtggaaatctatcctcatcagtcattgcatttttccctgcctatacctgtgctcctttttcttactgtgttttcagtcacttcctttctgtgaaaggttgcttagctttttttttgacatttgttgttctttataaaaataacagattggatagatgtgtacatttggtgtttgaaattctctgaaaatcccattaggaaaccaggtgtgaaaagggctcagtagcttctctgagtggcgtttttagctgactggaagtgcttaatctggatcgtcttttttttttttttttttttttcaatattttaaaaggagaatttaaatactgtgcttactgtgaaatatatcagttggtgagccgggcgtggtgggtcacgcctgtaatcccagcactttgggaggccaaggcgggttgatcacccgaggtcaggagttcaagaccagcctggccaacgtggtgaaagcctgtatctattaaaagacaaaaattagctgggcgtggtagtacatgcctgtaatcccagctacactggaggctgagtcaggagaatcacttgaacgtgggaggcagaggttgcagtgagtggagatcgcaccactgccctccagcctaggtgacagaatgagactctatctcaaaaaaaaaaaaaaaatgatatcagttggtggatgctcctataggtagccaaacacattgattacctgttagattttaggatagaaatcaaagtagagcacgtcagcaagagcctctttgtctcactccatcatttaaaaccagtatattcagtagttgaagaaagagctctccctgagtcagttgcaaaacgtctatatttttagatgccactacttttttcttaaatattcattttgagactgtcatgagttagaccagtggttgagattagtagatggctcactagacatgtttttgttttgcagacattatatccattccagtcctctgcactgtacactgcagcagtgtgcaaactatgggacttagagggtttctgccatctttccacgtgtgaagtagcttggtttcctctgcctgtgcatttggatgtttgtgctatgtccacctcctaaactggctactgagaaaatcatcttcagccctgtcagattgtctctggcagtagctcctaataattatttatgtttttggaatttttttttcaacttttaaaaaaccttctatccatttcaatttgaattatttgatttgtacaatatatgtatattctcttcttcctttttgtcatccctgccctgccacccccaaaattttgtttttaaaaatattctgggctgggcatggtggctcacacctgtaatcccagcacttggggaggccgaggctggtggatcatctgaggtcaggtgtttgagaccagcctggtcaacatggtgaaaccccgtctctactaaaaatacaaaaattagctgggcgtggtggcgggcacctgtaatcctagctactcgggaggctgaggcaggagaattgcttgaatccaggaggcagaggttgcagtgagctgagattgcgccactgcactccagcctgggtgacagagcaagactccatctcaaaaaaaaaaaaaaaaaaaaatctgtagttttgtacaagatgagacttagccttgggtacttcttgctgaagctttaatgctttgtaaataaaatcggatgtttattaaagaa

SEQ ID NO: 26024 - DNA, 4290 bp, Homo sapiens
  source 1..4290: mol_type = unassigned DNA
gcggggccttctaaggccgaaagtcttcggagcttgcgccagtctcttcgcggcgtccaccacttagacgcaagttgctgaagccggccggggagaaggtgttgttgccggagctgagaccgggcggccacagtccgcagggatgaacctcgagttgctggagtcctttgggcagaactatccagaggaagctgatggaactttggattgtatcagcatggctttgacttgcacctttaacaggtggggcacactgcttgcagttggctgtaatgatggccgaattgtcatctgggatttcttgacaagaggcattgctaaaataattagtgcacacatccatccagtgtgttctttatgctggagccgagatggtcataaactcgtgagtgcttccactgataacatagtgtcacagtgggatgttctttcaggcgactgtgaccagaggtttcgattcccttcacccatcttaaaagtccaatatcatccacgagatcagaacaaggttctcgtgtgtcccatgaaatctgctcctgtcatgttgaccctttcagattccaaacatgttgttctgccggtggacgatgactccgatttgaacgttgtggcatcttttgataggcgaggggaatatatttatacgggaaacgcaaaaggcaagattttggtcctaaaaacagattctcaggatcttgttgcttccttcagagtgacaactggaacaagcaataccacagccattaagtcaattgagtttgcccggaaggggagttgctttttaattaacacggcagatcgaataatcagagtttatgatggcagagaaatcttaacatgtggaagagatggagagcctgaacctatgcagaaattgcaggatttggtgaataggaccccatggaagaaatgttgtttctctggggatggggaatacatcgtggcaggttctgcccggcagcatgccctgtacatctgggagaagagcattggcaacctggtgaagattctccatgggacgagaggagaactcctcttggatgtagcttggcatcctgttcgacccatcatagcatccatttccagtggagtggtatctatctgggcacagaatcaagtagaaaactggagtgcatttgcaccagacttcaaagaattggatgaaaatgtagaatacgaagaaagggaatcagagtttgatattgaagatgaagataagagtgagcctgagcagacaggggctgatgctgcagaagatgaggaagtggatgtcaccagcgtggaccctattgctgccttctgtagcagtgatgaagagctggaagattcaaaggctctattgtatttacccattgcccctgaggtagaagacccagaagaaaatccttacggccccccaccggatgcagtccaaacctccttgatggatgaaggggctagttcagagaagaagaggcagtcctcagcagatgggtcccagccacctaagaagaaacccaaaacaaccaatatagaacttcaaggagtaccaaatgatgaagtccatccactactgggtgtgaagggggatggcaaatccaagaagaagcaagcaggccggcctaaaggatcaaaagcaggaggagcaatctcagaactgttatgaagaccttcgaagttcttcattctttctcactttgccatcatgtggcctctggacactgtggtcagtcatttgaaaattgactttaatttaaaacaaaggcctgtgcctcccacccaggaggtgggagggtgaattttatgtttaaatgaagaagtgaattatggaagaagagtatacgaccttcccttccctttcaagcataagtccaaatagactctcaggaatgaagatttgtgaagacatcagataggaattttgactcatttaaactttgatgcttagttatgttgctggagaaaagatacttatgttttgctcatctaacttcattgtacccagcgtcattttgacatgtcatttcctatctcccatttgccttcggtcctcaatgcatgtctttgagtgacttcttatctgaaattttgctactggtatcctaggaaagcttttgttggatactctcattttaaacttctcctctccccagatacctcctatatttccatattgtgtgcaaaggatgggcagaaaagaaagtgcttgaaagatttcaaattttcagaaagggaacaacgaaggccctctcttcctctcataccacgttttgctcaagaagctgggctgtaacaattcagggttttcccttgttttcctctcattgcatgtttccctccaatattggttcattgtcatcaatcatggtttttgaagatagctagttttatccatctccagcaaagaatcatcaatagtttatattgctttacctgtgctggcttccagagatggaaacaaacccaggtgtctctcaacaagctacttttttactggggtgggggaatctatgcaaggagtaaagtaaaaccatccagaatcaaagcagcaaccacatagttcaaatcaaagatcaaggtgaattttttgtatcactgcctgtggaaatctatcctcatcagtcattgcatttttccctgcctatacctgtgctcctttttcttactgtgttttcagtcacttcctttctgtgaaaggttgcttagctttttttttgacatttgttgttctttataaaaataacagattggatagatgtgtacatttggtgtttgaaattctctgaaaatcccattaggaaaccaggtgtgaaaagggctcagtagcttctctgagtggcgtttttagctgactggaagtgcttaatctggatcgtcttttttttttttttttttttttcaatattttaaaaggagaatttaaatactgtgcttactgtgaaatatatcagttggtgagccgggcgtggtgggtcacgcctgtaatcccagcactttgggaggccaaggcgggttgatcacccgaggtcaggagttcaagaccagcctggccaacgtggtgaaagcctgtatctattaaaagacaaaaattagctgggcgtggtagtacatgcctgtaatcccagctacactggaggctgagtcaggagaatcacttgaacgtgggaggcagaggttgcagtgagtggagatcgcaccactgccctccagcctaggtgacagaatgagactctatctcaaaaaaaaaaaaaaaatgatatcagttggtggatgctcctataggtagccaaacacattgattacctgttagattttaggatagaaatcaaagtagagcacgtcagcaagagcctctttgtctcactccatcatttaaaaccagtatattcagtagttgaagaaagagctctccctgagtcagttgcaaaacgtctatatttttagatgccactacttttttcttaaatattcattttgagactgtcatgagttagaccagtggttgagattagtagatggctcactagacatgtttttgttttgcagacattatatccattccagtcctctgcactgtacactgcagcagtgtgcaaactatgggacttagagggtttctgccatctttccacgtgtgaagtagcttggtttcctctgcctgtgcatttggatgtttgtgctatgtccacctcctaaactggctactgagaaaatcatcttcagccctgtcagattgtctctggcagtagctcctaataattatttatgtttttggaatttttttttcaacttttaaaaaaccttctatccatttcaatttgaattatttgatttgtacaatatatgtatattctcttcttcctttttgtcatccctgccctgccacccccaaaattttgtttttaaaaatattctgggctgggcatggtggctcacacctgtaatcccagcacttggggaggccgaggctggtggatcatctgaggtcaggtgtttgagaccagcctggtcaacatggtgaaaccccgtctctactaaaaatacaaaaattagctgggcgtggtggcgggcacctgtaatcctagctactcgggaggctgaggcaggagaattgcttgaatccaggaggcagaggttgcagtgagctgagattgcgccactgcactccagcctgggtgacagagcaagactccatctcaaaaaaaaaaaaaaaaaaaaatctgtagttttgtacaagatgagacttagccttgggtacttcttgctgaagctttaatgctttgtaaataaaatcggatgtttattaaagaa

SEQ ID NO: 26025 - DNA, 6229 bp, Homo sapiens
  source 1..6229: mol_type = unassigned DNA
gagagagagacccgccgggaggtgcggccgcgctatggacccctgaccccgtggggtcgctcggactcttaacgtgtggactgaccgctactgactgcaccgccaatccccccgtctctgccggccccttagcatgagcgagggggacccagccgggtgacattgtgcccgttggcggattctcgatttcccctcttccccgtcctcgtcctcctcctcccccatgaagtgattctgagtatcggggggtctctggattattgttctgacgaacccctgcttgtggttggggggtatttaatctgaggccttagggtccttcggtgtctttgagtgttttgtgtgtacatattttgctcttaaagtttataaatatacgtatattgagagtgtccacgtctcctcgctgaaccttaggaatcccttggcaccatgtcctgtgtgcattataaattttcctctaaactcaactatgataccgtcacctttgatgggctccacatctccctctgcgacttaaagaagcagattatggggagagagaagctgaaagctgccgactgcgacctgcagatcaccaatgcgcagacgaaagaagaatatactgatgataatgctctgattcctaagaattcttctgtaattgttagaagaattcctattggaggtgttaaatctacaagcaagacatatgttataagtcgaactgaaccagcgatggcaactacaaaagcaattgatgactcttccgcgtctatttctctggcccagcttacaaagactgccaatctggctgaagccaatgcttctgaagaagataaaattaaagcaatgatgtcgcaatctggccatgaatacgacccaatcaattacatgaagaaacctctaggtccaccacctccatcttacacgtgtttccgttgtggtaaacctggacattatattaagaattgcccaacaaatggggataaaaactttgaatctggtcctaggattaaaaagagcactggaattcccagaagtttcatgatggaagtgaaagatcctaatatgaaaggtgcaatgcttaccaacactggaaaatatgcaataccaactatagatgcagaagcatatgcaattgggaagaaagagaaacctcccttcttaccagaggagccatcttcttcctcagaagaagatgatcctatcccagatgaattgttgtgtctcatctgcaaggatattatgactgatgctgttgtgattccctgctgtggaaacagttactgtgatgaatgtataagaacagcactcctggaatcagatgagcacacatgtccgacgtgtcatcaaaatgatgtttctcctgatgctttaattgccaataaatttttacgacaggctgtaaataacttcaaaaatgaaactggctatacaaaaagactacgaaaacagttacctcctccaccacccccaataccacctccgagaccactgattcagaggaacctacaacctctgatgagatctccgatatcaagacaacaagatcctcttatgattccagtgacatcttcatcaactcacccagctccgtctatatcttcattaacttctaatcagtcttccttggcccctcctgtgtctggaaatccgtcttctgctccagctcctgtacctgatataactgcaacagtatccatatcagttcattcagaaaaatcagatggaccttttcgggattctgataataaaatattgccagctgcagctcttgcatcagagcactcaaagggaacctcctcaattgcaattaccgctcttatggaagagaagggttaccaggtgcctgttcttggaaccccatctttgcttggacagtcattattgcatggacagttgatccccacaactggtccagtaagaataaatactgctcgtccaggtggtggtcgaccaggctgggaacattccaacaaacttggctatctggtttctccaccacaacaaattagaagaggggagaggagctgctacagaagtataaaccgtgggcgacaccacagcgaaagatcacagaggactcaaggcccgtcactaccagcaactccagtctttgtacctgttccaccacctcctttgtatccgcctcctccccatacacttcctctccctccgggtgttcctcctccacagttttctcctcagtttcctcctggccagccaccacccgctgggtatagtgtccctcctccagggtttcctccagctcctgccaatttatcaacaccttgggtatcatcaggagtgcagacagctcattcaaataccatcccaacaacacaagcaccacctttgtccagggaagaattctatagagagcagcgacgactaaaagaagaggaaaagaaaaagtccaagctagatgagtttacaaatgattttgctaaggaattgatggaatacaaaaagattcaaaaggagcgtaggcgctcattttccaggtctaaatctccctatagtggttcttcgtattcaagaagttcatatacttattctaaatcaagatctggttcaacacgttcacgctcttattctcgatcattcagccgctcacattctcgttcctattcacggtcacctccataccccagaagaggcagaggcaagagccgcaattaccgttcacggtctagatctcatggatatcatcgatctaggtcaaggtcacccccttacagacgctatcattcacgatcaagatctcctcaagcgtttaggggacagtctcctaataaacgtaatgtacctcaaggggaaacagaacgtgaatattttaatagatacagagaagttccaccaccatatgacatgaaagcatattatgggagaagtgttgactttagagacccatttgaaaaagaacgctaccgagaatgggagagaaaatatagagagtggtatgaaaaatattataaaggttatgctgctggagcacagcctagaccctcagcaaatagagagaacttttctccagagagatttttgccacttaacatcaggaattctcccttcacaagaggccgcagagaagactatgttggtgggcaaagtcatagaagtcgaaacataggtagcaactatccagaaaagctttcagcaagagatggtcacaatcagaaggataatacaaagtcaaaagagaaggagagtgaaaacgctccaggagatggtaaaggaaataagcataagaaacacagaaaaagaagaaaaggggaggaaagtgagggttttctgaacccagagttattagagacttctaggaaatcaagagaacctacaggtgttgaagaaaataaaacagactcattgtttgttctcccaagtagagatgatgccacacctgttagagatgaaccaatggatgcagaatcaatcacttttaaatcagtgtctgaaaaagacaagagagaaagggataaaccaaaagcaaagggtgataaaaccaaacggaagaatgatggatctgctgtgtccaaaaaagaaaatattgtaaaacctgctaaaggaccccaagaaaaagtagatggagaacgtgagagatctcctcgatctgaacctccaattaaaaaagccaaagaggagactccgaagactgacaatactaaatcatcatcttcctctcagaaggatgaaaaaatcactggaacccccagaaaagctcactctaaatcagcaaaagaacaccaagaaacaaaaccagtcaaagaggaaaaagtgaagaaggactattccaaagatgtcaaatcagaaaagctaacaactaaggaagaaaaggccaagaagcctaatgagaaaaacaaaccacttgataataagggagaaaaaagaaaaagaaaaactgaagaaaaaggcgtagataaagattttgagtcttcttcaatgaaaatctcgaaactagaagtgactgaaatagtgaaaccatcaccaaagcgcaaaatggaacctgatactgaaaaaatggataggacccctgaaaaggacaaaatttctttaagtgcgccagccaaaaaaatcaaactcaacagagaaactgggaagaaaattggaagtacagaaaatatatcaaacacaaaagaaccctctgaaaaattggagtcaacatctagcaaagttaaacaagaaaaagtcaaaggaaaggtcagacgaaaagtgactggaactgaaggatccagctcaactctggtggattacaccagtacgagctcaactggaggcagtcctgtgcggaaatctgaagaaaaaacagatacaaagcgaactgtgattaaaacgatggaagaatataataatgacaataccgcgccagctgaagatgttatcattatgattcaggttcctcaatccaaatgggataaagatgactttgaatctgaagaagaagatgttaaatccacacagcctatatcaagtgtaggaaaacctgctagtgttataaaaaatgttagtacaaagccatcaaatatagtcaagtatcctgagaaagaaagtgagccatccgagaaaattcagaaattcaccaaggacgtgagccatgaaatcatacaacatgaggttaaaagttcaaaaaactctgcatctagtgaaaaagggaaaaccaaagatcgagattattcagtgttggaaaaggagaaccctgaaaagaggaagaacagcactcagccagagaaagagagtaatttggaccgtctgaatgaacaaggaaattttaaaagtctgtctcaatcttccaaagaggctagaacgtcagataaacatgattccactcgtgcttcctcaaataaagacttcactcccaatagagacaaaaaaactgactatgacaccagagagtattcaagttccaaacgtagagatgaaaagaatgaattaacaagacgaaaagactctccttctcggaataaagattctgcatctggacagaaaaataaaccaagggaagagagagatttgcctaaaaaaggaacaggagattccaaaaaaagtaattctagtccctcaagagacagaaaacctcatgatcacaaagccacttatgatactaaacggccaaatgaagagacaaaatctgtagataaaaatccttgtaaggatcgtgagaagcatgtattagaagcaaggaacaataaagagtcaagtggcaataaactactttatatacttaacccaccagagacacaggttgaaaaagagcaaattactgggcaaattgacaagagtactgtcaagcctaaaccccagttaagtcattcctctagactttcctctgacttaactagagaaactgatgaagctgcttttgaaccagactataatgaaagtgacagtgaaagtaatgtttctgtaaaagaagaggaatcttcaggaaacatttctaaggacctgaaagataaaatagtggagaaagcaaaagagagcctggacacagcagcagttgtccaggtgggcataagcaggaatcagagccacagcagccccagcgtcagccccagcagaagccacagtccttctggaagccagacccgaagccacagtagcagtgccagctcagcagaaagtcaggacagcaagaagaagaagaaaaagaaggaaaagaaaaaacacaagaaacataaaaagcataagaagcataagaaacatgcaggcactgaagtggaattggaaaaaagccaaaaacacaaacacaagaaaaagaagtcaaagaagaacaaagataaagagaaggagaaggagaaagatgaccaaaaagtgaaatctgtcactgtgtaaaaagacagattttttaaattgacttaattactaagtcatctgtattaaattttgttataatgtaaagagattcaagccttgtaaataatgacatggaagaccctgtgctgcacttaaaatattgctgcttgattatttgatttttacatcagagctttataacacgaacttttgtacagaattgtgagttgtgaccatgtaacatgagaggttttgctagggcctattatttttaaccaccattaattagttggggtggagtttactgtaatgtgaaattttcacatttgaattttttaattgcctggcaaaagctgatataagttctaaaatatcagcagaatgatttgctgaattcattacaaccctgttatgtcactttttgattacaataaaagttttcagtaaacttttcaaa

SEQ ID NO: 26026 - DNA, 5739 bp, Homo sapiens
  source 1..5739: mol_type = unassigned DNA
agtgtccacgtctcctcgctgaaccttaggaatcccttggcaccatgtcctgtgtgcattataaattttcctctaaactcaactatgataccgtcacctttgatgggctccacatctccctctgcgacttaaagaagcagattatggggagagagaagctgaaagctgccgactgcgacctgcagatcaccaatgcgcagacgaaagaagaatatactgatgataatgctctgattcctaagaattcttctgtaattgttagaagaattcctattggaggtgttaaatctacaagcaagacatatgttataagtcgaactgaaccagcgatggcaactacaaaagcaattgatgactcttccgcgtctatttctctggcccagcttacaaagactgccaatctggctgaagccaatgcttctgaagaagataaaattaaagcaatgatgtcgcaatctggccatgaatacgacccaatcaattacatgaagaaacctctaggtccaccacctccatcttacacgtgtttccgttgtggtaaacctggacattatattaagaattgcccaacaaatggggataaaaactttgaatctggtcctaggattaaaaagagcactggaattcccagaagtttcatgatggaagtgaaagatcctaatatgaaaggtgcaatgcttaccaacactggaaaatatgcaataccaactatagatgcagaagcatatgcaattgggaagaaagagaaacctcccttcttaccagaggagccatcttcttcctcagaagaagatgatcctatcccagatgaattgttgtgtctcatctgcaaggatattatgactgatgctgttgtgattccctgctgtggaaacagttactgtgatgaatgtataagaacagcactcctggaatcagatgagcacacatgtccgacgtgtcatcaaaatgatgtttctcctgatgctttaattgccaataaatttttacgacaggctgtaaataacttcaaaaatgaaactggctatacaaaaagactacgaaaacagttacctcctccaccacccccaataccacctccgagaccactgattcagaggaacctacaacctctgatgagatctccgatatcaagacaacaagatcctcttatgattccagtgacatcttcatcaactcacccagctccgtctatatcttcattaacttctaatcagtcttccttggcccctcctgtgtctggaaatccgtcttctgctccagctcctgtacctgatataactgcaacagtatccatatcagttcattcagaaaaatcagatggaccttttcgggattctgataataaaatattgccagctgcagctcttgcatcagagcactcaaagggaacctcctcaattgcaattaccgctcttatggaagagaagggttaccaggtgcctgttcttggaaccccatctttgcttggacagtcattattgcatggacagttgatccccacaactggtccagtaagaataaatactgctcgtccaggtggtggtcgaccaggctgggaacattccaacaaacttggctatctggtttctccaccacaacaaattagaagaggggagaggagctgctacagaagtataaaccgtgggcgacaccacagcgaaagatcacagaggactcaaggcccgtcactaccagcaactccagtctttgtacctgttccaccacctcctttgtatccgcctcctccccatacacttcctctccctccgggtgttcctcctccacagttttctcctcagtttcctcctggccagccaccacccgctgggtatagtgtccctcctccagggtttcctccagctcctgccaatttatcaacaccttgggtatcatcaggagtgcagacagctcattcaaataccatcccaacaacacaagcaccacctttgtccagggaagaattctatagagagcagcgacgactaaaagaagagtctaaatctccctatagtggttcttcgtattcaagaagttcatatacttattctaaatcaagatctggttcaacacgttcacgctcttattctcgatcattcagccgctcacattctcgttcctattcacggtcacctccataccccagaagaggcagaggcaagagccgcaattaccgttcacggtctagatctcatggatatcatcgatctaggtcaaggtcacccccttacagacgctatcattcacgatcaagatctcctcaagcgtttaggggacagtctcctaataaacgtaatgtacctcaaggggaaacagaacgtgaatattttaatagatacagagaagttccaccaccatatgacatgaaagcatattatgggagaagtgttgactttagagacccatttgaaaaagaacgctaccgagaatgggagagaaaatatagagagtggtatgaaaaatattataaaggttatgctgctggagcacagcctagaccctcagcaaatagagagaacttttctccagagagatttttgccacttaacatcaggaattctcccttcacaagaggccgcagagaagactatgttggtgggcaaagtcatagaagtcgaaacataggtagcaactatccagaaaagctttcagcaagagatggtcacaatcagaaggataatacaaagtcaaaagagaaggagagtgaaaacgctccaggagatggtaaaggaaataagcataagaaacacagaaaaagaagaaaaggggaggaaagtgagggttttctgaacccagagttattagagacttctaggaaatcaagagaacctacaggtgttgaagaaaataaaacagactcattgtttgttctcccaagtagagatgatgccacacctgttagagatgaaccaatggatgcagaatcaatcacttttaaatcagtgtctgaaaaagacaagagagaaagggataaaccaaaagcaaagggtgataaaaccaaacggaagaatgatggatctgctgtgtccaaaaaagaaaatattgtaaaacctgctaaaggaccccaagaaaaagtagatggagaacgtgagagatctcctcgatctgaacctccaattaaaaaagccaaagaggagactccgaagactgacaatactaaatcatcatcttcctctcagaaggatgaaaaaatcactggaacccccagaaaagctcactctaaatcagcaaaagaacaccaagaaacaaaaccagtcaaagaggaaaaagtgaagaaggactattccaaagatgtcaaatcagaaaagctaacaactaaggaagaaaaggccaagaagcctaatgagaaaaacaaaccacttgataataagggagaaaaaagaaaaagaaaaactgaagaaaaaggcgtagataaagattttgagtcttcttcaatgaaaatctcgaaactagaagtgactgaaatagtgaaaccatcaccaaagcgcaaaatggaacctgatactgaaaaaatggataggacccctgaaaaggacaaaatttctttaagtgcgccagccaaaaaaatcaaactcaacagagaaactgggaagaaaattggaagtacagaaaatatatcaaacacaaaagaaccctctgaaaaattggagtcaacatctagcaaagttaaacaagaaaaagtcaaaggaaaggtcagacgaaaagtgactggaactgaaggatccagctcaactctggtggattacaccagtacgagctcaactggaggcagtcctgtgcggaaatctgaagaaaaaacagatacaaagcgaactgtgattaaaacgatggaagaatataataatgacaataccgcgccagctgaagatgttatcattatgattcaggttcctcaatccaaatgggataaagatgactttgaatctgaagaagaagatgttaaatccacacagcctatatcaagtgtaggaaaacctgctagtgttataaaaaatgttagtacaaagccatcaaatatagtcaagtatcctgagaaagaaagtgagccatccgagaaaattcagaaattcaccaaggacgtgagccatgaaatcatacaacatgaggttaaaagttcaaaaaactctgcatctagtgaaaaagggaaaaccaaagatcgagattattcagtgttggaaaaggagaaccctgaaaagaggaagaacagcactcagccagagaaagagagtaatttggaccgtctgaatgaacaaggaaattttaaaagtctgtctcaatcttccaaagaggctagaacgtcagataaacatgattccactcgtgcttcctcaaataaagacttcactcccaatagagacaaaaaaactgactatgacaccagagagtattcaagttccaaacgtagagatgaaaagaatgaattaacaagacgaaaagactctccttctcggaataaagattctgcatctggacagaaaaataaaccaagggaagagagagatttgcctaaaaaaggaacaggagattccaaaaaaagtaattctagtccctcaagagacagaaaacctcatgatcacaaagccacttatgatactaaacggccaaatgaagagacaaaatctgtagataaaaatccttgtaaggatcgtgagaagcatgtattagaagcaaggaacaataaagagtcaagtggcaataaactactttatatacttaacccaccagagacacaggttgaaaaagagcaaattactgggcaaattgacaagagtactgtcaagcctaaaccccagttaagtcattcctctagactttcctctgacttaactagagaaactgatgaagctgcttttgaaccagactataatgaaagtgacagtgaaagtaatgtttctgtaaaagaagaggaatcttcaggaaacatttctaaggacctgaaagataaaatagtggagaaagcaaaagagagcctggacacagcagcagttgtccaggtgggcataagcaggaatcagagccacagcagccccagcgtcagccccagcagaagccacagtccttctggaagccagacccgaagccacagtagcagtgccagctcagcagaaagtcaggacagcaagaagaagaagaaaaagaaggaaaagaaaaaacacaagaaacataaaaagcataagaagcataagaaacatgcaggcactgaagtggaattggaaaaaagccaaaaacacaaacacaagaaaaagaagtcaaagaagaacaaagataaagagaaggagaaggagaaagatgaccaaaaagtgaaatctgtcactgtgtaaaaagacagattttttaaattgacttaattactaagtcatctgtattaaattttgttataatgtaaagagattcaagccttgtaaataatgacatggaagaccctgtgctgcacttaaaatattgctgcttgattatttgatttttacatcagagctttataacacgaacttttgtacagaattgtgagttgtgaccatgtaacatgagaggttttgctagggcctattatttttaaccaccattaattagttggggtggagtttactgtaatgtgaaattttcacatttgaattttttaattgcctggcaaaagctgatataagttctaaaatatcagcagaatgatttgctgaattcattacaaccctgttatgtcactttttgattacaataaaagttttcagtaaacttttcaaa

SEQ ID NO: 26027 - DNA, 4314 bp, Homo sapiens
  source 1..4314: mol_type = unassigned DNA
gccaggccgcgtccgccatagtacctggcttggaggtgtcgccgccgctcggtgagagcccccgagcggcagggggccaacacaaaaagggagccggagaagccctagccgctgcccagcagcttgcgggcgtgttctcgcggttccgggcctcaaggcgacggaaacgaaaggcgagcgaagcgcggaggatccggcgagaagaagcgtcagggagcctcggcggtgtccccggggtccgccgaagccacccggccgccggctggggcccggggtggtgaggaagtgctccgaggcctcgccgaggcctagcgccggctttgtgtccgaggcggcggcggcggcggggggaggcggagccgggggcggcctgcgggaaggcctctcctccgccgaccgcgcgttttcggcctaggccgtggggccgctcgtggcctccggggagcaggcgccaggggtttgtgtgcggtgggggcctgggcctgggcctggggaagctgacgccggtcgtccggaagccaggaggaggcgtgaggccgctcgtggactccgggcctaggccctctcccctcaaccttctcccggggcctgggtcaccccaatccacggagagagagacccgccgggaggtgcggccgcgctatggacccctgaccccgtggggtcgctcggactcttaacgtgtggactgaccgctactgactgcaccgccaatccccccgtctctgccggccccttagcatgagcgagggggacccagccgggtgacattgtgcccgttggcggattctcgatttcccctcttccccgtcctcgtcctcctcctcccccatgaagtgattctgagtatcggggggtctctggattattgttctgacgaacccctgcttgtggttggggggtatttaatctgaggccttagggtccttcggtgtctttgagtgttttgtgtgtacatattttgctcttaaagtttataaatatacgtatattgagagtgtccacgtctcctcgctgaaccttaggaatcccttggcaccatgtcctgtgtgcattataaattttcctctaaactcaactatgataccgtcacctttgatgggctccacatctccctctgcgacttaaagaagcagattatggggagagagaagctgaaagctgccgactgcgacctgcagatcaccaatgcgcagacgaaagaagaatatactgatgataatgctctgattcctaagaattcttctgtaattgttagaagaattcctattggaggtgttaaatctacaagcaagacatatgttataagtcgaactgaaccagcgatggcaactacaaaagcaattgatgactcttccgcgtctatttctctggcccagcttacaaagactgccaatctggctgaagccaatgcttctgaagaagataaaattaaagcaatgatgtcgcaatctggccatgaatacgacccaatcaattacatgaagaaacctctaggtccaccacctccatcttacacgtgtttccgttgtggtaaacctggacattatattaagaattgcccaacaaatggggataaaaactttgaatctggtcctaggattaaaaagagcactggaattcccagaagtttcatgatggaagtgaaagatcctaatatgaaaggtgcaatgcttaccaacactggaaaatatgcaataccaactatagatgcagaagcatatgcaattgggaagaaagagaaacctcccttcttaccagaggagccatcttcttcctcagaagaagatgatcctatcccagatgaattgttgtgtctcatctgcaaggatattatgactgatgctgttgtgattccctgctgtggaaacagttactgtgatgaatgtataagaacagcactcctggaatcagatgagcacacatgtccgacgtgtcatcaaaatgatgtttctcctgatgctttaattgccaataaatttttacgacaggctgtaaataacttcaaaaatgaaactggctatacaaaaagactacgaaaacagttacctcctccaccacccccaataccacctccgagaccactgattcagaggaacctacaacctctgatgagatctccgatatcaagacaacaagatcctcttatgattccagtgacatcttcatcaactcacccagctccgtctatatcttcattaacttctaatcagtcttccttggcccctcctgtgtctggaaatccgtcttctgctccagctcctgtacctgatataactgcaacagtatccatatcagttcattcagaaaaatcagatggaccttttcgtacgagctcaactggaggcagtcctgtgcggaaatctgaagaaaaaacagatacaaagcgaactgtgattaaaacgatggaagaatataataatgacaataccgcgccagctgaagatgttatcattatgattcaggttcctcaatccaaatgggataaagatgactttgaatctgaagaagaagatgttaaatccacacagcctatatcaagtgtaggaaaacctgctagtgttataaaaaatgttagtacaaagccatcaaatatagtcaagtatcctgagaaagaaagtgagccatccgagaaaattcagaaattcaccaaggacgtgagccatgaaatcatacaacatgaggttaaaagttcaaaaaactctgcatctagtgaaaaagggaaaaccaaagatcgagattattcagtgttggaaaaggagaaccctgaaaagaggaagaacagcactcagccagagaaagagagtaatttggaccgtctgaatgaacaaggaaattttaaaagtctgtctcaatcttccaaagaggctagaacgtcagataaacatgattccactcgtgcttcctcaaataaagacttcactcccaatagagacaaaaaaactgactatgacaccagagagtattcaagttccaaacgtagagatgaaaagaatgaattaacaagacgaaaagactctccttctcggaataaagattctgcatctggacagaaaaataaaccaagggaagagagagatttgcctaaaaaaggaacaggagattccaaaaaaagtaattctagtccctcaagagacagaaaacctcatgatcacaaagccacttatgatactaaacggccaaatgaagagacaaaatctgtagataaaaatccttgtaaggatcgtgagaagcatgtattagaagcaaggaacaataaagagtcaagtggcaataaactactttatatacttaacccaccagagacacaggttgaaaaagagcaaattactgggcaaattgacaagagtactgtcaagcctaaaccccagttaagtcattcctctagactttcctctgacttaactagagaaactgatgaagctgcttttgaaccagactataatgaaagtgacagtgaaagtaatgtttctgtaaaagaagaggaatcttcaggaaacatttctaaggacctgaaagataaaatagtggagaaagcaaaagagagcctggacacagcagcagttgtccaggtgggcataagcaggaatcagagccacagcagccccagcgtcagccccagcagaagccacagtccttctggaagccagacccgaagccacagtagcagtgccagctcagcagaaagtcaggacagcaagaagaagaagaaaaagaaggaaaagaaaaaacacaagaaacataaaaagcataagaagcataagaaacatgcaggcactgaagtggaattggaaaaaagccaaaaacacaaacacaagaaaaagaagtcaaagaagaacaaagataaagagaaggagaaggagaaagatgaccaaaaagtgaaatctgtcactgtgtaaaaagacagattttttaaattgacttaattactaagtcatctgtattaaattttgttataatgtaaagagattcaagccttgtaaataatgacatggaagaccctgtgctgcacttaaaatattgctgcttgattatttgatttttacatcagagctttataacacgaacttttgtacagaattgtgagttgtgaccatgtaacatgagaggttttgctagggcctattatttttaaccaccattaattagttggggtggagtttactgtaatgtgaaattttcacatttgaattttttaattgcctggcaaaagctgatataagttctaaaatatcagcagaatgatttgctgaattcattacaaccctgttatgtcactttttgattacaataaaagttttcagtaaacttttc

SEQ ID NO: 26028 - DNA, 1762 bp, Homo sapiens
  source 1..1762: mol_type = unassigned DNA
gccaggccgcgtccgccatagtacctggcttggaggtgtcgccgccgctcggtgagagcccccgagcggcagggggccaacacaaaaagggagccggagaagccctagccgctgcccagcagcttgcgggcgtgttctcgcggttccgggcctcaaggcgacggaaacgaaaggcgagcgaagcgcggaggatccggcgagaagaagcgtcagggagcctcggcggtgtccccggggtccgccgaagccacccggccgccggctggggcccggggtggtgaggaagtgctccgaggcctcgccgaggcctagcgccggctttgtgtccgaggcggcggcggcggcggggggaggcggagccgggggcggcctgcgggaaggcctctcctccgccgaccgcgcgttttcggcctaggccgtggggccgctcgtggcctccggggagcaggcgccaggggtttgtgtgcggtgggggcctgggcctgggcctggggaagctgacgccggtcgtccggaagccaggaggaggcgtgaggccgctcgtggactccgggcctaggccctctcccctcaaccttctcccggggcctgggtcaccccaatccacggagagagagacccgccgggaggtgcggccgcgctatggacccctgaccccgtggggtcgctcggactcttaacgtgtggactgaccgctactgactgcaccgccaatccccccgtctctgccggccccttagcatgagcgagggggacccagccgggtgacattgtgcccgttggcggattctcgatttcccctcttccccgtcctcgtcctcctcctcccccatgaagtgattctgagtatcggggggtctctggattattgttctgacgaacccctgcttgtggttggggggtatttaatctgaggccttagggtccttcggtgtctttgagtgttttgtgtgtacatattttgctcttaaagtttataaatatacgtatattgagagtgtccacgtctcctcgctgaaccttaggaatcccttggcaccatgtcctgtgtgcattataaattttcctctaaactcaactatgataccgtcacctttgatgggctccacatctccctctgcgacttaaagaagcagattatggggagagagaagctgaaagctgccgactgcgacctgcagatcaccaatgcgcagacgaaagaagaatatactgatgataatgctctgattcctaagaattcttctgtaattgttagaagaattcctattggaggtgttaaatctacaagcaagacatatgttataagtcgaactgaaccagcgatggcaactacaaaagcagtatgtaaaaacacaatctcacactttttctacacattgcttttacctttataatgtagcagtgaagtaaatcattttagaacttaatatccaactgatcatagtacatattgtaaataaaatgtattttgatgacagctcagttgaatatggataatatgtggcatcacttgcacacttattttgtagaaatgggtaatttgtgcccgtaacactgtttcatattaaatatgatagcattatccctgtatgacactgtgttgtacagttaatgtatgatcctttttagatcgtttaggttttacactaaggaacatgatgacatgttctacatttgtctgtctatagttagtattttgtatgtatgtacaggctgttgtgtgctttttgtttcttgcaataaaaaatgtttggagtgt

SEQ ID NO: 26029 - DNA, 2036 bp, Homo sapiens
  source 1..2036: mol_type = unassigned DNA
gcgggacgggaccgccgcgccgagggctccgagcacttccggagccgggcgcggggccgagggctgggcccccctcttcccttccctcctccagcggctgcgctccctccggcgccctcggccccggggcggaggcggcccccgccgctgggaagcgagcgccgcggctctttctacgcgcgcgcgcgcgttgaccgcctcggggtcgcggcccttgtccgggggttgctggggtcctcaggcctatggctgccgaggcgggcgtcgtgggagctggggcctcccctgatggggattggagagaccaggcctgtgggcttctgctacacgtgcatttgtcttcccgactgggtcgcgcagcccctgtacgtacaggtcgtcatcttagaacagtgtttgaagatactgtggaggagcgtgtcatcaatgaagaatataaaatctggaagaagaatacaccgtttctatatgacctggttatgacccatgctcttcagtggcccagtcttaccgttcagtggcttcctgaagtgactaaacctgaaggaaaagattatgcccttcattggctagtgctggggactcatacgtctgatgagcagaatcatctggtggttgctcgagtacatattcccaatgatgatgcacagtttgatgcttcccattgtgacagtgacaagggtgaatttggtggctttggttctgtaacaggaaaaattgaatgtgaaattaaaatcaatcacgaaggagaagtaaaccgtgctcgttacatgccgcagaatcctcacatcattgctacaaaaacaccatcttctgatgtgttggtttttgactatacaaaacaccctgctaaaccagacccaagtggagaatgtaatcctgatctcagattaagaggtcaccagaaggaaggctatggtctctcctggaattcaaatttgagtggacatctcctaagtgcatctgatgaccatactgtttgtctgtgggatataaacgcaggaccaaaagaaggcaaaattgtggatgctaaagccatctttactggccactcagctgttgtagaggatgtggcctggcacctgctgcacgagtcattgtttggatctgttgctgatgatcagaaacttatgatatgggacaccaggtccaataccacctccaagccgagtcacttggtggatgcgcacactgccgaagtcaactgcctctcattcaatccctacagcgaatttattctagccaccggctctgcggataagaccgtagctttatgggatctgcgtaacttaaaattaaaactccataccttcgaatctcataaagatgaaattttccaggtccactggtctccacataatgaaactattctggcttcaagtggtactgaccgccgcctgaatgtgtgggatttaagtaaaattggggaagaacaatcagcagaagatgcagaagatgggcctccagaactcctgtttattcatggaggacacactgctaagatttcagattttagctggaaccccaatgagccttgggtcatttgctcagtgtctgaggataacatcatgcagatatggcaaatggctgaaaatatttacaatgatgaagagtcagatgtcacgacatccgaactggagggacaaggatcttaaacccaaagtacgagaaatgtttctgttgaatgtaatgctacatgaatgcttgatttatcaagcgccaaaaaggcattgtatagtaggaaatgtaagtggggtggcttatggcttctttatcctctgattctagcactttcaagtgagctgttgcgtactgtatcatattgtagctattagggaagagaagaatgttgcttaagaaagaacatcaccattgattttaaatacaagtagcagggtattgcctttgattcaactgttttaagtcctcattttctcaaactaagtgcttgctgttcccaaatatgcaagaataacttttacactttttccttccaacacttcttgattggctttgcagaaataaagttttaaaat

SEQ ID NO: 26030 - DNA, 2333 bp, Homo sapiens
  source 1..2333: mol_type = unassigned DNA
ggtctcggcgccggagccgttggctcccagacccgcctctccgcctcctctcacttttcccagggcggatgcgcctgcgctcagctgcctgggcgggctgggaggcgcgggttgaaaagtctcgttccaagtttggagagagagagaagagcgcctcagacctcggtacccgcgagcggggaggaggcaggaaagaaggacgcggcgtctggggagcacccaggcagcaagacggggcccgggctttcgacagtggggagtgtgacgcgcttgggaaaggcaggagcgccagcggtcgggctgctcttggctaacgagaggagtccgaggcggcggcgaggggcgaacgacccgacgcaagatggcgagtaaagagatgtttgaagatactgtggaggagcgtgtcatcaatgaagaatataaaatctggaagaagaatacaccgtttctatatgacctggttatgacccatgctcttcagtggcccagtcttaccgttcagtggcttcctgaagtgactaaacctgaaggaaaagattatgcccttcattggctagtgctggggactcatacgtctgatgagcagaatcatctggtggttgctcgagtacatattcccaatgatgatgcacagtttgatgcttcccattgtgacagtgacaagggtgaatttggtggctttggttctgtaacaggaaaaattgaatgtgaaattaaaatcaatcacgaaggagaagtaaaccgtgctcgttacatgccgcagaatcctcacatcattgctacaaaaacaccatcttctgatgtgttggtttttgactatacaaaacaccctgctaaaccagacccaagtggagaatgtaatcctgatctcagattaagaggtcaccagaaggaaggctatggtctctcctggaattcaaatttgagtggacatctcctaagtgcatctgatgaccatactgtttgtctgtgggatataaacgcaggaccaaaagaaggcaaaattgtggatgctaaagccatctttactggccactcagctgttgtagaggatgtggcctggcacctgctgcacgagtcattgtttggatctgttgctgatgatcagaaacttatgatatgggacaccaggtccaataccacctccaagccgagtcacttggtggatgcgcacactgccgaagtcaactgcctctcattcaatccctacagcgaatttattctagccaccggctctgcggataagaccgtagctttatgggatctgcgtaacttaaaattaaaactccataccttcgaatctcataaagatgaaattttccaggtccactggtctccacataatgaaactattctggcttcaagtggtactgaccgccgcctgaatgtgtgggatttaagtaaaattggggaagaacaatcagcagaagatgcagaagatgggcctccagaactcctgtttattcatggaggacacactgctaagatttcagattttagctggaaccccaatgagccttgggtcatttgctcagtgtctgaggataacatcatgcagatatggcaaatggctgaaaatatttacaatgatgaagagtcagatgtcacgacatccgaactggagggacaaggatcttaaacccaaagtacgagaaatgtttctgttgaatgtaatgctacatgaatgcttgatttatcaagcgccaaaaaggcattgtatagtaggaaatgtaagtggggtggcttatggcttctttatcctctgattctagcactttcaagtgagctgttgcgtactgtatcatattgtagctattagggaagagaagaatgttgcttaagaaagaacatcaccattgattttaaatacaagtagcagggtattgcctttgattcaactgttttaagtcctcattttctcaaactaagtgcttgctgttcccaaatatgcaagaataacttttacactttttccttccaacacttcttgattggctttgcagaaataaagttttaaaataaaacttgtgtttttttaaaagcttagtgggggggggcgggggagtctactttttgagtagaaatgggtaaaatggtacctttggactcctacagttaaggtcacatggataatgaaagaatacacagaagctgttaagtttatcatacatatttacttaatctatacagaatcaagtagataaaatcagattcacattagtgaaaaatctctacaaaatgtctttgaaaagcaaaacgagactgcctcttaacaattcgtatcctcatgaaagacgtgggctgtaaaaataaagcagtgtgtttagcacaaa

SEQ ID NO: 26031 - DNA, 1904 bp, Homo sapiens
  source 1..1904: mol_type = unassigned DNA
cttttcccagggcggatgcgcctgcgctcagctgcctgggcgggctgggaggcgcgggttgaaaagtctcgttccaagtttggagagagagagaagagcgcctcagacctcggtacccgcgagcggggaggaggcaggaaagaaggacgcggcgtctggggagcacccaggcagcaagacggggcccgggctttcgacagtggggagtgtgacgcgcttgggaaaggcaggagcgccagcggtcgggctgctcttggctaacgagaggagtccgaggcggcggcgaggggcgaacgacccgacgcaagatggcgagtaaagagatgtttgaagatactgtggaggagcgtgtcatcaatgaagaatataaaatctggaagaagaatacaccgtttctatatgacctggttatgacccatgctcttcagtggcccagtcttaccgttcagtggcttcctgaagtgactaaacctgaaggaaaagattatgcccttcattggctagtgctggggactcatacgtctgatgagcagaatcatctggtggttgctcgagtacatattcccaatgatgatgcacagtttgatgcttcccattgtgacagtgacaagggtggaaaaattgaatgtgaaattaaaatcaatcacgaaggagaagtaaaccgtgctcgttacatgccgcagaatcctcacatcattgctacaaaaacaccatcttctgatgtgttggtttttgactatacaaaacaccctgctaaaccagacccaagtggagaatgtaatcctgatctcagattaagaggtcaccagaaggaaggctatggtctctcctggaattcaaatttgagtggacatctcctaagtgcatctgatgaccatactgtttgtctgtgggatataaacgcaggaccaaaagaaggcaaaattgtggatgctaaagccatctttactggccactcagctgttgtagaggatgtggcctggcacctgctgcacgagtcattgtttggatctgttgctgatgatcagaaacttatgatatgggacaccaggtccaataccacctccaagccgagtcacttggtggatgcgcacactgccgaagtcaactgcctctcattcaatccctacagcgaatttattctagccaccggctctgcggataagaccgtagctttatgggatctgcgtaacttaaaattaaaactccataccttcgaatctcataaagatgaaattttccaggtccactggtctccacataatgaaactattctggcttcaagtggtactgaccgccgcctgaatgtgtgggatttaagtaaaattggggaagaacaatcagcagaagatgcagaagatgggcctccagaactcctgtttattcatggaggacacactgctaagatttcagattttagctggaaccccaatgagccttgggtcatttgctcagtgtctgaggataacatcatgcagatatggcaaatggctgaaaatatttacaatgatgaagagtcagatgtcacgacatccgaactggagggacaaggatcttaaacccaaagtacgagaaatgtttctgttgaatgtaatgctacatgaatgcttgatttatcaagcgccaaaaaggcattgtatagtaggaaatgtaagtggggtggcttatggcttctttatcctctgattctagcactttcaagtgagctgttgcgtactgtatcatattgtagctattagggaagagaagaatgttgcttaagaaagaacatcaccattgattttaaatacaagtagcagggtattgcctttgattcaactgttttaagtcctcattttctcaaactaagtgcttgctgttcccaaatatgcaagaataacttttacactttttccttccaacac

SEQ ID NO: 26032 - DNA, 3861 bp, Homo sapiens
  source 1..3861: mol_type = unassigned DNA
cgcaggctccctgcgggagcaggctgggctcagctccgctggacccgcgctggggaactctggcctcgctgcactcatggcttctcctagcaaggcagtgattgttcccgggaacggaggcggggatgtgaccacccacggctggtatggctgggtgaaaaaggagctggagaagatacctggtttccagtgtttggctaaaaacatgcccgacccaattacagcacgagagagcatctggctgcccttcatggagacagagctgcactgtgatgagaagactatcatcattggccacagttctggggccatcgcggccatgaggtatgcagaaacacatcgagtatatgctattgtattagtgtctgcgtacacatcagacttgggggatgaaaatgagcgtgcaagtggatacttcacccgcccctggcagtgggagaagatcaaggccaactgcccttacattgtgcagtttggctctactgacgacccgttccttccctggaaggaacaacaagaagtggccgataggttggaaaccaaattgcacaaattcactgactgtggccactttcagaacacagagtttcatgaactgattactgttgtaaagtctttgctgaaagtaccagcatagactgtatgatttctgctattttgcatcccaatataggagtagaataatatctactatcagctgattactagacacatagaacatccagttaagttccgtaagtgcctgaaaaacaaacacaagtttcaacattcaatctaagttacaaatagcacttccattttccatagactctaaaactccccaaattgctatgaactaccacagtattttcctcatttgataagaaacataaggacagcttaactacccttctctatccgaagtgagtcagaaacagaacccaggtttcttgattcccactcctgagtaaaattaaataggttttatgtatgttgcaggtattgcacacttttcctctttgaaatcaaacttttctatttcactggggaaagaaaacatgactgaaagtccagagtgttagcttagagctcaaaatactagctgctgtttcaagctggccccagacattaaactcagactagggccttcacctctgacacttgcccctaagtccttcagacatgttgagagagactgagacaggagtcttccggagtcaggcaggaaggagaagcacagcaatatacattcataatatacgtacaactgactagatttgtttgagacaagagtggtgggatcagagccatgtggagagctcatggcctgtctaaattgttgccatgtggaaatggggcagagtgttgccaattttctgattttttgtgtggaaaaaaatctccaaattgtagtttttaaatttggggaatgcaaatatatatatatatacacacacacacacacacatacacatacaatccatatacatatggagtatgtaagttggcaataacagtatacatcaaaaaatttacaaacactgcaagacaaataaaatccaagccatccatttgtgaccacagtcataagcattcacttagccaggggcttttagataattgtctgtgaagtctgagaaaagactaagataaccaagatgaacataatgtcaaaggacgaaatcatggggacaatttggattttgttccaaaagacaagtgtttttaaaaagaacctttccatacttcgtgttctgttctatagagttaaaccttttaacttccatggccctttagatctctttcaagcacattccattttcttctgatcatacttcctcagaaaacctttttttggctgggtgtggtggctcatgcctgtaatcccagcactgtgggaggctgaggtggttgtattgcttgaggccaggtgtttgaggccagccagggcaacacagcaagaccccatctctacaaaatattaaaacattagctaggcatggtggtgcacacctgtagtcctagcttcttgggaggctgaggcaggattgcttgagcccaggagtttgagccttcagtgagctatgatcgcgccactgtactccatcctgggtgatggagcgaagaacctgtctcttaaaaaaaaaaatttttttttaattaaaaaaacccaccctttttcatttcccaacattttttggctattatgatcgctatgtgttccttcaaataatttccagtgaatccacacttgatgttgcaaagcctaagtttgctgcagaaatacaatttcctacacttcatacctaaaggagattcagagctatcgctcaaaaccaaaagtcttggtttttaaatgtgcttagacaaaaaaaatcaggaaaggtaccctaatcgttcaacagcaatcatctttggggaatgggcattttggtaggtaaagtgtggtggacgtccttattattatttttgagacagtgtcttgctctgtctcccaggctggaggtcagtggcacaaatctcagctcactctaacctgcacctcccgggttcaagtgattctcatctcagcctcccaagtagtgtgaactaaaggcatgtgccaccacgcctggctaatttttgtatttttagtagagacagggtttcaccatgttggccaggctggtctcgaactcctggcctcaagtgatccacccacctcagccgcccaaagtgttgggattacaggcatgagccaccatgcccggccccttattttactttatcctcctgattatttgaatttgttacactaagcatgtattttataatcaaaaataattaagatttaaaacaatgtatttgactactaaaaagcaaattatataaatcagttgaataataatgttgttaaagaggctgtttagcactaatttgaccaaatctatagtcaaagtttgattctacttgaattttttggaaatttgctgttgtattacttattctttgccttgttctctgtgaagtcctttcctaaaaaagaaacttatacaatttagttcacaaaactttgttgacctctttctctgtagaaatgaaaactaaatatatataattgagaaataattctgatactcttcattcctataaaagtaattaagatagacctataggattgttgaactttgctgccaaatatagtaaccagtaaccacagctagctgtaaaattgaaaattcagttcagtcaaactagccatatttcaagtgctcaacagccactggtggctattggttaccttactgaccagccaatataggctatttccgtcattatagaaagctctattggacaacattggtctaggacatatattttgtattttcccctcacccaccatccaataatgagtaatagcacaaagtaaaagtgacttaatttgaaattacttctgtttggctagtttgcttagctgatcaccaccaacatcataggtctataaatcacccaactaagatcaggggtgtttcatgggaaaatctacacaaactattcattaaaaaccatagagccatggactgtcatttctgatttctgtttgattctttgtggtcatcattgaatatacaggggcctctatacactctggggagtatctattctcaggtgagcaaaataccgaatactgaatggaaatcaactgtaagtattaggacttcatatgcaacttgaatttttggtgctgtccggagtctagagccccacaatctgttttggttacagtttatccctgtaggataaatgatccatttaactattcatcagaggtgctgtaattttaaattgtctcttgtctccttcagttaattttcagaattaaaaacataccatgggaaaaaa

SEQ ID NO: 26033 - DNA, 543 bp, Homo sapiens
  source 1..543: mol_type = unassigned DNA
gggaactctggcctcgctgcactcatggcttctcctagcaaggcagtgattgttcccgggaacggaggcggggatgtgaccacccacggctggtatggctgggtgaaaaaggagctggagaagatacctggtttccagtgtttggctaaaaacatgcccgacccaattacagcacgagagagcatctggctgcccttcatggagacagagctgcactgtgatgagaagactatcatcattggccacagttctggggccatcgcggccatgaggtatgcagaaacacatcgagtatatgctattgtattagtgtctgcgtacacatcagacttgggggatgaaaatgagcgtgcaagtggatacttcacccgcccctggcagtgggagaagatcaaggccaactgcccttacattgtgcagtttggctctactgacgacccgttccttccctggaaggaacaacaagaagtggccgattggaaaccaaattgcacaaattcactgactgtggccactttcagaacacagagtttcatgaactga

SEQ ID NO: 26034 - DNA, 802 bp, Homo sapiens
  source 1..802: mol_type = unassigned DNA
gatttcatcttccaggatccaccttgattaaatctcttgtccccagccctcctggtccccaatggcagcagccgccatcccagctttgcttctgtgcctcccgcttctgttcctgctgttcggctggtcccgggctaggcgagacgaccctcactctctttgctatgacatcaccgtcatccctaagttcagacctggaccacggtggtgtgcggttcaaggccaggtggatgaaaagacttttcttcactatgactgtggcaacaagacagtcacacccgtcagtcccctggggaagaaactaaatgtcacaatggcctggaaagcacagaacccagtactgagagaggtggtggacatacttacagagcaactgcttgacattcagctggagaattacacacccaaggaacccctcaccctgcaggcaaggatgtcttgtgagcagaaagctgaaggacacagcagtggatcttggcagttcagtatcgatggacagaccttcctactctttgactcagagaagagaatgtggacaacggttcatcctggagccagaaagatgaaagaaaagtgggagaatgacaaggatgtggccatgtccttccattacatctcaatgggagactgcataggatggcttgaggacttcttgatgggcatggacagcaccctggagccaagtgcaggagcaccactcgccatgtcctcaggcacaacccaactcagggccacagccaccaccctcatcctttgctgcctcctcatcatcctcccctgcttcatcctccctggcatctga

SEQ ID NO: 26035 - DNA, 1285 bp, Homo sapiens
  source 1..1285: mol_type = unassigned DNA
atggcagcagccgccatcccagctttgcttctgtgcctcccgcttctgttcctgctgttcggctggtcccgggctaggcgagacgaccctcactctctttgctatgacatcaccgtcatccctaagttcagacctggaccacggtggtgtgcggttcaaggccaggtggatgaaaagacttttcttcactatgactgtggcaacaagacagtcacacccgtcagtcccctggggaagaaactaaatgtcacaatggcctggaaagcacagaacccagtactgagagaggtggtggacatacttacagagcaactgcttgacattcagctggagaattacacacccaaggaacccctcaccctgcaggcaaggatgtcttgtgagcagaaagctgaaggacacagcagtggatcttggcagttcagtatcgatggacagaccttcctactctttgactcagagaagagaatgtggacaacggttcatcctggagccagaaagatgaaagaaaagtgggagaatgacaaggatgtggccatgtccttccattacatctcaatgggagactgcataggatggcttgaggacttcttgatgggcatggacagcaccctggagccaagtgcaggagcaccactcgccatgtcctcaggcacaacccaactcagggccacagccaccaccctcatcctttgctgcctcctcatcatcctcccctgcttcatcctccctggcatctgaggagagtcctttagagtgacaggttaaagatgataccaaaaagcccctgtgagcacggtcttgatcaacctcgcccttctgtctggccagctgcccaccacctacggtgtatgtccagcagcctccagcagatgatgatgacaccatggacccaatagctcattcactgccttgattccttttgccaacaatttaaccagtgattattcctaacatattatgcaattttctcttggtgctacctgatggaattcctgcacttaaagttctggctgactaaacaagatatgtcaacattttctttcttctctttttgtttggaaaatcaagtacttctttgaatgatgatttctttctttcattactgacatgattgtcagtaaaacaatcatgttagacttcagacctccagggattctttccatgtcctgaaagagaattgtttaattatttaataagaaaaaaatttatattaatgattgtttcctttagtaatttattgctgtgtactgatatttaaataaagagttatatttcccaaaaa

SEQ ID NO: 26036 - DNA, 4923 bp, Homo sapiens
  source 1..4923: mol_type = unassigned DNA
atgcagtcttttcgagaaaggtgtggtttccatggcaaacaacagaactaccagcagacctcgcaggaaacatcacgcctagagaattacaggcagccgagtcaggccgggctaagctgcgaccggcagcggctgctcgccaaggactattataacccgcagccttacccgagctatgagggtggcgctggcacgccctctggcactgcagccgcggtggccgccgacaagtaccaccgaggcagcaaggccctgcccacacagcaaggcctgcaggggaggccggctttccctggctacggcgtccaggacagcagcccctacccaggccgctatgctggtgaggagagccttcaggcttggggggccccacagccaccacccccacagccgcagccactacctgcaggggtggccaagtatgatgagaacttgatgaaaaagacagcagtgccccccagcaggcagtatgcagagcagggcgcccaggtgccctttcggactcactccctgcacgtccagcagccaccgccgccccagcagcccctggcataccccaagctccaaaggcagaagctgcagaacgacattgcctcccctctgcccttcccccagggtacccactttcctcagcattcccagtccttccccacctcctccacctactcctcctctgtccagggtggtgggcagggggcccactcctataagagttgcacagcaccgactgcccagccccatgacaggccgctgactgccagctccagcctggccccggggcagcgggtccagaatcttcatgcctaccagtcgggccgcctcagctatgaccagcagcagcagcagcagcagcagcagcagcagcagcagcaagcccttcagagccggcaccatgcccaggaaaccctccattaccaaaacctcgccaagtatcagcactacgggcagcaaggccagggctactgccagccggacgcagccgtccggaccccagagcagtactaccagaccttcagccccagctccagccactcacccgcccgctccgtgggccgctcaccttcctacagttccacaccgtcgccgctgatgccaaacctggagaactttccctacagccagcagccgctcagcaccggggccttccccgcagggatcactgaccacagccacttcatgcccctgctcaatccctccccaacggatgccaccagctctgtggacacccaggctggcaactgcaagccccttcagaaggacaagctccctgagaacctgctgtcggatctcagcctgcagagcctcacggcgctgacctcacaggtggagaacatctccaacaccgtccagcagctgctgctctccaaggctgctgtgccgcagaagaaaggtgtcaagaacctcgtgtccaggaccccagagcagcataaaagccagcactgcagccccgaagggagcggctactcagccgagcccgcaggcacaccgctgtcagagccgccgagcagcacgccacagtccacgcatgcggagccgcaggaggccgactacctgagcggctccgaggacccactggagcgcagcttcctctactgcaaccaggcccgtggcagccctgccagggtcaacagcaactcgaaggccaagcccgagtccgtgtccacctgttctgtgacctctcctgacgacatgtccaccaaatctgacgactccttccagagcctacacggcagtctgccgctcgacagcttctccaagttcgtggcgggtgagcgggactgtccgcggctgctgctcagcgccctggcacaggaggacctggcctccgagatcctggggctgcaggaagccatcggtgagaaggccgacaaagcttgggctgaagcacccagcctggtcaaggacagcagcaagccacccttctcgctggagaaccacagcgcctgcctggactctgtggccaagagtgcgtggccccggcctggggagccggaggccctgcccgactccttgcagctggacaagggcggcaatgccaaggacttcagcccagggctgtttgaagacccttccgtggccttcgctacgcctgaccccaaaaagacaactggtcctctctcctttggtaccaagcccacccttggggttcctgctccagaccccactacagcagcttttgactgtttcccggacacaaccgctgccagctcagcggacagcgccaacccctttgcctggccagaggaaaacctgggggatgcttgtcccaggtggggattgcaccctggcgagcttaccaagggcctggagcagggtgggaaggcctcagatggcatcagcaaaggggacacccatgaggcttcggcctgcctgggcttccaggaggaggacccccctggggagaaggtggcctcgttgcccggggacttcaagcaggaggaggtgggtggggtgaaggaggaggcaggtgggctgctgcagtgccccgaggtggccaaggctgaccggtggctggaggacagccggcactgctgttccaccgccgacttcggggacctcccactgctgccacccaccagcaggaaggaggacctggaagctgaggaggagtactcctccctatgtgagctcctgggcagccccgagcagaggcctggcatgcaggacccgctgtcacccaaggccccactcatctgcaccaaggaggaggtggaggaggtgctggactccaaggccggctggggctctccgtgccacctctcaggggagtccgtcatcctgctgggccctacagtgggcaccgagtcaaaggtccagagctggtttgagtcctctctgtcacacatgaagccaggtgaagaggggcctgatggggagcgagctccaggggattccaccacctcggacgcctctctggcccagaagcccaacaagcctgctgtgcccgaggcgcccatcgcaaagaaagagcctgtgccacggggcaaaagcttacggagccgtcgggtgcaccgggggctgcccgaggccgaggactccccatgcagggcaccagtgctgcccaaagacctcttgctccctgaatcctgcacagggcccccccagggacagatggaaggggctggagccccaggccggggggcctcggaagggctccccaggatgtgtactcgttctctcacggccctgagtgagccccgcacgcccggacccccaggcctgaccaccacccctgcacccccagacaaactggggggcaagcagcgagccgccttcaagtcgggcaagcgggtggggaagccctcacccaaggctgcctccagccccagcaacccggccgccctgcctgtggcctccgacagcagcccgatgggctccaagaccaaggagacagactcacccagcacgcctggcaaggaccagcgctccatgatccttcggtcacgcaccaaaacccaggagatcttccactccaagcggcggaggccctctgagggccggctccccaactgccgtgccaccaagaagctcctcgacaacagccacttgcccgccacattcaaggtctccagcagcccccagaaggagggcagggtgagccagcgggcaagggtccccaaacctggtgcaggcagcaagctctctgaccggcccctccatgcgctcaaaaggaagtcggccttcatggcgccggtccccaccaagaagcggaacctggtcttgcggagccgcagcagcagcagcagcaacgccagtggcaatgggggagatgggaaggaggagaggcctgagggttcccccaccctcttcaagaggatgtcttctcccaagaaagccaagcccaccaagggcaatggcgagcctgccacaaagctcccacccccggagacccccgatgcctgcctcaagctcgcctctcgggcagccttccagggggccatgaagaccaaggtgctgccaccccggaagggccggggcctgaagctggaagccatcgtgcagaagatcacctcgcccagcctcaagaagttcgcatgtaaagcgccaggggcctctcctggtaatcctctgagcccatccctttccgacaaagaccgtgggctcaagggtgctgggggcagcccagtgggggtggaagaaggcctggtaaatgtgggcaccgggcagaagctcccaacttctggggctgatccgttatgcagaaatccaaccaacagatccttaaaaggcaaactcatgaacagtaagaaactgtcttctactgactgtttcaaaaccgaggccttcacatccccggaggccctgcagcctggggggactgccctggcgcctaagaagaggagccggaaaggccgggcaggggcccatggactctccaaaggcccgctggagaagcggccctatcttggcccggctctgctcctgactccccgagacagggccagtggcacacaaggggccagtgaggacaactctggtggaggaggcaagaagccaaagatggaggagctgggcctggcctcccagcccccggagggcaggccctgccagccccagacaagggcacagaaacagccaggccacaccaactacagcagctattccaagcggaagcgcctcactcggggccgggccaagaacaccacctcttcaccctgtaaggggcgtgccaagcgacgacgacagcagcaggtgctgcccctggatcccgcagagcctgaaatccgcctcaagtacatttcctcttgcaagcggctgaggtcagacagccggacccccgccttctcacccttcgagcccagcctgggagcgcaaaacccaagaagcggccagaacgcacctccggctccggcggacgcgcgaccgttgtgcaccaccagggaccgccgcgcctactctgcacgggagcagggacagcgctag

SEQ ID NO: 26037 - DNA, 5662 bp, Homo sapiens
  source 1..5662: mol_type = unassigned DNA
atgcagtcttttcgagaaaggtgtggtttccatggcaaacaacagaactaccagcagacctcgcaggaaacatcacgcctagagaattacaggcagccgagtcaggccgggctaagctgcgaccggcagcggctgctcgccaaggactattataacccgcagccttacccgagctatgagggtggcgctggcacgccctctggcactgcagccgcggtggccgccgacaagtaccaccgaggcagcaaggccctgcccacacagcaaggcctgcaggggaggccggctttccctggctacggcgtccaggacagcagcccctacccaggccgctatgctggtgaggagagccttcaggcttggggggccccacagccaccacccccacagccgcagccactacctgcaggggtggccaagtatgatgagaacttgatgaaaaagacagcagtgccccccagcaggcagtatgcagagcagggcgcccaggtgccctttcggactcactccctgcacgtccagcagccaccgccgccccagcagcccctggcataccccaagctccaaaggcagaagctgcagaacgacattgcctcccctctgcccttcccccaggggtggtgggcagggcactcctataagagttgcacagcaccgactgcccagccccatgacaggccgctgactgccagctccagcctggccccggggcagcgggtccagaatcttcatgcctaccagtcgggccgcctcagctatgaccagcagcagcagcagcagcagcagcagcagcagcagcagcaagcccttcagagccggcaccatgcccaggaaaccctccattaccaaaacctcgccaagtatcagcactacgggcagcaaggccagggctactgccagccggacgcagccgtccggaccccagagcagtactaccagaccttcagccccagctccagccactcacccgcccgctccgtgggccgctcaccttcctacagttccacaccgtcgccgctgatgccaaacctggagaactttccctacagccagcagccgctcagcaccggggccttccccgcagggatcactgaccacagccacttcatgcccctgctcaatccctccccaacggatgccaccagctctgtggacagcctcacggcgctgacctcacaggtggagaacatctccaacaccgtccagcagctgctgctctccaaggctgctgtgccgcagaagaaaggtgtcaagaacctcgtgtccaggaccccagagcagcataaaagccagcactgcagccccgaagggagcggctactcagccgagcccgcaggcacaccgctgtcagagccgccgagcagcacgccacagtccacgcatgcggagccgcaggaggccgactacctgagcggctccgaggacccactggagcgcagcttcctctactgcaaccaggcccgtggcagccctgccagggtcaacagcaactcgaaggccaagcccgagtccgtgtccacctgttctgtgacctctcctgacgacatgtccaccaaatctgacgactccttccagagcctacacggcagtctgccgctcgacagcttctccaagttcgtggcgggtgagcgggactgtccgcggctgctgctcagcgccctggcacaggaggacctggcctccgagatcctggggctgcaggaagccatcggtgagaaggccgacaaagcttgggctgaagcacccagcctggtcaaggacagcagcaagccacccttctcgctggagaaccacagcgcctgcctggactctgtggccaagagtgcgtggccccggcctggggagccggaggccctgcccgactccttgcagctggacaagggcggcaatgccaaggacttcagcccagggctgtttgaagacccttccgtggccttcgctacgcctgaccccaaaaagacaactggtcctctctcctttggtaccaagcccacccttggggttcctgctccagaccccactacagcagcttttgactgtttcccggacacaaccgctgccagctcagcggacagcgccaacccctttgcctggccagaggaaaacctgggggatgcttgtcccaggtggggattgcaccctggcgagcttaccaagggcctggagcagggtgggaaggcctcagatggcatcagcaaaggggacacccatgaggcttcggcctgcctgggcttccaggaggaggacccccctggggagaaggtggcctcgttgcccggggacttcaagcaggaggaggtgggtggggtgaaggaggaggcaggtgggctgctgcagtgccccgaggtggccaaggctgaccggtggctggaggacagccggcactgctgttccaccgccgacttcggggacctcccactgctgccacccaccagcaggaaggaggacctggaagctgaggaggagtactcctccctatgtgagctcctgggcagccccgagcagaggcctggcatgcaggacccgctgtcacccaaggccccactcatctgcaccaaggaggaggtggaggaggtgctggactccaaggccggctggggctctccgtgccacctctcaggggagtccgtcatcctgctgggccctacagtgggcaccgagtcaaaggtccagagctggtttgagtcctctctgtcacacatgaagccaggtgaagaggggcctgatggggagcgagctccaggggattccaccacctcggacgcctctctggcccagaagcccaacaagcctgctgtgcccgaggcgcccatcgcaaagaaagagcctgtgccacggggcaaaagcttacggagccgtcgggtgcaccgggggctgcccgaggccgaggactccccatgcagggcaccagtgctgcccaaagacctcttgctccctgaatcctgcacagggcccccccagggacagatggaaggggctggagccccaggccggggggcctcggaagggctccccaggatgtgtactcgttctctcacggccctgagtgagccccgcacgcccggacccccaggcctgaccaccacccctgcacccccagacaaactggggggcaagcagcgagccgccttcaagtcgggcaagcgggtggggaagccctcacccaaggctgcctccagccccagcaacccggccgccctgcctgtggcctccgacagcagcccgatgggctccaagaccaaggagacagactcacccagcacgcctggcaaggaccagcgctccatgatccttcggtcacgcaccaaaacccaggagatcttccactccaagcggcggaggccctctgagggccggctccccaactgccgtgccaccaagaagctcctcgacaacagccacttgcccgccacattcaaggtctccagcagcccccagaaggagggcagggtgagccagcgggcaagggtccccaaacctggtgcaggcagcaagctctctgaccggcccctccatgcgctcaaaaggaagtcggccttcatggcgccggtccccaccaagaagcggaacctggtcttgcggagccgcagcagcagcagcagcaacgccagtggcaatgggggagatgggaaggaggagaggcctgagggttcccccaccctcttcaagaggatgtcttctcccaagaaagccaagcccaccaagggcaatggcgagcctgccacaaagctcccacccccggagacccccgatgcctgcctcaagctcgcctctcgggcagccttccagggggccatgaagaccaaggtgctgccaccccggaagggccggggcctgaagctggaagccatcgtgcagaagatcacctcgcccagcctcaagaagttcgcatgtaaagcgccaggggcctctcctggtaatcctctgagcccatccctttccgacaaagaccgtgggctcaagggtgctgggggcagcccagtgggggtggaagaaggcctggtaaatgtgggcaccgggcagaagctcccaacttctggggctgatccgttatgcagaaatccaaccaacagatccttaaaaggcaaactcatgaacaacagggccagtggcacacaaggggccagtgaggacaactctggtggaggaggcaagaagccaaagatggaggagctgggcctggcctcccagcccccggagggcaggccctgccagccccagacaagggcacagaaacagccaggccacaccaactacagcagctattccaagcggaagcgcctcactcggggccgggccaagaacaccacctcttcaccctgtaaggggcgtgccaagcgacgacgacagcagcaggtgctgcccctggatcccgcagagcctgaaatccgcctcaagtacatttcctcttgcaagcggctgaggtcagacagccggacccccgccttctcacccttcgtgcgggtggagaagcgagacgcgttcaccaccatatgcactgttgtcaactcccctggagatgcgcccaagccccacaggaagccttcctcctctgcctcctcttcctcatcctcgtcctcgttctccttggatgcagccggggcctccctggccacactccctggaggctccatcctgcagccgcggccctccttgcccctctcctccacgatgcacttggggcctgtggtttccaaggccctgagtacctcttgccttgtttgctgcctctgccaaaacccggccaacttcaaggaccttggggacctctgtgggccctactaccctgaacactgcctccccaaaaagaagccaaaactcaaggagaaggtgcggccagaaggcacctgtgaggaggcctcgctgccgcttgagagaacactcaaaggtcccgagtgtgcagctgccgccactgccgggaagccccccaggcctgacggcccagctgacccggccaagcagggcccactgcgcaccagtgcccggggcctgtcccggaggctgcagagctgctactgctgtgatggccgggaggatgggggcgaggaggcagccccagccgacaagggtcactgggtgcatgaggcctgtgccgtgtggaccggcggcgtctacctggtggccgggaagctctttgggctgcaggaggccatgaaggtggccgtggacatgcacggtggcactgtggctctggcgcctggtgacttctccctccccggcctcaggtttgcttcactcttccaagggccttcttggtgtgactgtcctgtcctggccacgtccactccaagcagctggtccagatgtgttccagctgccaagaagccggggccaccattgggtgctgccacaaaggatgcctccacacctaccactacccgtgtgccagcgatgcaggtacgagcccgcccaggaacaggagggcattggagcccatccaagcagtccagggggaccctccctgggcacagctccccaaacccaggccccatctcactcttcagtttccctcctctcttgccccagcaattcttttatccttctgtctgcctagacctctgctgggcaatgccagggacatggaaatgaggcattccccaggcacctgcttgaggagtgcccagagcagtgagggaagatagaagcataaattacaatgtgg

SEQ ID NO: 26038 - DNA, 7662 bp, Homo sapiens
  source 1..7662: mol_type = unassigned DNA
cccgcggacaccaggcaggcccggccgggtgcgcggccaaggcccgctccccgcgtccccgggcgccgcccccgcccgcggctgggctccgagagacgagtgggagagcgagtgcagcgagggcgagaggcgagccgagcaggccgccctgcccgcggccctagcgccggcgcgaggagggggcgccgcggcccaccctccttcctgcctggccgcgggccggccgggccgccgcgccccgacccccatggccacccaggcctccgggccgcgaagtcgcagcgccagacccaaggcccccgagtgagcgcgggcgccgaggatctcatctggccaccgcgttctggaagaggcgagagggagagcgtgcgcgagaggagagagacggcgggggaaagggagacggcgagacgcgcagcgccggcgcccgggagacccaggaggagcccgcagataaccagcccgagtcatgcagtcttttcgagaaaggtgtggtttccatggcaaacaacagaactaccagcagacctcgcaggaaacatcacgcctagagaattacaggcagccgagtcaggccgggctaagctgcgaccggcagcggctgctcgccaaggactattataacccgcagccttacccgagctatgagggtggcgctggcacgccctctggcactgcagccgcggtggccgccgacaagtaccaccgaggcagcaaggccctgcccacacagcaaggcctgcaggggaggccggctttccctggctacggcgtccaggacagcagcccctacccaggccgctatgctggtgaggagagccttcaggcttggggggccccacagccaccacccccacagccgcagccactacctgcaggggtggccaagtatgatgagaacttgatgaaaaagacagcagtgccccccagcaggcagtatgcagagcagggcgcccaggtgccctttcggactcactccctgcacgtccagcagccaccgccgccccagcagcccctggcataccccaagctccaaaggcagaagctgcagaacgacattgcctcccctctgcccttcccccagggtacccactttcctcagcattcccagtccttccccacctcctccacctactcctcctctgtccagggtggtgggcagggggcccactcctataagagttgcacagcaccgactgcccagccccatgacaggccgctgactgccagctccagcctggccccggggcagcgggtccagaatcttcatgcctaccagtcgggccgcctcagctatgaccagcagcagcagcagcagcagcagcagcagcagcagcagcaagcccttcagagccggcaccatgcccaggaaaccctccattaccaaaacctcgccaagtatcagcactacgggcagcaaggccagggctactgccagccggacgcagccgtccggaccccagagcagtactaccagaccttcagccccagctccagccactcacccgcccgctccgtgggccgctcaccttcctacagttccacaccgtcgccgctgatgccaaacctggagaactttccctacagccagcagccgctcagcaccggggccttccccgcagggatcactgaccacagccacttcatgcccctgctcaatccctccccaacggatgccaccagctctgtggacacccaggctggcaactgcaagccccttcagaaggacaagctccctgagaacctgctgtcggatctcagcctgcagagcctcacggcgctgacctcacaggtggagaacatctccaacaccgtccagcagctgctgctctccaaggctgctgtgccgcagaagaaaggtgtcaagaacctcgtgtccaggaccccagagcagcataaaagccagcactgcagccccgaagggagcggctactcagccgagcccgcaggcacaccgctgtcagagccgccgagcagcacgccacagtccacgcatgcggagccgcaggaggccgactacctgagcggctccgaggacccactggagcgcagcttcctctactgcaaccaggcccgtggcagccctgccagggtcaacagcaactcgaaggccaagcccgagtccgtgtccacctgttctgtgacctctcctgacgacatgtccaccaaatctgacgactccttccagagcctacacggcagtctgccgctcgacagcttctccaagttcgtggcgggtgagcgggactgtccgcggctgctgctcagcgccctggcacaggaggacctggcctccgagatcctggggctgcaggaagccatcggtgagaaggccgacaaagcttgggctgaagcacccagcctggtcaaggacagcagcaagccacccttctcgctggagaaccacagcgcctgcctggactctgtggccaagagtgcgtggccccggcctggggagccggaggccctgcccgactccttgcagctggacaagggcggcaatgccaaggacttcagcccagggctgtttgaagacccttccgtggccttcgctacgcctgaccccaaaaagacaactggtcctctctcctttggtaccaagcccacccttggggttcctgctccagaccccactacagcagcttttgactgtttcccggacacaaccgctgccagctcagcggacagcgccaacccctttgcctggccagaggaaaacctgggggatgcttgtcccaggtggggattgcaccctggcgagcttaccaagggcctggagcagggtgggaaggcctcagatggcatcagcaaaggggacacccatgaggcttcggcctgcctgggcttccaggaggaggacccccctggggagaaggtggcctcgttgcccggggacttcaagcaggaggaggtgggtggggtgaaggaggaggcaggtgggctgctgcagtgccccgaggtggccaaggctgaccggtggctggaggacagccggcactgctgttccaccgccgacttcggggacctcccactgctgccacccaccagcaggaaggaggacctggaagctgaggaggagtactcctccctatgtgagctcctgggcagccccgagcagaggcctggcatgcaggacccgctgtcacccaaggccccactcatctgcaccaaggaggaggtggaggaggtgctggactccaaggccggctggggctctccgtgccacctctcaggggagtccgtcatcctgctgggccctacagtgggcaccgagtcaaaggtccagagctggtttgagtcctctctgtcacacatgaagccaggtgaagaggggcctgatggggagcgagctccaggggattccaccacctcggacgcctctctggcccagaagcccaacaagcctgctgtgcccgaggcgcccatcgcaaagaaagagcctgtgccacggggcaaaagcttacggagccgtcgggtgcaccgggggctgcccgaggccgaggactccccatgcagggcaccagtgctgcccaaagacctcttgctccctgaatcctgcacagggcccccccagggacagatggaaggggctggagccccaggccggggggcctcggaagggctccccaggatgtgtactcgttctctcacggccctgagtgagccccgcacgcccggacccccaggcctgaccaccacccctgcacccccagacaaactggggggcaagcagcgagccgccttcaagtcgggcaagcgggtggggaagccctcacccaaggctgcctccagccccagcaacccggccgccctgcctgtggcctccgacagcagcccgatgggctccaagaccaaggagacagactcacccagcacgcctggcaaggaccagcgctccatgatccttcggtcacgcaccaaaacccaggagatcttccactccaagcggcggaggccctctgagggccggctccccaactgccgtgccaccaagaagctcctcgacaacagccacttgcccgccacattcaaggtctccagcagcccccagaaggagggcagggtgagccagcgggcaagggtccccaaacctggtgcaggcagcaagctctctgaccggcccctccatgcgctcaaaaggaagtcggccttcatggcgccggtccccaccaagaagcggaacctggtcttgcggagccgcagcagcagcagcagcaacgccagtggcaatgggggagatgggaaggaggagaggcctgagggttcccccaccctcttcaagaggatgtcttctcccaagaaagccaagcccaccaagggcaatggcgagcctgccacaaagctcccacccccggagacccccgatgcctgcctcaagctcgcctctcgggcagccttccagggggccatgaagaccaaggtgctgccaccccggaagggccggggcctgaagctggaagccatcgtgcagaagatcacctcgcccagcctcaagaagttcgcatgtaaagcgccaggggcctctcctggtaatcctctgagcccatccctttccgacaaagaccgtgggctcaagggtgctgggggcagcccagtgggggtggaagaaggcctggtaaatgtgggcaccgggcagaagctcccaacttctggggctgatccgttatgcagaaatccaaccaacagatccttaaaaggcaaactcatgaacagtaagaaactgtcttctactgactgtttcaaaaccgaggccttcacatccccggaggccctgcagcctggggggactgccctggcgcctaagaagaggagccggaaaggccgggcaggggcccatggactctccaaaggcccgctggagaagcggccctatcttggcccggctctgctcctgactccccgagacagggccagtggcacacaaggggccagtgaggacaactctggtggaggaggcaagaagccaaagatggaggagctgggcctggcctcccagcccccggagggcaggccctgccagccccagacaagggcacagaaacagccaggccacaccaactacagcagctattccaagcggaagcgcctcactcggggccgggccaagaacaccacctcttcaccctgtaaggggcgtgccaagcgacgacgacagcagcaggtgctgcccctggatcccgcagagcctgaaatccgcctcaagtacatttcctcttgcaagcggctgaggtcagacagccggacccccgccttctcacccttcgtgcgggtggagaagcgagacgcgttcaccaccatatgcactgttgtcaactcccctggagatgcgcccaagccccacaggaagccttcctcctctgcctcctcttcctcatcctcgtcctcgttctccttggatgcagccggggcctccctggccacactccctggaggctccatcctgcagccgcggccctccttgcccctctcctccacgatgcacttggggcctgtggtttccaaggccctgagtacctcttgccttgtttgctgcctctgccaaaacccggccaacttcaaggaccttggggacctctgtgggccctactaccctgaacactgcctccccaaaaagaagccaaaactcaaggagaaggtgcggccagaaggcacctgtgaggaggcctcgctgccgcttgagagaacactcaaaggtcccgagtgtgcagctgccgccactgccgggaagccccccaggcctgacggcccagctgacccggccaagcagggcccactgcgcaccagtgcccggggcctgtcccggaggctgcagagctgctactgctgtgatggccgggaggatgggggcgaggaggcagccccagccgacaagggtcgcaaacatgagtgcagcaaggaggctccggcagagcccggcggggaggcccaggagcactgggtgcatgaggcctgtgccgtgtggaccggcggcgtctacctggtggccgggaagctctttgggctgcaggaggccatgaaggtggccgtggacatgatgtgttccagctgccaagaagccggggccaccattgggtgctgccacaaaggatgcctccacacctaccactacccgtgtgccagcgatgcaggttgcatattcatcgaagagaacttttctttgaaatgtcccaaacataagaggctgccgtagtaatccaccccaacggccggaggagccgccggagcccgcctgcccgcccgccgccgaaggagaggagccgcctgcgcagcccccgggcctttgagctgctcccagcgctggtccagagccgatccttgatccgggtcccggatcgtggatccggccgcctagggctcagacttgcggccccgggttgggaggaaaacccgttccggagccgcctgctcccggaaccggacggcacagggcgttcttgcccaccccaggggccaggcttgcggagggggagcccgcggagcggccagactccccggggcgctcagcctccggcgagggtgggagacggctttgtcctggggacactttccctctggaatctcaagacgacgtggcacacattccacgtgggtgctgccgccaccccagtcggtcgtggcgtgcagctgggagccctgggcttgggggtgggggtcgaaacagtactggaagaggcggagggcggctcctagctccgtggactaggcgggggagaaaggaagcctttctgagagcgggctaggccggcactggagaggccggagcctttggaacaaaccgtgcggaacgcgtccaggggccttcccgcccagcctttgccagatctctcgtgcggttcgggcaaagccggggtagacctgggctatgctcagttaggggttgcgggatccccgagtgtgggcgggactgggacaccctttggcctctgtttgtcccctttccagtcctccaccccacccctggagcccagcctgggagcgcaaaacccaagaagcggccagaacgcacctccggctccggcggacgcgcgaccgttgtgcaccaccagggaccgccgcgcctactctgcacgggagcagggacagcgctagatttcgtgtacaaaacctgtgtacccctctatatatatgttacatagaatgtatatatgttgggaacatgctcgcttctcccgtgtgtcgccgccgtgcgtcgtgcgcccgcaacagagccccaaccgggcctttgccgggtaaggggctaccgcgacgccacttgtccacgcagccaccaccggcccgggccagtccctgccagtccgtccgcctgtccgtccgtgtcctcagctctgtccacgcttcgataggcctgacgcagcccccagcccagggccgccctagcaacttcctgtacatatgactgtaaaatggtaaacgtgtgtattatatctggcctcgttatatagtgtatatatatgtatacatatacatatatataatatatatgaagactgtaaatgttaagacgactagtgttcttattagtatattgcttcacactgaagattgtgtgtatcgagctgtttctaaaagatgtttattttccttaagagtaaaaaacagtcattgcattcagaaaaaaaaaaaaaaaaaagtcaataaagatacaacgattgttttggaaaa

SEQ ID NO: 26039 - DNA, 2901 bp, Homo sapiens
  source 1..2901: mol_type = unassigned DNA
atgcagtcttttcgagaaaggtgtggtttccatggcaaacaacagaactaccagcagacctcgcaggaaacatcacgcctagagaattacaggcagccgagtcaggccgggctaagctgcgaccggcagcggctgctcgccaaggactattataacccgcagccttacccgagctatgagggtggcgctggcacgccctctggcactgcagccgcggtggccgccgacaagtaccaccgaggcagcaaggccctgcccacacagcaaggcctgcaggggaggccggctttccctggctacggcgtccaggacagcagcccctacccaggccgctatgctggtgaggagagccttcaggcttggggggccccacagccaccacccccacagccgcagccactacctgcaggggtggccaagtatgatgagaacttgatgaaaaagacagcagtgccccccagcaggcagtatgcagagcagggcgcccaggtgccctttcggactcactccctgcacgtccagcagccaccgccgccccagcagcccctggcataccccaagctccaaaggcagaagctgcagaacgacattgcctcccctctgcccttcccccagggtacccactttcctcagcattcccagtccttccccacctcctccacctactcctcctctgtccagggtggtgggcagggggcccactcctataagagttgcacagcaccgactgcccagccccatgacaggccgctgactgccagctccagcctggccccggggcagcgggtccagaatcttcatgcctaccagtcgggccgcctcagctatgaccagcagcagcagcagcagcagcagcagcagcagcagcagcaagcccttcagagccggcaccatgcccaggaaaccctccattaccaaaacctcgccaagtatcagcactacgggcagcaaggccagggctactgccagccggacgcagccgtccggaccccagagcagtactaccagaccttcagccccagctccagccactcacccgcccgctccgtgggccgctcaccttcctacagttccacaccgtcgccgctgatgccaaacctggagaactttccctacagccagcagccgctcagcaccggggccttccccgcagggatcactgaccacagccacttcatgcccctgctcaatccctccccaacggatgccaccagctctgtggacacccaggctggcaactgcaagccccttcagaaggacaagctccctgagaacctgctgtcggatctcagcctgcagagcctcacggcgctgacctcacaggtggagaacatctccaacaccgtccagcagctgctgctctccaaggctgctgtgccgcagaagaaaggtgtcaagaacctcgtgtccaggaccccagagcagcataaaagccagcactgcagccccgaagggagcggctactcagccgagcccgcaggcacaccgctgtcagagccgccgagcagcacgccacagtccacgcatgcggagccgcaggaggccgactacctgagcggctccgaggacccactggagcgcagcttcctctactgcaaccaggcccgtggcagccctgccagggtcaacagcaactcgaaggccaagcccgagtccgtgtccacctgttctgtgacctctcctgacgacatgtccaccaaatctgacgactccttccagagcctacacggcagtctgccgctcgacagcttctccaagttcgtggcgggtgagcgggactgtccgcggctgctgctcagcgccctggcacaggaggacctggcctccgagatcctggggctgcaggaagccatcggtgagaaggccgacaaagcttgggctgaagcacccagcctggtcaaggacagcagcaagccacccttctcgctggagaaccacagcgcctgcctggactctgtggccaagagtgcgtggccccggcctggggagccggaggccctgcccgactccttgcagctggacaagggcggcaatgccaaggacttcagcccagggctgtttgaagacccttccgtggccttcgctacgcctgaccccaaaaagacaactggtcctctctcctttggtaccaagcccacccttggggttcctgctccagaccccactacagcagcttttgactgtttcccggacacaaccgctgccagctcagcggacagcgccaacccctttgcctggccagaggaaaacctgggggatgcttgtcccaggtggggattgcaccctggcgagcttaccaagggcctggagcagggtgggaaggcctcagatggcatcagcaaaggggacacccatgaggcttcggcctgcctgggcttccaggaggaggacccccctggggagaaggtggcctcgttgcccggggacttcaagcaggaggaggtgggtggggtgaaggaggaggcaggtgggctgctgcagtgccccgaggtggccaaggctgaccggtggctggaggacagccggcactgctgttccaccgccgacttcggggacctcccactgctgccacccaccagcaggaaggaggacctggaagctgaggaggagtactcctccctatgtgagctcctgggcagccccgagcagaggcctggcatgcaggacccgctgtcacccaaggccccactcatctgcaccaaggaggaggtggaggaggtgctggactccaaggccggctggggctctccgtgccacctctcaggggagtccgtcatcctgctgggccctacagtgggcaccgagtcaaaggtccagagctggtttgaggcctcgttatatagtgtatatatatgtatacatatacatatatataatatatatgaagactgtaaatgttaa

SEQ ID NO: 26040 - DNA, 2928 bp, Homo sapiens
  source 1..2928: mol_type = unassigned DNA
ctgagatttagccgtgcgatgcccgcgcaggggcgggggccgcgggccaggggaggcgctcagagtccggagccgccgagcgagataaccagcccgagtcatgcagtcttttcgagaaaggtgtggtttccatggcaaacaacagaactaccagcagacctcgcaggaaacatcacgcctagagaattacaggcagccgagtcaggccgggctaagctgcgaccggcagcggctgctcgccaaggactattataacccgcagccttacccgagctatgagggtggcgctggcacgccctctggcactgcagccgcggtggccgccgacaagtaccaccgaggcagcaaggccctgcccacacagcaaggcctgcaggggaggccggctttccctggctacggcgtccaggacagcagcccctacccaggccgctatgctggtgaggagagccttcaggcttggggggccccacagccaccacccccacagccgcagccactacctgcaggggtggccaagtatgatgagaacttgatgaaaaagacagcagtgccccccagcaggcagtatgcagagcagggcgcccaggtgccctttcggactcactccctgcacgtccagcagccaccgccgccccagcagcccctggcataccccaagctccaaaggcagaagctgcagaacgacattgcctcccctctgcccttcccccagggtacccactttcctcagcattcccagtccttccccacctcctccacctactcctcctctgtccagggtggtgggcagggggcccactcctataagagttgcacagcaccgactgcccagccccatgacaggccgctgactgccagctccagcctggccccggggcagcgggtccagaatcttcatgcctaccagtcgggccgcctcagctatgaccagcagcagcagcagcagcagcagcagcagcagcagcagcaagcccttcagagccggcaccatgcccaggaaaccctccattaccaaaacctcgccaagtatcagcactacgggcagcaaggccagggctactgccagccggacgcagccgtccggaccccagagcagtactaccagaccttcagccccagctccagccactcacccgcccgctccgtgggccgctcaccttcctacagttccacaccgtcgccgctgatgccaaacctggagaactttccctacagccagcagccgctcagcaccggggccttccccgcagggatcactgaccacagccacttcatgcccctgctcaatccctccccaacggatgccaccagctctgtggacacccaggctggcaactgcaagccccttcagaaggacaagctccctgagaacctgctgtcggatctcagcctgcagagcctcacggcgctgacctcacaggtggagaacatctccaacaccgtccagcagctgctgctctccaaggctgctgtgccgcagaagaaaggtgtcaagaacctcgtgtccaggaccccagagcagcataaaagccagcactgcagccccgaagggagcggctactcagccgagcccgcaggcacaccgctgtcagagccgccgagcagcacgccacagtccacgcatgcggagccgcaggaggccgactacctgagcggctccgaggacccactggagcgcagcttcctctactgcaaccaggcccgtggcagccctgccagggtcaacagcaactcgaaggccaagcccgagtccgtgtccacctgttctgtgacctctcctgacgacatgtccaccaaatctgacgactccttccagagcctacacggcagtctgccgctcgacagcttctccaagttcgtggcgggtgagcgggactgtccgcggctgctgctcagcgccctggcacaggaggacctggcctccgagatcctggggctgcaggaagccatcggtgagaaggccgacaaagcttgggctgaagcacccagcctggtcaaggacagcagcaagccacccttctcgctggagaaccacagcgcctgcctggactctgtggccaagagtgcgtggccccggcctggggagccggaggccctgcccgactccttgcagctggacaagggcggcaatgccaaggacttcagcccagggctgtttgaagacccttccgtggccttcgctacgcctgaccccaaaaagacaactggtcctctctcctttggtaccaagcccacccttggggttcctgctccagaccccactacagcagcttttgactgtttcccggacacaaccgctgccagctcagcggacagcgccaacccctttgcctggccagaggaaaacctgggggatgcttgtcccaggtggggattgcaccctggcgagcttaccaagggcctggagcagggtgggaaggcctcagatggcatcagcaaaggggacacccatgaggcttcggcctgcctgggcttccaggaggaggacccccctggggagaaggtggcctcgttgcccggggacttcaagcaggaggaggtgggtggggtgaaggaggaggcaggtgggctgctgcagtgccccgaggtggccaaggctgaccggtggctggaggacagccggcactgctgttccaccgccgacttcggggacctcccactgctgccacccaccagcaggaaggaggacctggaagctgaggaggagtactcctccctatgtgagctcctgggcagccccgagcagaggcctggcatgcaggacccgctgtcacccaaggccccactcatctgcaccaaggaggaggtggaggaggtgctggactccaaggccggctggggctctccgtgccacctctcaggggagtccgtcatcctgctgggccctacagtgggcaccgagtcaaaggtccagagctggtttga

SEQ ID NO: 26041 - DNA, 6060 bp, Homo sapiens
  source 1..6060: mol_type = unassigned DNA
atgcagtcttttcgagaaaggtgtggtttccatggcaaacaacagaactaccagcagacctcgcaggaaacatcacgcctagagaattacaggcagccgagtcaggccgggctaagctgcgaccggcagcggctgctcgccaaggactattataacccgcagccttacccgagctatgagggtggcgctggcacgccctctggcactgcagccgcggtggccgccgacaagtaccaccgaggcagcaaggccctgcccacacagcaaggcctgcaggggaggccggctttccctggctacggcgtccaggacagcagcccctacccaggccgctatgctggtgaggagagccttcaggcttggggggccccacagccaccacccccacagccgcagccactacctgcaggggtggccaagtatgatgagaacttgatgaaaaagacagcagtgccccccagcaggcagtatgcagagcagggcgcccaggtgccctttcggactcactccctgcacgtccagcagccaccgccgccccagcagcccctggcataccccaagctccaaaggcagaagctgcagaacgacattgcctcccctctgcccttcccccagggtacccactttcctcagcattcccagtccttccccacctcctccacctactcctcctctgtccagggtggtgggcagggggcccactcctataagagttgcacagcaccgactgcccagccccatgacaggccgctgactgccagctccagcctggccccggggcagcgggtccagaatcttcatgcctaccagtcgggccgcctcagctatgaccagcagcagcagcagcagcagcagcagcagcagcagcagcaagcccttcagagccggcaccatgcccaggaaaccctccattaccaaaacctcgccaagtatcagcactacgggcagcaaggccagggctactgccagccggacgcagccgtccggaccccagagcagtactaccagaccttcagccccagctccagccactcacccgcccgctccgtgggccgctcaccttcctacagttccacaccgtcgccgctgatgccaaacctggagaactttccctacagccagcagccgctcagcaccggggccttccccgcagggatcactgaccacagccacttcatgcccctgctcaatccctccccaacggatgccaccagctctgtggacacccaggctggcaactgcaagccccttcagaaggacaagctccctgagaacctgctgtcggatctcagcctgcagagcctcacggcgctgacctcacaggtggagaacatctccaacaccgtccagcagctgctgctctccaaggctgctgtgccgcagaagaaaggtgtcaagaacctcgtgtccaggaccccagagcagcataaaagccagcactgcagccccgaagggagcggctactcagccgagcccgcaggcacaccgctgtcagagccgccgagcagcacgccacagtccacgcatgcggagccgcaggaggccgactacctgagcggctccgaggacccactggagcgcagcttcctctactgcaaccaggcccgtggcagccctgccagggtcaacagcaactcgaaggccaagcccgagtccgtgtccacctgttctgtgacctctcctgacgacatgtccaccaaatctgacgactccttccagagcctacacggcagtctgccgctcgacagcttctccaagttcgtggcgggtgagcgggactgtccgcggctgctgctcagcgccctggcacaggaggacctggcctccgagatcctggggctgcaggaagccatcggtgagaaggccgacaaagcttgggctgaagcacccagcctggtcaaggacagcagcaagccacccttctcgctggagaaccacagcgcctgcctggactctgtggccaagagtgcgtggccccggcctggggagccggaggccctgcccgactccttgcagctggacaagggcggcaatgccaaggacttcagcccagggctgtttgaagacccttccgtggccttcgctacgcctgaccccaaaaagacaactggtcctctctcctttggtaccaagcccacccttggggttcctgctccagaccccactacagcagcttttgactgtttcccggacacaaccgctgccagctcagcggacagcgccaacccctttgcctggccagaggaaaacctgggggatgcttgtcccaggtggggattgcaccctggcgagcttaccaagggcctggagcagggtgggaaggcctcagatggcatcagcaaaggggacacccatgaggcttcggcctgcctgggcttccaggaggaggacccccctggggagaaggtggcctcgttgcccggggacttcaagcaggaggaggtgggtggggtgaaggaggaggcaggtgggctgctgcagtgccccgaggtggccaaggctgaccggtggctggaggacagccggcactgctgttccaccgccgacttcggggacctcccactgctgccacccaccagcaggaaggaggacctggaagctgaggaggagtactcctccctatgtgagctcctgggcagccccgagcagaggcctggcatgcaggacccgctgtcacccaaggccccactcatctgcaccaaggaggaggtggaggaggtgctggactccaaggccggctggggctctccgtgccacctctcaggggagtccgtcatcctgctgggccctacagtgggcaccgagtcaaaggtccagagctggtttgagtcctctctgtcacacatgaagccaggtgaagaggggcctgatggggagcgagctccaggggattccaccacctcggacgcctctctggcccagaagcccaacaagcctgctgtgcccgaggcgcccatcgcaaagaaagagcctgtgccacggggcaaaagcttacggagccgtcgggtgcaccgggggctgcccgaggccgaggactccccatgcagggcaccagtgctgcccaaagacctcttgctccctgaatcctgcacagggcccccccagggacagatggaaggggctggagccccaggccggggggcctcggaagggctccccaggatgtgtactcgttctctcacggccctgagtgagccccgcacgcccggacccccaggcctgaccaccacccctgcacccccagacaaactggggggcaagcagcgagccgccttcaagtcgggcaagcgggtggggaagccctcacccaaggctgcctccagccccagcaacccggccgccctgcctgtggcctccgacagcagcccgatgggctccaagaccaaggagacagactcacccagcacgcctggcaaggaccagcgctccatgatccttcggtcacgcaccaaaacccaggagatcttccactccaagcggcggaggccctctgagggccggctccccaactgccgtgccaccaagaagctcctcgacaacagccacttgcccgccacattcaaggtctccagcagcccccagaaggagggcagggtgagccagcgggcaagggtccccaaacctggtgcaggcagcaagctctctgaccggcccctccatgcgctcaaaaggaagtcggccttcatggcgccggtccccaccaagaagcggaacctggtcttgcggagccgcagcagcagcagcagcaacgccagtggcaatgggggagatgggaaggaggagaggcctgagggttcccccaccctcttcaagaggatgtcttctcccaagaaagccaagcccaccaagggcaatggcgagcctgccacaaagctcccacccccggagacccccgatgcctgcctcaagctcgcctctcgggcagccttccagggggccatgaagaccaaggtgctgccaccccggaagggccggggcctgaagctggaagccatcgtgcagaagatcacctcgcccagcctcaagaagttcgcatgtaaagcgccaggggcctctcctggtaatcctctgagcccatccctttccgacaaagaccgtgggctcaagggtgctgggggcagcccagtgggggtggaagaaggcctggtaaatgtgggcaccgggcagaagctcccaacttctggggctgatccgttatgcagaaatccaaccaacagatccttaaaaggcaaactcatgaacagtaagaaactgtcttctactgactgtttcaaaaccgaggccttcacatccccggaggccctgcagcctggggggactgccctggcgcctaagaagaggagccggaaaggccgggcaggggcccatggactctccaaaggcccgctggagaagcggccctatcttggcccggctctgctcctgactccccgagacagggccagtggcacacaaggggccagtgaggacaactctggtggaggaggcaagaagccaaagatggaggagctgggcctggcctcccagcccccggagggcaggccctgccagccccagacaagggcacagaaacagccaggccacaccaactacagcagctattccaagcggaagcgcctcactcggggccgggccaagaacaccacctcttcaccctgtaaggggcgtgccaagcgacgacgacagcagcaggtgctgcccctggatcccgcagagcctgaaatccgcctcaagtacatttcctcttgcaagcggctgaggtcagacagccggacccccgccttctcacccttcgtgcgggtggagaagcgagacgcgttcaccaccatatgcactgttgtcaactcccctggagatgcgcccaagccccacaggaagccttcctcctctgcctcctcttcctcatcctcgtcctcgttctccttggatgcagccggggcctccctggccacactccctggaggctccatcctgcagccgcggccctccttgcccctctcctccacgatgcacttggggcctgtggtttccaaggccctgagtacctcttgccttgtttgctgcctctgccaaaacccggccaacttcaaggaccttggggacctctgtgggccctactaccctgaacactgcctccccaaaaagaagccaaaactcaaggagaaggtgcggccagaaggcacctgtgaggaggcctcgctgccgcttgagagaacactcaaaggtcccgagtgtgcagctgccgccactgccgggaagccccccaggcctgacggcccagctgacccggccaagcagggcccactgcgcaccagtgcccggggcctgtcccggaggctgcagagctgctactgctgtgatggccgggaggatgggggcgaggaggcagccccagccgacaagggtcgcaaacatgagtgcagcaaggaggctccggcagagcccggcggggaggcccaggagcactgggtgcatgaggcctgtgccgtgtggaccggcggcgtctacctggtggccgggaagctctttgggctgcaggaggccatgaaggtggccgtggacatgcacggtggcactgtggctctggcgcctggtgacttctccctccccggcctcaggtttgcttcactcttccaagggccttcttggtgtgactgtcctgtcctggccacgtccactccaagcagctggtccagatgtgttccagctgccaagaagccggggccaccattgggtgctgccacaaaggatgcctccacacctaccactacccgtgtgccagcgatgcaggtacgagcccgcccaggaacaggagggcattggagcccatccaagcagtccagggggaccctccctgggcacagctccccaaacccaggccccatctcactcttcagtttccctcctctcttgccccagcaattcttttatccttctgtctgcctagacctctgctgggcaatgccagggacatggaaatgaggcattccccaggcacctgcttgaggagtgcccagagcagtgagggaagatagaagcataaattacaatgtggaatgc

SEQ ID NO: 26042 - DNA, 5092 bp, Homo sapiens
  source 1..5092: mol_type = unassigned DNA
atccaggtcggcgggggccggcgcccggcggccacgtggtggtgctgccgctgcccccgccccgccggcctagcccgggagctcggcgcccactgacccccgcagcgggggaggaggagggactgcggcgcaggaagccgagcaggaagcgagcccggcggccgcgttttcctggggaagcggcgggcggggtggagcagccagctgggtccggggagcgccgccgccgcctcgatggggtgttgaaaagtctcctctagagctttggaaggctgaatgcactaaacatgaagagcttgaaagcgaagttcaggaagagtgacaccaatgagtggaacaagaatgatgaccggctactgcaggccgtggagaatggagatgcggagaaggtggcctcactgctcggcaagaagggggccagtgccaccaaacacgacagtgagggcaagaccgctttccatcttgctgctgcaaaaggacacgtggaatgcctcagggtcatgattacacatggtgtggatgtgacagcccaagatactaccggacacagcgccttacatctcgcagccaagaacagccaccatgaatgcatcaggaagctgcttcagtctaaatgcccagccgaaagtgtcgacagctctgggaaaacagctttacattatgcagcggctcagggctgccttcaagctgtgcagattctctgcgaacacaagagccccataaacctcaaagatttggatgggaatataccgctgcttcttgctgtacaaaatggtcacagtgagatctgtcactttctcctggatcatggagcagatgtcaattccaggaacaaaagtggaagaactgctctcatgctggcctgtgagattggcagctctaacgctgtggaagccttaattaaaaagggtgcagacctaaaccttgtagattctcttggatacaatgccttacattattccaaactctcagaaaatgcaggaattcaaagccttctattatcaaaaatctctcaggatgctgatttaaagaccccaacaaaaccaaagcagcatgaccaagtctctaaaataagctcagaaagaagtggaactccaaaaaaacgcaaagctccaccacctcctatcagtcctacccagttgagtgatgtctcttccccaagatcaataacttcgactccactatcgggaaaggaatcggtattttttgctgaaccacccttcaaggctgagatcagttctatacgagaaaacaaagacagactaagtgacagtactacaggtgctgatagcttattggatataagttctgaagctgaccaacaagatcttctctctctattgcaagcaaaagttgcttcccttaccttacacaataaggagttacaagataaattacaggccaaatcacccaaggaggcggaagcagacctaagctttgactcataccattccacccaaactgacttgggcccatccctgggaaaacctggtgaaacctctcccccagactccaaatcatctccatctgtcttaatacattctttaggtaaatccactactgacaatgatgtcagaattcagcaactgcaagagattttgcaagatctacagaagagattagagagctctgaagcagagagaaaacagctacaggtcgaactccaatcccgaagggcagaactggtatgcttaaacaacactgagatttcagagaacagctctgacctcagccagaaacttaaagaaactcagagcaaatacgaggaggctatgaaagaagtccttagtgtgcagaagcagatgaaactcggtcttgtctcacctgaaagcatggataattattcacatttccacgagctgagggtcacggaagaggaaataaatgtgctaaagcaggatctgcagaatgcattagaagaaagtgaaagaaataaagagaaagtgagagagttagaggaaaaactggtagagagggagaaaggtacagtgattaagccacctgtggaagagtacgaggaaatgaaaagttcatattgctctgttattgagaatatgaataaggagaaagcatttttgtttgagaaataccaagaagcccaagaagaaatcatgaaattaaaagacacactaaaaagtcagatgacacaggaagccagtgatgaagctgaggacatgaaagaagccatgaataggatgatagatgaactcaataaacaggtgagcgagctgtcacagctgtacaaagaagcccaggctgagctggaggattacaggaagaggaaatctctagaggatgtcacagctgaatatatccataaagcagagcatgagaaactgatgcaattgacaaacgtgtccagggctaaagcagaagatgcactgtctgaaatgaagtctcagtattcaaaagtgttgaatgagttgacccagctcaaacaactggtggatgcacaaaaagagaactctgtctctatcacagaacatttgcaagtgataaccacgctgcggactgcagcaaaagagatggaagaaaaaataagcaatcttaaggaacaccttgcaagcaaggaagtggaagtagcaaagctggagaaacaactcttagaagagaaagctgctatgactgatgcaatggtacctcggtcttcctatgaaaaactccagtcatccttagagagtgaagtgagtgtgttggcatcgaaattaaaggaatctgtgaaagagaaagagaaggtccattcagaggttgtccagattagaagtgaggtctcacaggtgaaaagagaaaaggaaaatattcagactctcttgaaatccaaagagcaagaagtaaatgaacttctgcaaaaattccagcaagctcaggaagaacttgcagaaatgaaaagatacgctgagagctcttcaaaactggaggaagataaagataaaaagataaatgagatgtcgaaggaagtcaccaaattgaaggaggccttgaacagcctctcccagctctcctactcaacaagctcatccaaaaggcagagtcagcagctggaggcgctgcagcagcaagtcaaacagctccagaaccagctggcggaatgcaagaaacaacaccaggaggtcatatcagtttacagaatgcatcttctgtatgctgtgcagggccagatggatgaagatgtccagaaagtactgaagcaaatccttaccatgtgtaaaaaccagtctcaaaagaagtaaagtggattccttggcaggacactgccccttgtcatctgtctttgtgttagatccagagttgtcggcagccgctgccattgttctcattcgtggtatgcactgtggcctagcgtagcttcttccctttccaaaggtttctgaggacttctcccaggagaagactgcccgcctcagaactgcttagagacttcaaaccagcagaggtgaaagtccctgtcatcccttcagattccagagctgggatcagccatgcccagaggtctggtcctgatgctggcaggggggccccctcctccatccctgactggctgagtggctttatcaccaccgagtgatgtgctgaggcctcctgcagtgaatgctccttccattcctgtactcgggcagtgccattcagcacaggagagctctttttgcctttggctttcaattccaaaacatgatttaatttctaactaaattagtatggcactagttatgaagtatctgcttaaaacccttcatcatgatatcctgtggatttaaaaactctaattccatgttttcttcccatctgccttatatatctcatcaccctgcttatcaatattcagtttgatgagcactattaactaaaatatgaaacttaaaaacaaaagcaagttgtccttaaaagttctttttttaagtaaattgttgacatactgcaaattttctatgcaaacttgcctcctgctgttatctgtgaagctcaggaaatccaaacatttgtgtttcaacaagggacagtaaactgtgtgtttacagccaaaagaaatgcctcatagttcttaacctcaacttttgtagaagtatttttttctctgtaatatttttattggctcataaagatgttttcatatctgaactcctaaataagtgaaattacagtagattatattaacaaaatactttttaggtagccatgcttgagactttttaaaaatataactttttccttaaagttttcagctatagcaaaaggtagttatgtatgccagacctaatatgagctgccaccaacacccctagaactttcagccatggtgtcttcagaattgtagcgcatttctgaatctagcaaatcctccttttacccgttgaatgttttgaatgccctgactctaccagcgcccataaatgatctctagaaggactgttagtaccaatctgtttttcaactttgaagctaaaaaccctgatatggtaatattatggtgcatagcagaggtctcggaaaaaaaatatttctgttcactttactttcaggttaaaaatgtttctaacacgcttgcaacttcccttatggcattaatcttgttgagggagagagacagaatcctggactctccaaagtatttaactgaaagtagggcctgctctgacagggcccatgtcccacaaggctgcttggcctcagtgggtgcttggctgtgctggatgatatgttgatctgtattggataaggaccaatgacagcaaagcaaaaatggctttaaagcttggtgttacttttcttaagttgtttaattatagttaagcaatttcaaaaatgctccaaagaaatgtgaaaggaccttttgtcacagcacttcagaaaatacacaacagccccttctgcccccgcacagaaatgctgcagagtatataaaacttgagacatttttgtaggatgcctgacgaggtgtagccttttatcttgtttccggatgcatatttattacgagtactctggttaaatattgaaaagttatatgctgtagtttttagtattttgtctttgtaatttacagaagttattggagaaaataaacttgtttcattttgcatttctggtgttgatt

SEQ ID NO: 26043 - DNA, 4768 bp, Homo sapiens
  source 1..4768: mol_type = unassigned DNA
atggtgaaggggaagaccaatgagtggaacaagaatgatgaccggctactgcaggccgtggagaatggagatgcggagaaggtggcctcactgctcggcaagaagggggccagtgccaccaaacacgacagtgagggcaagaccgctttccatcttgctgctgcaaaaggacacgtggaatgcctcagggtcatgattacacatggtgtggatgtgacagcccaagatactaccggacacagcgccttacatctcgcagccaagaacagccaccatgaatgcatcaggaagctgcttcagtctaaatgcccagccgaaagtgtcgacagctctgggaaaacagctttacattatgcagcggctcagggctgccttcaagctgtgcagattctctgcgaacacaagagccccataaacctcaaagatttggatgggaatataccgctgcttcttgctgtacaaaatggtcacagtgagatctgtcactttctcctggatcatggagcagatgtcaattccaggaacaaaagtggaagaactgctctcatgctggcctgtgagattggcagctctaacgctgtggaagccttaattaaaaagggtgcagacctaaaccttgtagattctcttggatacaatgccttacattattccaaactctcagaaaatgcaggaattcaaagccttctattatcaaaaatctctcaggatgctgatttaaagaccccaacaaaaccaaagcagcatgaccaagtctctaaaataagctcagaaagaagtggaactccaaaaaaacgcaaagctccaccacctcctatcagtcctacccagttgagtgatgtctcttccccaagatcaataacttcgactccactatcgggaaaggaatcggtattttttgctgaaccacccttcaaggctgagatcagttctatacgagaaaacaaagacagactaagtgacagtactacaggtgctgatagcttattggatataagttctgaagctgaccaacaagatcttctctctctattgcaagcaaaagttgcttcccttaccttacacaataaggagttacaagataaattacaggccaaatcacccaaggaggcggaagcagacctaagctttgactcataccattccacccaaactgacttgggcccatccctgggaaaacctggtgaaacctctcccccagactccaaatcatctccatctgtcttaatacattctttaggtaaatccactactgacaatgatgtcagaattcagcaactgcaagagattttgcaagatctacagaagagattagagagctctgaagcagagagaaaacagctacaggtcgaactccaatcccgaagggcagaactggtatgcttaaacaacactgagatttcagagaacagctctgacctcagccagaaacttaaagaaactcagagcaaatacgaggaggctatgaaagaagtccttagtgtgcagaagcagatgaaactcggtcttgtctcacctgaaagcatggataattattcacatttccacgagctgagggtcacggaagaggaaataaatgtgctaaagcaggatctgcagaatgcattagaagaaagtgaaagaaataaagagaaagtgagagagttagaggaaaaactggtagagagggagaaaggtacagtgattaagccacctgtggaagagtacgaggaaatgaaaagttcatattgctctgttattgagaatatgaataaggagaaagcatttttgtttgagaaataccaagaagcccaagaagaaatcatgaaattaaaagacacactaaaaagtcagatgacacaggaagccagtgatgaagctgaggacatgaaagaagccatgaataggatgatagatgaactcaataaacaggtgagcgagctgtcacagctgtacaaagaagcccaggctgagctggaggattacaggaagaggaaatctctagaggatgtcacagctgaatatatccataaagcagagcatgagaaactgatgcaattgacaaacgtgtccagggctaaagcagaagatgcactgtctgaaatgaagtctcagtattcaaaagtgttgaatgagttgacccagctcaaacaactggtggatgcacaaaaagagaactctgtctctatcacagaacatttgcaagtgataaccacgctgcggactgcagcaaaagagatggaagaaaaaataagcaatcttaaggaacaccttgcaagcaaggaagtggaagtagcaaagctggagaaacaactcttagaagagaaagctgctatgactgatgcaatggtacctcggtcttcctatgaaaaactccagtcatccttagagagtgaagtgagtgtgttggcatcgaaattaaaggaatctgtgaaagagaaagagaaggtccattcagaggttgtccagattagaagtgaggtctcacaggtgaaaagagaaaaggaaaatattcagactctcttgaaatccaaagagcaagaagtaaatgaacttctgcaaaaattccagcaagctcaggaagaacttgcagaaatgaaaagatacgctgagagctcttcaaaactggaggaagataaagataaaaagataaatgagatgtcgaaggaagtcaccaaattgaaggaggccttgaacagcctctcccagctctcctactcaacaagctcatccaaaaggcagagtcagcagctggaggcgctgcagcagcaagtcaaacagctccagaaccagctggcggaatgcaagaaacaacaccaggaggtcatatcagtttacagaatgcatcttctgtatgctgtgcagggccagatggatgaagatgtccagaaagtactgaagcaaatccttaccatgtgtaaaaaccagtctcaaaagaagtaaagtggattccttggcaggacactgccccttgtcatctgtctttgtgttagatccagagttgtcggcagccgctgccattgttctcattcgtggtatgcactgtggcctagcgtagcttcttccctttccaaaggtttctgaggacttctcccaggagaagactgcccgcctcagaactgcttagagacttcaaaccagcagaggtgaaagtccctgtcatcccttcagattccagagctgggatcagccatgcccagaggtctggtcctgatgctggcaggggggccccctcctccatccctgactggctgagtggctttatcaccaccgagtgatgtgctgaggcctcctgcagtgaatgctccttccattcctgtactcgggcagtgccattcagcacaggagagctctttttgcctttggctttcaattccaaaacatgatttaatttctaactaaattagtatggcactagttatgaagtatctgcttaaaacccttcatcatgatatcctgtggatttaaaaactctaattccatgttttcttcccatctgccttatatatctcatcaccctgcttatcaatattcagtttgatgagcactattaactaaaatatgaaacttaaaaacaaaagcaagttgtccttaaaagttctttttttaagtaaattgttgacatactgcaaattttctatgcaaacttgcctcctgctgttatctgtgaagctcaggaaatccaaacatttgtgtttcaacaagggacagtaaactgtgtgtttacagccaaaagaaatgcctcatagttcttaacctcaacttttgtagaagtatttttttctctgtaatatttttattggctcataaagatgttttcatatctgaactcctaaataagtgaaattacagtagattatattaacaaaatactttttaggtagccatgcttgagactttttaaaaatataactttttccttaaagttttcagctatagcaaaaggtagttatgtatgccagacctaatatgagctgccaccaacacccctagaactttcagccatggtgtcttcagaattgtagcgcatttctgaatctagcaaatcctccttttacccgttgaatgttttgaatgccctgactctaccagcgcccataaatgatctctagaaggactgttagtaccaatctgtttttcaactttgaagctaaaaaccctgatatggtaatattatggtgcatagcagaggtctcggaaaaaaaatatttctgttcactttactttcaggttaaaaatgtttctaacacgcttgcaacttcccttatggcattaatcttgttgagggagagagacagaatcctggactctccaaagtatttaactgaaagtagggcctgctctgacagggcccatgtcccacaaggctgcttggcctcagtgggtgcttggctgtgctggatgatatgttgatctgtattggataaggaccaatgacagcaaagcaaaaatggctttaaagcttggtgttacttttcttaagttgtttaattatagttaagcaatttcaaaaatgctccaaagaaatgtgaaaggaccttttgtcacagcacttcagaaaatacacaacagccccttctgcccccgcacagaaatgctgcagagtatataaaacttgagacatttttgtaggatgcctgacgaggtgtagccttttatcttgtttccggatgcatatttattacgagtactctggttaaatattgaaaagttatatgctgtagtttttagtattttgtctttgtaatttacagaagttattggagaaaataaacttgtttcattttgc

SEQ ID NO: 26044 - DNA, 5064 bp, Homo sapiens
  source 1..5064: mol_type = unassigned DNA
gatggggtgagtgcgcggcacggagttgggaggctcccggcgcggggtcccgggctcgtgtccccgcctttgtgtctggagctcgggcgcgggaggcgctggggacggcgcccgggcggagcggctgagcgggctgcagccggggtcccgccacctctccctggtccaccgccggcagcccactgtctgcggagagcagatctggggacaagaggaaggagaggaaggtgttgaaaagtctcctctagagctttggaaggctgaatgcactaaacatgaagagcttgaaagcgaagttcaggaagagtgacaccaatgagtggaacaagaatgatgaccggctactgcaggccgtggagaatggagatgcggagaaggtggcctcactgctcggcaagaagggggccagtgccaccaaacacgacagtgagggcaagaccgctttccatcttgctgctgcaaaaggacacgtggaatgcctcagggtcatgattacacatggtgtggatgtgacagcccaagatactaccggacacagcgccttacatctcgcagccaagaacagccaccatgaatgcatcaggaagctgcttcagtctaaatgcccagccgaaagtgtcgacagctctgggaaaacagctttacattatgcagcggctcagggctgccttcaagctgtgcagattctctgcgaacacaagagccccataaacctcaaagatttggatgggaatataccgctgcttcttgctgtacaaaatggtcacagtgagatctgtcactttctcctggatcatggagcagatgtcaattccaggaacaaaagtggaagaactgctctcatgctggcctgtgagattggcagctctaacgctgtggaagccttaattaaaaagggtgcagacctaaaccttgtagattctcttggatacaatgccttacattattccaaactctcagaaaatgcaggaattcaaagccttctattatcaaaaatctctcaggatgctgatttaaagaccccaacaaaaccaaagcagcatgaccaagtctctaaaataagctcagaaagaagtggaactccaaaaaaacgcaaagctccaccacctcctatcagtcctacccagttgagtgatgtctcttccccaagatcaataacttcgactccactatcgggaaaggaatcggtattttttgctgaaccacccttcaaggctgagatcagttctatacgagaaaacaaagacagactaagtgacagtactacaggtgctgatagcttattggatataagttctgaagctgaccaacaagatcttctctctctattgcaagcaaaagttgcttcccttaccttacacaataaggagttacaagataaattacaggccaaatcacccaaggaggcggaagcagacctaagctttgactcataccattccacccaaactgacttgggcccatccctgggaaaacctggtgaaacctctcccccagactccaaatcatctccatctgtcttaatacattctttaggtaaatccactactgacaatgatgtcagaattcagcaactgcaagagattttgcaagatctacagaagagattagagagctctgaagcagagagaaaacagctacaggtcgaactccaatcccgaagggcagaactggtatgcttaaacaacactgagatttcagagaacagctctgacctcagccagaaacttaaagaaactcagagcaaatacgaggaggctatgaaagaagtccttagtgtgcagaagcagatgaaactcggtcttgtctcacctgaaagcatggataattattcacatttccacgagctgagggtcacggaagaggaaataaatgtgctaaagcaggatctgcagaatgcattagaagaaagtgaaagaaataaagagaaagtgagagagttagaggaaaaactggtagagagggagaaaggtacagtgattaagccacctgtggaagagtacgaggaaatgaaaagttcatattgctctgttattgagaatatgaataaggagaaagcatttttgtttgagaaataccaagaagcccaagaagaaatcatgaaattaaaagacacactaaaaagtcagatgacacaggaagccagtgatgaagctgaggacatgaaagaagccatgaataggatgatagatgaactcaataaacaggtgagcgagctgtcacagctgtacaaagaagcccaggctgagctggaggattacaggaagaggaaatctctagaggatgtcacagctgaatatatccataaagcagagcatgagaaactgatgcaattgacaaacgtgtccagggctaaagcagaagatgcactgtctgaaatgaagtctcagtattcaaaagtgttgaatgagttgacccagctcaaacaactggtggatgcacaaaaagagaactctgtctctatcacagaacatttgcaagtgataaccacgctgcggactgcagcaaaagagatggaagaaaaaataagcaatcttaaggaacaccttgcaagcaaggaagtggaagtagcaaagctggagaaacaactcttagaagagaaagctgctatgactgatgcaatggtacctcggtcttcctatgaaaaactccagtcatccttagagagtgaagtgagtgtgttggcatcgaaattaaaggaatctgtgaaagagaaagagaaggtccattcagaggttgtccagattagaagtgaggtctcacaggtgaaaagagaaaaggaaaatattcagactctcttgaaatccaaagagcaagaagtaaatgaacttctgcaaaaattccagcaagctcaggaagaacttgcagaaatgaaaagatacgctgagagctcttcaaaactggaggaagataaagataaaaagataaatgagatgtcgaaggaagtcaccaaattgaaggaggccttgaacagcctctcccagctctcctactcaacaagctcatccaaaaggcagagtcagcagctggaggcgctgcagcagcaagtcaaacagctccagaaccagctggcggaatgcaagaaacaacaccaggaggtcatatcagtttacagaatgcatcttctgtatgctgtgcagggccagatggatgaagatgtccagaaagtactgaagcaaatccttaccatgtgtaaaaaccagtctcaaaagaagtaaagtggattccttggcaggacactgccccttgtcatctgtctttgtgttagatccagagttgtcggcagccgctgccattgttctcattcgtggtatgcactgtggcctagcgtagcttcttccctttccaaaggtttctgaggacttctcccaggagaagactgcccgcctcagaactgcttagagacttcaaaccagcagaggtgaaagtccctgtcatcccttcagattccagagctgggatcagccatgcccagaggtctggtcctgatgctggcaggggggccccctcctccatccctgactggctgagtggctttatcaccaccgagtgatgtgctgaggcctcctgcagtgaatgctccttccattcctgtactcgggcagtgccattcagcacaggagagctctttttgcctttggctttcaattccaaaacatgatttaatttctaactaaattagtatggcactagttatgaagtatctgcttaaaacccttcatcatgatatcctgtggatttaaaaactctaattccatgttttcttcccatctgccttatatatctcatcaccctgcttatcaatattcagtttgatgagcactattaactaaaatatgaaacttaaaaacaaaagcaagttgtccttaaaagttctttttttaagtaaattgttgacatactgcaaattttctatgcaaacttgcctcctgctgttatctgtgaagctcaggaaatccaaacatttgtgtttcaacaagggacagtaaactgtgtgtttacagccaaaagaaatgcctcatagttcttaacctcaacttttgtagaagtatttttttctctgtaatatttttattggctcataaagatgttttcatatctgaactcctaaataagtgaaattacagtagattatattaacaaaatactttttaggtagccatgcttgagactttttaaaaatataactttttccttaaagttttcagctatagcaaaaggtagttatgtatgccagacctaatatgagctgccaccaacacccctagaactttcagccatggtgtcttcagaattgtagcgcatttctgaatctagcaaatcctccttttacccgttgaatgttttgaatgccctgactctaccagcgcccataaatgatctctagaaggactgttagtaccaatctgtttttcaactttgaagctaaaaaccctgatatggtaatattatggtgcatagcagaggtctcggaaaaaaaatatttctgttcactttactttcaggttaaaaatgtttctaacacgcttgcaacttcccttatggcattaatcttgttgagggagagagacagaatcctggactctccaaagtatttaactgaaagtagggcctgctctgacagggcccatgtcccacaaggctgcttggcctcagtgggtgcttggctgtgctggatgatatgttgatctgtattggataaggaccaatgacagcaaagcaaaaatggctttaaagcttggtgttacttttcttaagttgtttaattatagttaagcaatttcaaaaatgctccaaagaaatgtgaaaggaccttttgtcacagcacttcagaaaatacacaacagccccttctgcccccgcacagaaatgctgcagagtatataaaacttgagacatttttgtaggatgcctgacgaggtgtagccttttatcttgtttccggatgcatatttattacgagtactctggttaaatattgaaaagttatatgctgtagtttttagtattttgtctttgtaatttacagaagttattggagaaaataaacttgtttcattttgc

SEQ ID NO: 26045 - DNA, 3339 bp, Homo sapiens
  source 1..3339: mol_type = unassigned DNA
actcccgctgaggctgggaagattgaaaggggccatggagaggctgcagtcacaatgaggcctccagattcatgtcatcaaagtgcttcatgatgactggattttcacaccatttatccaagggccctagtcaatggcagcagcaagaatgaaagtagacacattggaagctagagagtcactgggtgacttttggaggtagcaacaagctcatgaagaaggcattcagtggcttgcactccccacccatcctctcaactacatgcgaagttttcacatcttgtacatttccaaatttaatgaaaaaggtgttgaaaagtctcctctagagctttggaaggctgaatgcactaaacatgaagagcttgaaagcgaagttcaggaagagtgacaccaatgagtggaacaagaatgatgaccggctactgcaggccgtggagaatggagatgcggagaaggtggcctcactgctcggcaagaagggggccagtgccaccaaacacgacagtgagggcaagaccgctttccatcttgctgctgcaaaaggacacgtggaatgcctcagggtcatgattacacatggtgtggatgtgacagcccaagatactaccggacacagcgccttacatctcgcagccaagaacagccaccatgaatgcatcaggaagctgcttcagtctaaatgcccagccgaaagtgtcgacagctctgggaaaacagctttacattatgcagcggctcagggctgccttcaagctgtgcagattctctgcgaacacaagagccccataaacctcaaagatttggatgggaatataccgctgcttcttgctgtacaaaatggtcacagtgagatctgtcactttctcctggatcatggagcagatgtcaattccaggaacaaaagtggaagaactgctctcatgctggcctgtgagattggcagctctaacgctgtggaagccttaattaaaaagggtgcagacctaaaccttgtagattctcttggatacaatgccttacattattccaaactctcagaaaatgcaggaattcaaagccttctattatcaaaaatctctcaggatgctgatttaaagaccccaacaaaaccaaagcagcatgaccaagtctctaaaataagctcagaaagaagtggaactccaaaaaaacgcaaagctccaccacctcctatcagtcctacccagttgagtgatgtctcttccccaagatcaataacttcgactccactatcgggaaaggaatcggtattttttgctgaaccacccttcaaggctgagatcagttctatacgagaaaacaaagacagactaagtgacagtactacaggtgctgatagcttattggatataagttctgaagctgaccaacaagatcttctctctctattgcaagcaaaagttgcttcccttaccttacacaataaggagttacaagataaattacaggccaaatcacccaaggaggcggaagcagacctaagctttgactcataccattccacccaaactgacttgggcccatccctgggaaaacctggtgaaacctctcccccagactccaaatcatctccatctgtcttaatacattctttaggtaaatccactactgacaatgatgtcagaattcagcaactgcaagagattttgcaagatctacagaagagattagagagctctgaagcagagagaaaacagctacaggtcgaactccaatcccgaagggcagaactggtatgcttaaacaacactgagatttcagagaacagctctgacctcagccagaaacttaaagaaactcagagcaaatacgaggaggctatgaaagaagtccttagtgtgcagaagcagatgaaactcggtcttgtctcacctgaaagcatggataattattcacatttccacgagctgagggtcacggaagaggaaataaatgtgctaaagcaggatctgcagaatgcattagaagaaagtgaaagaaataaagagaaagtgagagagttagaggaaaaactggtagagagggagaaaggtacagtgattaagccacctgtggaagagtacgaggaaatgaaaagttcatattgctctgttattgagaatatgaataaggagaaagcatttttgtttgagaaataccaagaagcccaagaagaaatcatgaaattaaaagacacactaaaaagtcagatgacacaggaagccagtgatgaagctgaggacatgaaagaagccatgaataggatgatagatgaactcaataaacaggtgagcgagctgtcacagctgtacaaagaagcccaggctgagctggaggattacaggaagaggaaatctctagaggatgtcacagctgaatatatccataaagcagagcatgagaaactgatgcaattgacaaacgtgtccagggctaaagcagaagatgcactgtctgaaatgaagtctcagtattcaaaagtgttgaatgagttgacccagctcaaacaactggtggatgcacaaaaagagaactctgtctctatcacagaacatttgcaagtgataaccacgctgcggactgcagcaaaagagatggaagaaaaaataagcaatcttaaggaacaccttgcaagcaaggaagtggaagtagcaaagctggagaaacaactcttagaagagaaagctgctatgactgatgcaatggtacctcggtcttcctatgaaaaactccagtcatccttagagagtgaagtgagtgtgttggcatcgaaattaaaggaatctgtgaaagagaaagagaaggtccattcagaggttgtccagattagaagtgaggtctcacaggtgaaaagagaaaaggaaaatattcagactctcttgaaatccaaagagcaagaagtaaatgaacttctgcaaaaattccagcaagctcaggaagaacttgcagaaatgaaaagatacgctgagagctcttcaaaactggaggaagataaagataaaaagataaatgagatgtcgaaggaagtcaccaaattgaaggaggccttgaacagcctctcccagctctcctactcaacaagctcatccaaaaggcagagtcagcagctggaggcgctgcagcagcaagtcaaacagctccagaaccagctggcggaatgcaagaaacaacaccaggaggtcatatcagtttacagaatgcatcttctgtatgctgtgcagggccagatggatgaagatgtccagaaagtactgaagcaaatccttaccatgtgtaaaaaccagtctcaaaagaagtaaagtggattccttggcaggacactgccccttgtcatctgtc

SEQ ID NO: 26046 - DNA, 630 bp, Homo sapiens
  source 1..630: mol_type = unassigned DNA
aagattgaaaggggccatggagaggctgcagtcacaatgaggcctccagattcatgtcatcaaagtgcttcatgatgactggattttcacaccatttatccaagggccctagtcaatggcagcagcaagaatgaaagtagacacattggaagctagagagtcactgggtgacttttggaggtagcaacaagctcatgaagaaggcattcagtggcttgcactccccacccatcctctcaagtgttgaaaagtctcctctagagctttggaaggctgaatgcactaaacatgaagagcttgaaagcgaagttcaggaagagtgacaccaatgagtggaacaagaatgatgaccggctactgcaggccgtggagaatggagatgcggagaaggtggcctcactgctcggcaagaagggggccagtgccaccaaacacgacagtgagggcaagaccgctttccatcttgctgctgcaaaaggacacgtggaatgcctcagggtcatgattacacatggtgtggatgtgacagcccaagatactaccggacacagcgccttacatctcgcagccaagaacagccaccatgaatgcatcaggaagctgcttcagtctaaatgcccagccgaaagt

SEQ ID NO: 26047 - DNA, 3091 bp, Homo sapiens
  source 1..3091: mol_type = unassigned DNA
gggagaaaaacatagcagaggggttgtacacgataatatttttttaaaaggtcaccccataaacccttctatgatcccagtcttgtattagctgcattccagatactttgagcagagttgtggagtgggagaaattaatggaagggaattagatggaagccaagaccaatgagtggaacaagaatgatgaccggctactgcaggccgtggagaatggagatgcggagaaggtggcctcactgctcggcaagaagggggccagtgccaccaaacacgacagtgagggcaagaccgctttccatcttgctgctgcaaaaggacacgtggaatgcctcagggtcatgattacacatggtgtggatgtgacagcccaagatactaccggacacagcgccttacatctcgcagccaagaacagccaccatgaatgcatcaggaagctgcttcagtctaaatgcccagccgaaagtgtcgacagctctgggaaaacagctttacattatgcagcggctcagggctgccttcaagctgtgcagattctctgcgaacacaagagccccataaacctcaaagatttggatgggaatataccgctgcttcttgctgtacaaaatggtcacagtgagatctgtcactttctcctggatcatggagcagatgtcaattccaggaacaaaagtggaagaactgctctcatgctggcctgtgagattggcagctctaacgctgtggaagccttaattaaaaagggtgcagacctaaaccttgtagattctcttggatacaatgccttacattattccaaactctcagaaaatgcaggaattcaaagccttctattatcaaaaatctctcaggatgctgatttaaagaccccaacaaaaccaaagcagcatgaccaagtctctaaaataagctcagaaagaagtggaactccaaaaaaacgcaaagctccaccacctcctatcagtcctacccagttgagtgatgtctcttccccaagatcaataacttcgactccactatcgggaaaggaatcggtattttttgctgaaccacccttcaaggctgagatcagttctatacgagaaaacaaagacagactaagtgacagtactacaggtgctgatagcttattggatataagttctgaagctgaccaacaagatcttctctctctattgcaagcaaaagttgcttcccttaccttacacaataaggagttacaagataaattacaggccaaatcacccaaggaggcggaagcagacctaagctttgactcataccattccacccaaactgacttgggcccatccctgggaaaacctggtgaaacctctcccccagactccaaatcatctccatctgtcttaatacattctttaggtaaatccactactgacaatgatgtcagaattcagcaactgcaagagattttgcaagatctacagaagagattagagagctctgaagcagagagaaaacagctacaggtcgaactccaatcccgaagggcagaactggtatgcttaaacaacactgagatttcagagaacagctctgacctcagccagaaacttaaagaaactcagagcaaatacgaggaggctatgaaagaagtccttagtgtgcagaagcagatgaaactcggtcttgtctcacctgaaagcatggataattattcacatttccacgagctgagggtcacggaagaggaaataaatgtgctaaagcaggatctgcagaatgcattagaagaaagtgaaagaaataaagagaaagtgagagagttagaggaaaaactggtagagagggagaaaggtacagtgattaagccacctgtggaagagtacgaggaaatgaaaagttcatattgctctgttattgagaatatgaataaggagaaagcatttttgtttgagaaataccaagaagcccaagaagaaatcatgaaattaaaagacacactaaaaagtcagatgacacaggaagccagtgatgaagctgaggacatgaaagaagccatgaataggatgatagatgaactcaataaacaggtgagcgagctgtcacagctgtacaaagaagcccaggctgagctggaggattacaggaagaggaaatctctagaggatgtcacagctgaatatatccataaagcagagcatgagaaactgatgcaattgacaaacgtgtccagggctaaagcagaagatgcactgtctgaaatgaagtctcagtattcaaaagtgttgaatgagttgacccagctcaaacaactggtggatgcacaaaaagagaactctgtctctatcacagaacatttgcaagtgataaccacgctgcggactgcagcaaaagagatggaagaaaaaataagcaatcttaaggaacaccttgcaagcaaggaagtggaagtagcaaagctggagaaacaactcttagaagagaaagctgctatgactgatgcaatggtacctcggtcttcctatgaaaaactccagtcatccttagagagtgaagtgagtgtgttggcatcgaaattaaaggaatctgtgaaagagaaagagaaggtccattcagaggttgtccagattagaagtgaggtctcacaggtgaaaagagaaaaggaaaatattcagactctcttgaaatccaaagagcaagaagtaaatgaacttctgcaaaaattccagcaagctcaggaagaacttgcagaaatgaaaagatacgctgagagctcttcaaaactggaggaagataaagataaaaagataaatgagatgtcgaaggaagtcaccaaattgaaggaggccttgaacagcctctcccagctctcctactcaacaagctcatccaaaaggcagagtcagcagctggaggcgctgcagcagcaagtcaaacagctccagaaccagctggcggaatgcaagaaacaacaccaggaggtcatatcagtttacagaatgcatcttctgtatgctgtgcagggccagatggatgaagatgtccagaaagtactgaagcaaatccttaccatgtgtaaaaaccagtctcaaaagaagtaaagtggattccttggcaggac

SEQ ID NO: 26048 - DNA, 579 bp, Homo sapiens
  source 1..579: mol_type = unassigned DNA
gttgctacttctgtgaaatgaggcacttagactagatgagcaatcttgacttttgaagggtggcaactaccttgtagaatccagtgaaaactcagaaccttcctccctgaaaaatgtgttgaaaagtctcctctagagctttggaaggctgaatgcactaaacatgaagagcttgaaagcgaagttcaggaagagtgacaccaatgagtggaacaagaatgatgaccggctactgcaggccgtggagaatggagatgcggagaaggtggcctcactgctcggcaagaagggggccagtgccaccaaacacgacagtgagggcaagaccgctttccatcttgctgctgcaaaaggacacgtggaatgcctcagggtcatgattacacatggtgtggatgtgacagcccaagatactaccggacacagcgccttacatctcgcagccaagaacagccaccatgaatgcatcaggaagctgcttcagtctaaatgcccagccgaaagtgtcgacagctctgggaaaacagctttacattatgcagcggctcagggctgccttcaagctgtgcagattctctg

SEQ ID NO: 26049 - DNA, 542 bp, Homo sapiens
  source 1..542: mol_type = unassigned DNA
aaaggggccatggagaggctgcagtcacaatgaggcctccagattcatgtcatcaaagtgcttcatgatgactggattttcacaccatttatccaagggccctagtcaatggcagcagcaagaatgaaagtagacacattggaagctagagagtcactgggtgacttttggaggtgttgaaaagtctcctctagagctttggaaggctgaatgcactaaacatgaagagcttgaaagcgaagttcaggaagagtgacaccaatgagtggaacaagaatgatgaccggctactgcaggccgtggagaatggagatgcggagaaggtggcctcactgctcggcaagaagggggccagtgccaccaaacacgacagtgagggcaagaccgctttccatcttgctgctgcaaaaggacacgtggaatgcctcagggtcatgattacacatggtgtggatgtgacagcccaagatactaccggacacagcgccttacatctcgcagccaagaacagccaccatgaatgcatcaggaagctgcttcag

SEQ ID NO: 26050 - DNA, 554 bp, Homo sapiens
  source 1..554: mol_type = unassigned DNA
aaggatgcagcgtttcagttaagaggaatagatgaagagatctattgtacaacatggtgttgaaaagtctcctctagagctttggaaggctgaatgcactaaacatgaagagcttgaaagcgaagttcaggaagagtgacaccaatgagtggaacaagaatgatgaccggctactgcaggccgtggagaatggagatgcggagaaggtggcctcactgctcggcaagaagggggccagtgccaccaaacacgacagtgagggcaagaccgctttccatcttgctgctgcaaaaggacacgtggaatgcctcagggtcatgattacacatggtgtggatgtgacagcccaagatactaccggacacagcgccttacatctcgcagccaagaacagccaccatgaatgcatcaggaagctgcttcagtctaaatgcccagccgaaagtgtcgacagctctgggaaaacagctttacattatgcagcggctcagggctgccttcaagctgtgcagattctctgcgaacacaagagccccataaacctcaaagatttg

SEQ ID NO: 26051 - DNA, 548 bp, Homo sapiens
  source 1..548: mol_type = unassigned DNA
agcagccagctgggtccggggagcgccgccgccgcctcgatggggtaacctctaatgtgaagttagcgcacacagttctcaagcatgtttggaactacactgtatccacaaaaaaatacatgtgttgaaaagtctcctctagagctttggaaggctgaatgcactaaacatgaagagcttgaaagcgaagttcaggaagagtgacaccaatgagtggaacaagaatgatgaccggctactgcaggccgtggagaatggagatgcggagaaggtggcctcactgctcggcaagaagggggccagtgccaccaaacacgacagtgagggcaagaccgctttccatcttgctgctgcaaaaggacacgtggaatgcctcagggtcatgattacacatggtgtggatgtgacagcccaagatactaccggacacagcgccttacatctcgcagccaagaacagccaccatgaatgcatcaggaagctgcttcagtctaaatgcccagccgaaagtgtcgacagctctgggaaaacagctttacattatgcag

SEQ ID NO: 26052 - DNA, 575 bp, Homo sapiens
  source 1..575: mol_type = unassigned DNA
atggagaggctgcagtcacaatgaggcctccagattcatgtcatcaaagtgcttcatgatgactggattttcacaccatttatccaagggccctagtcaatggcagcagcaagaatgaaagtagacacattggaagctagagagtcactgggtgacttttggagctacatgcgaagttttcacatcttgtacatttccaaatttaatgaaaaaggtgttgaaaagtctcctctagagctttggaaggctgaatgcactaaacatgaagagcttgaaagcgaagttcaggaagagtgacaccaatgagtggaacaagaatgatgaccggctactgcaggccgtggagaatggagatgcggagaaggtggcctcactgctcggcaagaagggggccagtgccaccaaacacgacagtgagggcaagaccgctttccatcttgctgctgcaaaaggacacgtggaatgcctcagggtcatgattacacatggtgtggatgtgacagcccaagatactaccggacacagcgccttacatctcgcagccaagaacagccaccatgaatgcatcaggaagc

SEQ ID NO: 26053 - DNA, 660 bp, Homo sapiens
  source 1..660: mol_type = unassigned DNA
cgcgttttcctggggaagcggcgggcggggtggagcagccagctgggtccggggagcgccgccgccgcctcgatggggatctcgctctgtcccttaggctggagtgcagtggtgcaatcttagctcaccgcagccttgacctcctgggctcaagcagtcctcccaccttagcctccctggagctggcactacaggtgttgaaaagtctcctctagagctttggaaggctgaatgcactaaacatgaagagcttgaaagcgaagttcaggaagagtgacaccaatgagtggaacaagaatgatgaccggctactgcaggccgtggagaatggagatgcggagaaggtggcctcactgctcggcaagaagggggccagtgccaccaaacacgacagtgagggcaagaccgctttccatcttgctgctgcaaaaggacacgtggaatgcctcagggtcatgattacacatggtgtggatgtgacagcccaagatactaccggacacagcgccttacatctcgcagccaagaacagccaccatgaatgcatcaggaagctgcttcagtctaaatgcccagccgaaagtgtcgacagctctgggaaaacagctttacattatgcagcggctcagggctgccttcaagctgtgcagattctctgcg

SEQ ID NO: 26054 - DNA, 542 bp, Homo sapiens
  source 1..542: mol_type = unassigned DNA
gagatgcaccctggagtctgcgccgggtcccacctgtttcgccccgcgcggcgcctcgctgcccccgcgtcggtgctgctgagcccaatccgcctcccggctgaacttggaggaggtgttgaaaagtctcctctagagctttggaaggctgaatgcactaaacatgaagagcttgaaagcgaagttcaggaagagtgacaccaatgagtggaacaagaatgatgaccggctactgcaggccgtggagaatggagatgcggagaaggtggcctcactgctcggcaagaagggggccagtgccaccaaacacgacagtgagggcaagaccgctttccatcttgctgctgcaaaaggacacgtggaatgcctcagggtcatgattacacatggtgtggatgtgacagcccaagatactaccggacacagcgccttacatctcgcagccaagaacagccaccatgaatgcatcaggaagctgcttcagtctaaatgcccagccgaaagtgtcgacagctctgggaaaacagctttacattatgcag

SEQ ID NO: 26055 - DNA, 3486 bp, Homo sapiens
  source 1..3486: mol_type = unassigned DNA
ggagaggctgcagtcacaatgaggcctccagattcatgtcatcaaagtgcttcatgatgactggattttcacaccatttatccaagggccctagtcaatggcagcagcaagaatgaaagtagacacattggaagctagagagtcactgggtgacttttggaggtagcaacaagctcatgaagaaggcattcagtggcttgcactccccacccatcctctcaactacatgcgaagttttcacatcttgtacatttccaaatttaatgaaaaaggtgttgaaaagtctcctctagagctttggaaggctgaatgcactaaacatgaagagcttgaaagcgaagttcaggaagagtgacgtaaattaaataaaactcatagagtgcaaagagacttcgacaaagacagaaaactagctgttggccagagtgaaagtcctggtcatccgacttccgagaaacctccttcaacctcatcgtctgctggctgtatgttatgcagcctacatatctcccgtggctttcagctaaggagaaaaagaccaatgagtggaacaagaatgatgaccggctactgcaggccgtggagaatggagatgcggagaaggtggcctcactgctcggcaagaagggggccagtgccaccaaacacgacagtgagggcaagaccgctttccatcttgctgctgcaaaaggacacgtggaatgcctcagggtcatgattacacatggtgtggatgtgacagcccaagatactaccggacacagcgccttacatctcgcagccaagaacagccaccatgaatgcatcaggaagctgcttcagtctaaatgcccagccgaaagtgtcgacagctctgggaaaacagctttacattatgcagcggctcagggctgccttcaagctgtgcagattctctgcgaacacaagagccccataaacctcaaagatttggatgggaatataccgctgcttcttgctgtacaaaatggtcacagtgagatctgtcactttctcctggatcatggagcagatgtcaattccaggaacaaaagtggaagaactgctctcatgctggcctgtgagattggcagctctaacgctgtggaagccttaattaaaaagggtgcagacctaaaccttgtagattctcttggatacaatgccttacattattccaaactctcagaaaatgcaggaattcaaagccttctattatcaaaaatctctcaggatgctgatttaaagaccccaacaaaaccaaagcagcatgaccaagtctctaaaataagctcagaaagaagtggaactccaaaaaaacgcaaagctccaccacctcctatcagtcctacccagttgagtgatgtctcttccccaagatcaataacttcgactccactatcgggaaaggaatcggtattttttgctgaaccacccttcaaggctgagatcagttctatacgagaaaacaaagacagactaagtgacagtactacaggtgctgatagcttattggatataagttctgaagctgaccaacaagatcttctctctctattgcaagcaaaagttgcttcccttaccttacacaataaggagttacaagataaattacaggccaaatcacccaaggaggcggaagcagacctaagctttgactcataccattccacccaaactgacttgggcccatccctgggaaaacctggtgaaacctctcccccagactccaaatcatctccatctgtcttaatacattctttaggtaaatccactactgacaatgatgtcagaattcagcaactgcaagagattttgcaagatctacagaagagattagagagctctgaagcagagagaaaacagctacaggtcgaactccaatcccgaagggcagaactggtatgcttaaacaacactgagatttcagagaacagctctgacctcagccagaaacttaaagaaactcagagcaaatacgaggaggctatgaaagaagtccttagtgtgcagaagcagatgaaactcggtcttgtctcacctgaaagcatggataattattcacatttccacgagctgagggtcacggaagaggaaataaatgtgctaaagcaggatctgcagaatgcattagaagaaagtgaaagaaataaagagaaagtgagagagttagaggaaaaactggtagagagggagaaaggtacagtgattaagccacctgtggaagagtacgaggaaatgaaaagttcatattgctctgttattgagaatatgaataaggagaaagcatttttgtttgagaaataccaagaagcccaagaagaaatcatgaaattaaaagacacactaaaaagtcagatgacacaggaagccagtgatgaagctgaggacatgaaagaagccatgaataggatgatagatgaactcaataaacaggtgagcgagctgtcacagctgtacaaagaagcccaggctgagctggaggattacaggaagaggaaatctctagaggatgtcacagctgaatatatccataaagcagagcatgagaaactgatgcaattgacaaacgtgtccagggctaaagcagaagatgcactgtctgaaatgaagtctcagtattcaaaagtgttgaatgagttgacccagctcaaacaactggtggatgcacaaaaagagaactctgtctctatcacagaacatttgcaagtgataaccacgctgcggactgcagcaaaagagatggaagaaaaaataagcaatcttaaggaacaccttgcaagcaaggaagtggaagtagcaaagctggagaaacaactcttagaagagaaagctgctatgactgatgcaatggtacctcggtcttcctatgaaaaactccagtcatccttagagagtgaagtgagtgtgttggcatcgaaattaaaggaatctgtgaaagagaaagagaaggtccattcagaggttgtccagattagaagtgaggtctcacaggtgaaaagagaaaaggaaaatattcagactctcttgaaatccaaagagcaagaagtaaatgaacttctgcaaaaattccagcaagctcaggaagaacttgcagaaatgaaaagatacgctgagagctcttcaaaactggaggaagataaagataaaaagataaatgagatgtcgaaggaagtcaccaaattgaaggaggccttgaacagcctctcccagctctcctactcaacaagctcatccaaaaggcagagtcagcagctggaggcgctgcagcagcaagtcaaacagctccagaaccagctggcggaatgcaagaaacaacaccaggaggtcatatcagtttacagaatgcatcttctgtatgctgtgcagggccagatggatgaagatgtccagaaagtactgaagcaaatccttaccatgtgtaaaaaccagtctcaaaagaagtaaagtggattccttggcaggacactgccccttgtcatctgtctt

SEQ ID NO: 26056 - DNA, 2941 bp, Homo sapiens
  source 1..2941: mol_type = unassigned DNA
agctgggtccggggagcgccgccgccgcctcgatggggtgttgaaaagtctcctctagagctttggaaggctgaatgcactaaacatgaagagcttgaaagcgaagttcaggaagagtgacaccaatgagtggaacaagaatgatgaccggctactgcaggccgtggagaatggagatgcggagaaggtggcctcactgctcggcaagaagggggccagtgccaccaaacacgacagtgagggcaagaccgctttccatcttgctgctgcaaaaggacacgtggaatgcctcagggtcatgattacacatggtgtggatgtgacagcccaagatactaccggacacagcgccttacatctcgcagccaagaacagccaccatgaatgcatcaggaagctgcttcagtctaaatgcccagccgaaagtgtcgacagctctgggaaaacagctttacattatgcagcggctcagggctgccttcaagctgtgcagattctctgcgaacacaagagccccataaacctcaaagatttggatgggaatataccgctgcttcttgctgtacaaaatggtcacagtgagatctgtcactttctcctggatcatggagcagatgtcaattccaggaacaaaagtggaagaactgctctcatgctggcctgtgagattggcagctctaacgctgtggaagccttaattaaaaagggtgcagacctaaaccttgtagattctcttggatacaatgccttacattattccaaactctcagaaaatgcaggaattcaaagccttctattatcaaaaatctctcaggatgctgatttaaagaccccaacaaaaccaaagcagttgagtgatgtctcttccccaagatcaataacttcgactccactatcgggaaaggaatcggtattttttgctgaaccacccttcaaggctgagatcagttctatacgagaaaacaaagacagactaagtgacagtactacaggtgctgatagcttattggatataagttctgaagctgaccaacaagatcttctctctctattgcaagcaaaagttgcttcccttaccttacacaataaggagttacaagataaattacaggccaaatcacccaaggaggcggaagcagacctaagctttgactcataccattccacccaaactgacttgggcccatccctgggaaaacctggtgaaacctctcccccagactccaaatcatctccatctgtcttaatacattctttaggtaaatccactactgacaatgatgtcagaattcagcaactgcaagagattttgcaagatctacagaagagattagagagctctgaagcagagagaaaacagctacaggtcgaactccaatcccgaagggcagaactggtatgcttaaacaacactgagatttcagagaacagctctgacctcagccagaaacttaaagaaactcagagcaaatacgaggaggctatgaaagaagtccttagtgtgcagaagcagatgaaactcggtcttgtctcacctgaaagcatggataattattcacatttccacgagctgagggtcacggaagaggaaataaatgtgctaaagcaggatctgcagaatgcattagaagaaagtgaaagaaataaagagaaagtgagagagttagaggaaaaactggtagagagggagaaaggtacagtgattaagccacctgtggaagagtacgaggaaatgaaaagttcatattgctctgttattgagaatatgaataaggagaaagcatttttgtttgagaaataccaagaagcccaagaagaaatcatgaaattaaaagacacactaaaaagtcagatgacacaggaagccagtgatgaagctgaggacatgaaagaagccatgaataggatgatagatgaactcaataaacaggtgagcgagctgtcacagctgtacaaagaagcccaggctgagctggaggattacaggaagaggaaatctctagaggatgtcacagctgaatatatccataaagcagagcatgagaaactgatgcaattgacaaacgtgtccagggctaaagcagaagatgcactgtctgaaatgaagtctcagtattcaaaagtgttgaatgagttgacccagctcaaacaactggtggatgcacaaaaagagaactctgtctctatcacagaacatttgcaagtgataaccacgctgcggactgcagcaaaagagatggaagaaaaaataagcaatcttaaggaacaccttgcaagcaaggaagtggaagtagcaaagctggagaaacaactcttagaagagaaagctgctatgactgatgcaatggtacctcggtcttcctatgaaaaactccagtcatccttagagagtgaagtgagtgtgttggcatcgaaattaaaggaatctgtgaaagagaaagagaaggtccattcagaggttgtccagattagaagtgaggtctcacaggtgaaaagagaaaaggaaaatattcagactctcttgaaatccaaagagcaagaagtaaatgaacttctgcaaaaattccagcaagctcaggaagaacttgcagaaatgaaaagatacgctgagagctcttcaaaactggaggaagataaagataaaaagataaatgagatgtcgaaggaagtcaccaaattgaaggaggccttgaacagcctctcccagctctcctactcaacaagctcatccaaaaggcagagtcagcagctggaggcgctgcagcagcaagtcaaacagctccagaaccagctggcggaatgcaagaaacaacaccaggaggtcatatcagtttacagaatgcatcttctgtatgctgtgcagggccagatggatgaagatgtccagaaagtactgaagcaaatccttaccatgtgtaaaaaccagtctcaaaagaagtaa

SEQ ID NO: 26057 - DNA, 2317 bp, Homo sapiens
  source 1..2317: mol_type = unassigned DNA
agcgactcggtgacagcggcgacggcggctcccaccgcggcgcacccccttcaggcggccggcggcgaggccagaccggagagttccagcacactcgaccaccccgcggcttcctggaggcggcggccgcgattgcgaggcttcccaggaagaatgaagcagtcaacttgcataaggcctgtcttgacttctctcctttgggggaagaggatcacattaagaagggtggcaggcttgcctggacacagaattccactaccaaacagacatcatttctgagaacttcagagtttatgatccaggtttcccagtgattaaattactccttggaaggccaagtggcatcagagctgagtgatggacgacctgcagtcccagaacctctccatggacatgactgactcccctcctgccttggctaataacagactggagaatggcatggctcagctgatcaccaccgaggcctggaacatcaactccactgacctggtaaagaaggccctggtgaccgtgccagccccatccattctgaacccccctgccgagtctcagagtggcatggctctgaaggtggcggccactgtgttgcagcccctgtgcctcggggagagcccagtggtgatgcccattcacatgcaggtggagggaagctccgcaccagagctcaatccgaatggcaatgccacctacgtcatgaccacccagggccccgtgcaactgcccgtggtgctggagcagcacgtctttcagcacctcaactcccctctggtcctgccgcaggaggccccatgctcctccagtaccatccacaacaacctcttccagggagcggaggaccccgaggcccagccccagctcctggacctgaggatccccagccagccgcaggagcccactttgccatttgaagctgtgctccagaatttgtttccctcccagggcactctcgggcccccaccctgtcagcctcctcctggctatgcccctgtgcccccacagccttttagctcccccttgtcccccctggtcccaccagccaccctcttggtgccgtatcctgtaatcgtccccttgcctgtgccagtccctattcccatccccatcccgatgcctcagagttctgaatccaagttcagctccagtttccccaagccaccatcttccttcggcctgcacccctttaaaggcacccagacccctctggaaaaagatgaactgaagccctttgacatcctccagcctaaggagtacttccagctcagccgccacacggtcattaagatgggaagtgagaacgaggccctggatctctccatgaagtcagtgccctggctcaaggctggtgaagtcagtcccccaatcttccaggaagatgcagccctagacctgtcagtggcagcccaccggaaatccgagcctccccctgagacactgtatgacagtggtgcatcagtggacagctcaggtcacacagtgatggagaaacttcccagtggcatggaaatttcttttgcccctgccacgtcccatgaggccccagccatgatggatagtcacatcagcagcagtgatgctgctaccgagatgctcagccagcccaaccaccccagcggcgaagtcaaggctgaaaataacattgagatggtgggcgagtcccaggcggccaaggtcattgtctctgtcgaagatgctgtgcctaccatattctgtggcaagatcaaaggcctctcaggggtgtccaccaaaaacttctccttcaaaagagaagactccgtgcttcagggctatgacatcaacagccaaggggaagagtccatgggaaatgcagagccccttaggaaacccatcaaaaaccggagcataaagttaaagaaagtgaactcccaggaaatacacatgctcccaatcaaaaaacaacggctggccaccttttttccaagaaagtaaataacggctttttaaaatttgtatgattataatatggggaaaggtgcattggttttataaaaaggcatttaaaacaaattatctttgttaattattttggggagtagttgggaaatggaaaggtgaattggctctagaggccctgtatgctagtatcattttcttttttaatttttgacttttcacaaatgagtaaataagagcaacctatttttcaagcagattgcacattttttgcagctttaatggaatattgggtgaattagaggggtaaaaaaagctattttcattgccacaaagtgctttgatgatgtaatacctaataaagggtaggatgaatatttcacaataaatgtttgtttgcact

SEQ ID NO: 26058 - DNA, 2377 bp, Homo sapiens
  source 1..2377: mol_type = unassigned DNA
ggcaccgcaccgggcagtctccggatctgccgttctgccccggcccggaaaacccggcgccttccaggcccttcgaaagatggattctgttgacgtatctggcggccctggcgagcctggtggaaagttgggttttgccagattgcgccgggctcctctttgtgacgcgcggccagccccgcatcccccccggagccgggcttcccaggaagaatgaagcagtcaacttgcataaggcctgtcttgacttctctcctttgggggaagaggatcacattaagaagggtggcaggcttgcctggacacagaattccactaccaaacagacatcatttctgagaacttcagagtttatgatccaggtttcccagtgattaaattactccttggaaggccaagtggcatcagagctgagtgatggacgacctgcagtcccagaacctctccatggacatgactgactcccctcctgccttggctaataacagactggagaatggcatggctcagctgatcaccaccgaggcctggaacatcaactccactgacctggtaaagaaggccctggtgaccgtgccagccccatccattctgaacccccctgccgagtctcagagtggcatggctctgaaggtggcggccactgtgttgcagcccctgtgcctcggggagagcccagtggtgatgcccattcacatgcaggtggagggaagctccgcaccagagctcaatccgaatggcaatgccacctacgtcatgaccacccagggccccgtgcaactgcccgtggtgctggagcagcacgtctttcagcacctcaactcccctctggtcctgccgcaggaggccccatgctcctccagtaccatccacaacaacctcttccagggagcggaggaccccgaggcccagccccagctcctggacctgaggatccccagccagccgcaggagcccactttgccatttgaagctgtgctccagaatttgtttccctcccagggcactctcgggcccccaccctgtcagcctcctcctggctatgcccctgtgcccccacagccttttagctcccccttgtcccccctggtcccaccagccaccctcttggtgccgtatcctgtaatcgtccccttgcctgtgccagtccctattcccatccccatcccgatgcctcagagttctgaatccaagttcagctccagtttccccaagccaccatcttccttcggcctgcacccctttaaaggcacccagacccctctggaaaaagatgaactgaagccctttgacatcctccagcctaaggagtacttccagctcagccgccacacggtcattaagatgggaagtgagaacgaggccctggatctctccatgaagtcagtgccctggctcaaggctggtgaagtcagtcccccaatcttccaggaagatgcagccctagacctgtcagtggcagcccaccggaaatccgagcctccccctgagacactgtatgacagtggtgcatcagtggacagctcaggtcacacagtgatggagaaacttcccagtggcatggaaatttcttttgcccctgccacgtcccatgaggccccagccatgatggatagtcacatcagcagcagtgatgctgctaccgagatgctcagccagcccaaccaccccagcggcgaagtcaaggctgaaaataacattgagatggtgggcgagtcccaggcggccaaggtcattgtctctgtcgaagatgctgtgcctaccatattctgtggcaagatcaaaggcctctcaggggtgtccaccaaaaacttctccttcaaaagagaagactccgtgcttcagggctatgacatcaacagccaaggggaagagtccatgggaaatgcagagccccttaggaaacccatcaaaaaccggagcataaagttaaagaaagtgaactcccaggaaatacacatgctcccaatcaaaaaacaacggctggccaccttttttccaagaaagtaaataacggctttttaaaatttgtatgattataatatggggaaaggtgcattggttttataaaaaggcatttaaaacaaattatctttgttaattattttggggagtagttgggaaatggaaaggtgaattggctctagaggccctgtatgctagtatcattttcttttttaatttttgacttttcacaaatgagtaaataagagcaacctatttttcaagcagattgcacattttttgcagctttaatggaatattgggtgaattagaggggtaaaaaaagctattttcattgccacaaagtgctttgatgatgtaatacctaataaagggtaggatgaatatttcacaataaatgtttgtttgcact

SEQ ID NO: 26059 - DNA, 2074 bp, Homo sapiens
  source 1..2074: mol_type = unassigned DNA
cttggtgtatatagtaaaggccgggcgccgcacgcagacacacactcgccaggacacaggcgcacacacgctcacgcacaaccagcagcggcggcggcgacagcgactcggtgacagcggcgacggcggctcccaccgcggcgcacccccttcaggcggccggcggcgaggccagaccggagagttccagcacactcgaccaccccgcggcttcctggaggcggcggccgcgattgcgaggccaagtggcatcagagctgagtgatggacgacctgcagtcccagaacctctccatggacatgactgactcccctcctgccttggctaataacagactggagaatggcatggctcagctgatcaccaccgaggcctggaacatcaactccactgacctggtggagggaagctccgcaccagagctcaatccgaatggcaatgccacctacgtcatgaccacccagggccccgtgcaactgcccgtggtgctggagcagcacgtctttcagcacctcaactcccctctggtcctgccgcaggaggccccatgctcctccagtaccatccacaacaacctcttccagggagcggaggaccccgaggcccagccccagctcctggacctgaggatccccagccagccgcaggagcccactttgccatttgaagctgtgctccagaatttgtttccctcccagggcactctcgggcccccaccctgtcagcctcctcctggctatgcccctgtgcccccacagccttttagctcccccttgtcccccctggtcccaccagccaccctcttggtgccgtatcctgtaatcgtccccttgcctgtgccagtccctattcccatccccatcccgatgcctcagagttctgaatccaagttcagctccagtttccccaagccaccatcttccttcggcctgcacccctttaaaggcacccagacccctctggaaaaagatgaactgaagccctttgacatcctccagcctaaggagtacttccagctcagccgccacacggtcattaagatgggaagtgagaacgaggccctggatctctccatgaagtcagtgccctggctcaaggctggtgaagtcagtcccccaatcttccaggaagatgcagccctagacctgtcagtggcagcccaccggaaatccgagcctccccctgagacactgtatgacagtggtgcatcagtggacagctcaggtcacacagtgatggagaaacttcccagtggcatggaaatttcttttgcccctgccacgtcccatgaggccccagccatgatggatagtcacatcagcagcagtgatgctgctaccgagatgctcagccagcccaaccaccccagcggcgaagtcaaggctgaaaataacattgagatggtgggcgagtcccaggcggccaaggtcattgtctctgtcgaagatgctgtgcctaccatattctgtggcaagatcaaaggcctctcaggggtgtccaccaaaaacttctccttcaaaagagaagactccgtgcttcagggctatgacatcaacagccaaggggaagagtccatgggaaatgcagagccccttaggaaacccatcaaaaaccggagcataaagttaaagaaagtgaactcccaggaaatacacatgctcccaatcaaaaaacaacggctggccaccttttttccaagaaagtaaataacggctttttaaaatttgtatgattataatatggggaaaggtgcattggttttataaaaaggcatttaaaacaaattatctttgttaattattttggggagtagttgggaaatggaaaggtgaattggctctagaggccctgtatgctagtatcattttcttttttaatttttgacttttcacaaatgagtaaataagagcaacctatttttcaagcagattgcacattttttgcagctttaatggaatattgggtgaattagaggggtaaaaaaagctattttcattgccacaaagtgctttgatgatgtaatacctaataaagggtaggatgaatatttcacaataaatgtttgtttgcact

SEQ ID NO: 26060 - DNA, 2224 bp, Homo sapiens
  source 1..2224: mol_type = unassigned DNA
cttggtgtatatagtaaaggccgggcgccgcacgcagacacacactcgccaggacacaggcgcacacacgctcacgcacaaccagcagcggcggcggcgacagcgactcggtgacagcggcgacggcggctcccaccgcggcgcacccccttcaggcggccggcggcgaggccagaccggagagttccagcacactcgaccaccccgcggcttcctggaggcggcggccgcgattgcgaggccaagtggcatcagagctgagtgatggacgacctgcagtcccagaacctctccatggacatgactgactcccctcctgccttggctaataacagactggagaatggcatggctcagctgatcaccaccgaggcctggaacatcaactccactgacctggtaaagaaggccctggtgaccgtgccagccccatccattctgaacccccctgccgagtctcagagtggcatggctctgaaggtggcggccactgtgttgcagcccctgtgcctcggggagagcccagtggtgatgcccattcacatgcaggtggagggaagctccgcaccagagctcaatccgaatggcaatgccacctacgtcatgaccacccagggccccgtgcaactgcccgtggtgctggagcagcacgtctttcagcacctcaactcccctctggtcctgccgcaggaggccccatgctcctccagtaccatccacaacaacctcttccagggagcggaggaccccgaggcccagccccagctcctggacctgaggatccccagccagccgcaggagcccactttgccatttgaagctgtgctccagaatttgtttccctcccagggcactctcgggcccccaccctgtcagcctcctcctggctatgcccctgtgcccccacagccttttagctcccccttgtcccccctggtcccaccagccaccctcttggtgccgtatcctgtaatcgtccccttgcctgtgccagtccctattcccatccccatcccgatgcctcagagttctgaatccaagttcagctccagtttccccaagccaccatcttccttcggcctgcacccctttaaaggcacccagacccctctggaaaaagatgaactgaagccctttgacatcctccagcctaaggagtacttccagctcagccgccacacggtcattaagatgggaagtgagaacgaggccctggatctctccatgaagtcagtgccctggctcaaggctggtgaagtcagtcccccaatcttccaggaagatgcagccctagacctgtcagtggcagcccaccggaaatccgagcctccccctgagacactgtatgacagtggtgcatcagtggacagctcaggtcacacagtgatggagaaacttcccagtggcatggaaatttcttttgcccctgccacgtcccatgaggccccagccatgatggatagtcacatcagcagcagtgatgctgctaccgagatgctcagccagcccaaccaccccagcggcgaagtcaaggctgaaaataacattgagatggtgggcgagtcccaggcggccaaggtcattgtctctgtcgaagatgctgtgcctaccatattctgtggcaagatcaaaggcctctcaggggtgtccaccaaaaacttctccttcaaaagagaagactccgtgcttcagggctatgacatcaacagccaaggggaagagtccatgggaaatgcagagccccttaggaaacccatcaaaaaccggagcataaagttaaagaaagtgaactcccaggaaatacacatgctcccaatcaaaaaacaacggctggccaccttttttccaagaaagtaaataacggctttttaaaatttgtatgattataatatggggaaaggtgcattggttttataaaaaggcatttaaaacaaattatctttgttaattattttggggagtagttgggaaatggaaaggtgaattggctctagaggccctgtatgctagtatcattttcttttttaatttttgacttttcacaaatgagtaaataagagcaacctatttttcaagcagattgcacattttttgcagctttaatggaatattgggtgaattagaggggtaaaaaaagctattttcattgccacaaagtgctttgatgatgtaatacctaataaagggtaggatgaatatttcacaataaatgtttgtttgcact

SEQ ID NO: 26061 - DNA, 2421 bp, Homo sapiens
  source 1..2421: mol_type = unassigned DNA
cttggtgtatatagtaaaggccgggcgccgcacgcagacacacactcgccaggacacaggcgcacacacgctcacgcacaaccagcagcggcggcggcgacagcgactcggtgacagcggcgacggcggctcccaccgcggcgcacccccttcaggcggccggcggcgaggccagaccggagagttccagcacactcgaccaccccgcggcttcctggaggcggcggccgcgattgcgagcaggcttcccaggaagaatgaagcagtcaacttgcataaggcctgtcttgacttctctcctttgggggaagaggatcacattaagaagggtggcaggcttgcctggacacagaattccactaccaaacagacatcatttctgagaacttcagagtttatgatccaggtttcccagtgattaaattactccttggaaggccaagtggcatcagagctgagtgatggacgacctgcagtcccagaacctctccatggacatgactgactcccctcctgccttggctaataacagactggagaatggcatggctcagctgatcaccaccgaggcctggaacatcaactccactgacctggtaaagaaggccctggtgaccgtgccagccccatccattctgaacccccctgccgagtctcagagtggcatggctctgaaggtggcggccactgtgttgcagcccctgtgcctcggggagagcccagtggtgatgcccattcacatgcaggtggagggaagctccgcaccagagctcaatccgaatggcaatgccacctacgtcatgaccacccagggccccgtgcaactgcccgtggtgctggagcagcacgtctttcagcacctcaactcccctctggtcctgccgcaggaggccccatgctcctccagtaccatccacaacaacctcttccagggagcggaggaccccgaggcccagccccagctcctggacctgaggatccccagccagccgcaggagcccactttgccatttgaagctgtgctccagaatttgtttccctcccagggcactctcgggcccccaccctgtcagcctcctcctggctatgcccctgtgcccccacagccttttagctcccccttgtcccccctggtcccaccagccaccctcttggtgccgtatcctgtaatcgtccccttgcctgtgccagtccctattcccatccccatcccgatgcctcagagttctgaatccaagttcagctccagtttccccaagccaccatcttccttcggcctgcacccctttaaaggcacccagacccctctggaaaaagatgaactgaagccctttgacatcctccagcctaaggagtacttccagctcagccgccacacggtcattaagatgggaagtgagaacgaggccctggatctctccatgaagtcagtgccctggctcaaggctggtgaagtcagtcccccaatcttccaggaagatgcagccctagacctgtcagtggcagcccaccggaaatccgagcctccccctgagacactgtatgacagtggtgcatcagtggacagctcaggtcacacagtgatggagaaacttcccagtggcatggaaatttcttttgcccctgccacgtcccatgaggccccagccatgatggatagtcacatcagcagcagtgatgctgctaccgagatgctcagccagcccaaccaccccagcggcgaagtcaaggctgaaaataacattgagatggtgggcgagtcccaggcggccaaggtcattgtctctgtcgaagatgctgtgcctaccatattctgtggcaagatcaaaggcctctcaggggtgtccaccaaaaacttctccttcaaaagagaagactccgtgcttcagggctatgacatcaacagccaaggggaagagtccatgggaaatgcagagccccttaggaaacccatcaaaaaccggagcataaagttaaagaaagtgaactcccaggaaatacacatgctcccaatcaaaaaacaacggctggccaccttttttccaagaaagtaaataacggctttttaaaatttgtatgattataatatggggaaaggtgcattggttttataaaaaggcatttaaaacaaattatctttgttaattattttggggagtagttgggaaatggaaaggtgaattggctctagaggccctgtatgctagtatcattttcttttttaatttttgacttttcacaaatgagtaaataagagcaacctatttttcaagcagattgcacattttttgcagctttaatggaatattgggtgaattagaggggtaaaaaaagctattttcattgccacaaagtgctttgatgatgtaatacctaataaagggtaggatgaatatttcacaataaatgtttgtttgcact

SEQ ID NO: 26062 - DNA, 1952 bp, Homo sapiens
  source 1..1952: mol_type = unassigned DNA
gaccctctcccgccgcggcctgggccagaagcacccggccctgcgctgcggaggcgatgccgcatcctagcactaagcccgggcagcggggaggggcagagagaacccaggggctgcgggaaacgtggaaaaggagtggccccatggggacccgggctcgctacagaccttcgccctgggggcggaggggaggggcccaccacggccttatttccgcgagcgccggcactgcccgctccgagcccgtgtctgtcgggtgccgagccaactttcctgcgtccatgcagccccgccggcaacggctgcctgctccctggtccgggcccaggggcccgcgccccaccgccccgctgctcgcgctgctgctgttgctcgccccggtggcggcgcccgcggggtccggggaccccgacgaccctgggcagcctcaggatgctggggtcccgcgcaggctcctgcagcaggcggcgcgcgcggcgcttcacttcttcaacttccggtccggctcgcccagcgcgctacgagtgctggccgaggtgcaggagggccgcgcgtggattaatccaaaagagggatgtaaagttcacgtggtcttcagcacagagcgctacaacccagagtctttacttcaggaaggtgagggacgtttggggaaatgttctgctcgagtgtttttcaagaatcagaaacccagaccaaccatcaatgtaacttgtacacggctcatcgagaaaaagaaaagacaacaagaggattacctgctttacaagcaaatgaagcaactgaaaaaccccttggaaatagtcagcatacctgataatcatggacatattgatccctctctgagactcatctgggatttggctttccttggaagctcttacgtgatgtgggaaatgacaacacaggtgtcacactactacttggcacagctcactagtgtgaggcagtggaaaactaatgatgatacaattgattttgattatactgttctacttcatgaattatcaacacaggaaataattccctgtcgcattcacttggtctggtaccctggcaaacctcttaaagtgaagtaccactgtcaagagctacagacaccagaagaagcctccggaactgaagaaggatcagctgtagtaccaacagagcttagtaatttctaaaaagaaaaaatgatctttttccgacttctaaacaagtgactatactagcataaatcattcttctagtaaaacagctaaggtatagacattctaataatttgggaaaacctatgattacaagtaaaaactcagaaatgcaaagatgttggttttttgtttctcagtctgctttagcttttaactctggaagcgcatgcacactgaactctgctcagtgctaaacagtcaccagcaggttcctcagggtttcagccctaaaatgtaaaacctggataatcagtgtatgttgcaccagaatcagcattttttttttaactgcaaaaaatgatggtctcatctctgaatttatatttctcattcttttgaacatactatagctaatatattttatgttgctaaattgcttctatctagcatgttaaacaaagataatatactttcgatgaaagtaaattataggaaaaaaattaactgttttaaaaagaacttgattatgttttatgatttcaggcaagtattcatttttaacttgctacctacttttaaataaatgtttacatttctaaataatgaaatgtgttgaatgttctcgtgaagatttgtatacaaaggaaaaatttgtgctaaactggaattaaatgaaatggtaatattgcttaacttaaattttacaaataatagaacgtctgtctcaccagataaagctgtctgcaaacatgcatcaaaagaaacactgatgtaactgaaagtatattaaatatttacaattttcatttacaaggacaa

SEQ ID NO: 26063 - DNA, 839 bp, Homo sapiens
  source 1..839: mol_type = unassigned DNA
gggtgccgagccaactttcctgcgtccatgcagccccgccggcaacggctgcctgctccctggtccgggcccaggggcccgcgccccaccgccccgctgctcgcgctgctgctgttgctcgccccggtggcggcgcccgcggggtccggggaccccgacgaccctgggcagcctcaggatgctggggtcccgcgcaggctcctgcagcaggcggcgcgcgcggcgcttcacttcttcaacttccggtccggctcgcccagcgcgctacgagtgctggccgaggtgcaggagggccgcgcgtggattaatccaaaagagggatgtaaagttcacgtggtcttcagcacagagcgctacaacccagagtctttacttcaggaaggtgagggacgtttggggaaatgttctgctcgagtgtttttcaagaatcagaaacccagaccaaccatcaatgtaacttgtacacggctcatcgagaaaaagaaaagacaacaagaggattacctgctttacaagcaaatgaagcaactgaaaaaccccttggaaatagtcagcatacctgataatcatggacatattgatccctctctgagactcatctgggatttggctttccttggaagctcttacgtgatgtgggaaatgacaacacaggtgtcacactactacttggcacagctcactagtgtgaggcagtgggtaagaaaaacctgaaaattaacttgtgccacaagagttacaatcaaagtggtctccttagactgaattcatgcgaacttctaatttcatatcaagagttgtaatcacatttatttcaataaatatgtgagttcctgcaa

SEQ ID NO: 26064 - DNA, 740 bp, Homo sapiens
  source 1..740: mol_type = unassigned DNA
gccgccccgcgagaagaagagcgggaagaggcggacagcgaggccaagatttcagctgcgggacggtcaggggagacctccaggcgcagggaaggacggccagggtgacacggaagcatgcgacggctgctgatccctctggccctgtggctgggtgcggtgggcgtgggcgtcgccgagctcacggaagcccagcgccggggcctgcaggtggccctggaggaatttcacaagcacccgcccgtgcagtgggccttccaggagaccagtgtggagagcgccgtggacacgcccttcccagctggaatatttgtgaggctggaatttaagctgcagcagacaagctgccggaagagggactggaagaaacccgagtgcaaagtcaggcccaatgggaggaaacggaaatgcctggcctgcatcaaactgggctctgaggacaaagttctgggccggttggtccactgccccatagagacccaagttctgcgggaggctgaggagcaccaggagacccagtgcctcagggtgcagcgggctggtgaggacccccacagcttctacttccctggacagttcgccttctccaaggccctgccccgcagctaagccagcactgagatgcgtggtgcctccaggaccgctgcgggtggtaaccagtggaagaccccagcccccagggagaggaacccgttctatccccagccatgataataaagctgctctcccagctgcctctc

SEQ ID NO: 26065 - DNA, 1618 bp, Homo sapiens
  source 1..1618: mol_type = unassigned DNA
cggacagcgaggccaagatttcagctgcgggacggtcaggggagacctccaggcgcagggaaggacgtgaggaggggaagcgggctggggcggcagccgggcggaggggcagctgcgcaggcggaatgaggaacgcctttgctctaaggcgaccaccctggcagctcttcactgaggggcctcggtttccacatctgtcgctctccggtcccaagaccaccaggaccgacggggctctccgggagggtcagcccctccggtggccccagtcatgcatcaggggacggatcagaagggctaggaagaggggtcgtggggaaggccccagaaaaaagaggaaggagggaagattttgcctgaagcgggaaagccaagggctgggcggcgcgagacccccattcctagcgactggggctggctggtggcccgcggcagcccccgcgccgggaggattaggcctcccgccgctcccacccgtccggaccctcccacgtgtttaggtcctcccaaaagtattcggcctccggcccctgccccttcccccggctggcctggacctcggggacgtggggggaaccccgtgggagcagggggattctggacggggagggagtagcggttggggagaaggctgagcggggaaaggagagaggggctccggggacggcagggaggagagtgggtcgtgccggagacccagggagagacacaatgggcaagattaggggtgtagggtgggagtgcgaactgactgattcctagcgtgggcagggaactttgctaaaactgcaggccccagggaacagcgcgggcagggtgggagggaacggagagggccaggcggaccctaaggtcaatttggagaaagggccatttccaggctccttcacctgtgcccagcgttctacaggcctggaccccgcccccgctccccaccctccccccagagcagggcgcgggaggaggcggctcgggctggctcggagagctgaggggcgcacacccgcttcgcagggccagggtgacacggaagcatgcgacggctgctgatccctctggccctgtggctgggtgcggtgggcgtgggcgtcgccgagctcacggaagcccagcgccggggcctgcaggtggccctggaggaatttcacaagcacccgcccgtgcagtgggccttccaggagaccagtgtggagagcgccgtggacacgcccttcccagctggaatatttgtgaggctggaatttaagctgcagcagacaagctgccggaagagggactggaagaaacccgagtgcaaagtcaggcccaatgggaggaaacggaaatgcctggcctgcatcaaactgggctctgaggacaaagttctgggccggttggtccactgccccatagagacccaagttctgcgggaggctgaggagcaccaggagacccagtgcctcagggtgcagcgggctggtgaggacccccacagcttctacttccctggacagttcgccttctccaaggccctgccccgcagctaagccagcactgagatgcgtggtgcctccaggaccgctgcgggtggtaaccagtggaagaccccagcccccagggagaggaacccgttctatcc

SEQ ID NO: 26066 - DNA, 563 bp, Homo sapiens
  source 1..563: mol_type = unassigned DNA
agaagagcgggaagaggcggacagcgaggccaagatttcagctgcgggacgggccagggtgacacggaagcatgcgacggctgctgatccctctggccctgtggctgggtgcggtgggcgtgggcgtcgccgagctcacggaagcccagcgccggggcctgcaggtggccctggaggaatttcacaagcacccgcccgtgcagtgggccttccaggagaccagtgtggagagcgccgtggacacgcccttcccagctggaatatttgtgaggctggaatttaagctgcagcagacaagctgccggaagagggactggaagaaacccgagtgcaaagtcaggcccaatgggaggaaacggaaatgcctggcctgcatcaaactgggctctgaggacaaagttctgggccggttggtccactgccccatagagacccaagttctgcgggaggctgaggagcaccaggagacccagtgcctcagggtgcagcgggctggtgaggacccccacagcttctacttccctggacagttcgccttctccaaggccctgccccgcagctaa

SEQ ID NO: 26067 - DNA, 749 bp, Homo sapiens
  source 1..749: mol_type = unassigned DNA
agctgatccacaaacaagaggagcaccagacctcctcttggcttcgagatggcttcgccacaccaagagcccaaacctggagacctgattgagattttccgccttggctatgagcactgggccctgtatataggagatggctacgtgatccatctggctcctccaagtgagtaccccggggctggctcctccagtgtcttctcagtcctgagcaacagtgcagaggtgaaacgggagcgcctggaagatgtggtgggaggctgttgctatcgggtcaacaacagcttggaccatgagtaccaaccacggcccgtggaggtgatcatcagttctgcgaaggagatggttggtcagaagatgaagtacagtattgtgagcaggaactgtgagcactttgtcacccagctgagatatggcaagtcccgctgtaaacaggtggaaaaggccaaggttgaagttggtgtggccacggcgcttggaatcctggttgttgctggatgctcttttgcgattaggagataccaaaaaaaagcgacagcctgaagcagccacaaaatcctgtgttagaagcagctgtgggggtcccagtggagatgagcctcccccatgcctccagcagcctgaccctcgtgccctgtctcaggcgttctctagatcctttcctctgtttccctctctcgctggcaaaagtatgatctaattgaaacaagactgaaggatcaataaacagccatctgccccttcagaaa

SEQ ID NO: 26068 - DNA, 696 bp, Homo sapiens
  source 1..696: mol_type = unassigned DNA
atggggctgcctgaaccaaagcccaaacctggagacctgattgagattttccgccttggctatgagcactgggccctgtatataggagatggctacgtgatccatctggctcctccaagtgagtaccccggggctggctcctccagtgtcttctcagtcctgagcaacagtgcagaggtgaaacgggagcgcctggaagatgtggtgggaggctgttgctatcgggtcaacaacagcttggaccatgagtaccaaccacggcccgtggaggtgatcatcagttctgcgaaggagatggttggtcagaagatgaagtacagtattgtgagcaggaactgtgagcactttgtcacccagctgagatatggcaagtcccgctgtaaacaggtggaaaaggccaaggttgaagttggtgtggccacggcgcttggaatcctggttgttgctggatgctcttttgcgattaggagataccaaaaaaaagcgacagcctgaagcagccacaaaatcctgtgttagaagcagctgtgggggtcccagtggagatgagcctcccccatgcctccagcagcctgaccctcgtgccctgtctcaggcgttctctagatcctttcctctgtttccctctctcgctggcaaaagtatgatctaattgaaacaagactgaaggatcaataaacagccatctgccccttc

SEQ ID NO: 26069 - DNA, 3271 bp, Homo sapiens
  source 1..3271: mol_type = unassigned DNA
cagcctaacccagaagcaggggggaatcctgaatcgagctgagagggcttccccggttctcctgggaaccccatcggccccctgccagcacacacctgagcagcatcacaggacatggccccctcagccacctagctggggcccatctaggagtggcatcttttttggtgccctgaaggccagctctggaccttcccaggaaaagtgccagctcacagaactgcttgaccaaaggaccggctcttgagacatcccccaacccacctggcccccagctagggtgggggctccaggagactgagattagcctgccctctttggacagcagctccaggacagggcgggtgggctgaccacccaaaccccatctgggcccaggccccatgccccgaggaggggtggtctgaagcccaccagagccccctgccagactgtctgcctcccttctgactgtggccgcttggcatggccagcaacagcagctcctgcccgacacctgggggcgggcacctcaatgggtacccggtgcctccctacgccttcttcttcccccctatgctgggtggactctccccgccaggcgctctgaccactctccagcaccagcttccagttagtggatatagcacaccatccccagccaccattgagacccagagcagcagttctgaagagatagtgcccagccctccctcgccaccccctctaccccgcatctacaagccttgctttgtctgtcaggacaagtcctcaggctaccactatggggtcagcgcctgtgagggctgcaagggcttcttccgccgcagcatccagaagaacatggtgtacacgtgtcaccgggacaagaactgcatcatcaacaaggtgacccggaaccgctgccagtactgccgactgcagaagtgctttgaagtgggcatgtccaaggagtctgtgagaaacgaccgaaacaagaagaagaaggaggtgcccaagcccgagtgctctgagagctacacgctgacgccggaggtgggggagctcattgagaaggtgcgcaaagcgcaccaggaaaccttccctgccctctgccagctgggcaaatacactacgaacaacagctcagaacaacgtgtctctctggacattgacctctgggacaagttcagtgaactctccaccaagtgcatcattaagactgtggagttcgccaagcagctgcccggcttcaccaccctcaccatcgccgaccagatcaccctcctcaaggctgcctgcctggacatcctgatcctgcggatctgcacgcggtacacgcccgagcaggacaccatgaccttctcggacgggctgaccctgaaccggacccagatgcacaacgctggcttcggccccctcaccgacctggtctttgccttcgccaaccagctgctgcccctggagatggatgatgcggagacggggctgctcagcgccatctgcctcatctgcggagaccgccaggacctggagcagccggaccgggtggacatgctgcaggagccgctgctggaggcgctaaaggtctacgtgcggaagcggaggcccagccgcccccacatgttccccaagatgctaatgaagattactgacctgcgaagcatcagcgccaagggggctgagcgggtgatcacgctgaagatggagatcccgggctccatgccgcctctcatccaggaaatgttggagaactcagagggcctggacactctgagcggacagccggggggtggggggcgggacgggggtggcctggcccccccgccaggcagctgtagccccagcctcagccccagctccaacagaagcagcccggccacccactccccgtgaccgcccacgccacatggacacagccctcgccctccgccccggcttttctctgcctttctaccgaccatgtgaccccgcaccagccctgcccccacctgccctcccgggcagtactggggaccttccctgggggacggggagggaggaggcagcgactccttggacagaggcctgggccctcagtggactgcctgctcccacagcctgggctgacgtcagaggccgaggccaggaactgagtgaggcccctggtcctgggtctcaggatgggtcctgggggcctcgtgttcatcaagacacccctctgcccagctcaccacatcttcatcaccagcaaacgccaggacttggctcccccatcctcagaactcacaagccattgctccccagctggggaacctcaacctcccccctgcctcggttggtgacagagggggtgggacaggggcggggggttccccctgtacataccctgccataccaaccccaggtattaattctcgctggttttgtttttattttaatttttttgttttgatttttttaataagaattttcattttaagcacatttatactgaaggaatttgtgctgtgtattggggggagctggatccagagctggagggggtgggtccgggggagggagtggctcggaaggggcccccactctcctttcatgtccctgtgccccccagttctcctcctcagccttttcctcctcagttttctctttaaaactgtgaagtactaactttccaaggcctgccttcccctccctcccactggagaagccgccagcccctttctccctctgcctgaccactgggtgtggacggtgtggggcagccctgaaaggacaggctcctggccttggcacttgcctgcacccaccatgaggcatggagcagggcagagcaagggccccgggacagagttttcccagacctggctcctcggcagagctgcctcccgtcagggcccacatcatctaggctccccagcccccactgtgaaggggctggccaggggcccgagctgcccccacccccggcctcagccaccagcacccccatagggcccccagacaccacacacatgcgcgtgcgcacacacacaaacacacacacactggacagtagatgggccgacacacacttggcccgagttcctccatttccctggcctgccccccacccccaacctgtcccacccccgtgccccctccttaccccgcaggacgggcctacaggggggtctcccctcacccctgcacccccagctgggggagctggctctgccccgacctccttcaccaggggttggggccccttcccctggagcccgtgggtgcacctgttactgttgggctttccactgagatctactggataaagaataaagttctatttattcta

SEQ ID NO: 26070 - DNA, 2780 bp, Homo sapiens
  source 1..2780: mol_type = unassigned DNA
atgtacgagagtgtagaagtggggggtcccacccctaatcccttcctagtggtggatttttataaccagaaccgggcctgtttgctcccagagaaggggctccccgccccgggtccgtactccaccccgctccggactccgctttggaatggctcaaaccactccattgagacccagagcagcagttctgaagagatagtgcccagccctccctcgccaccccctctaccccgcatctacaagccttgctttgtctgtcaggacaagtcctcaggctaccactatggggtcagcgcctgtgagggctgcaagggcttcttccgccgcagcatccagaagaacatggtgtacacgtgtcaccgggacaagaactgcatcatcaacaaggtgacccggaaccgctgccagtactgccgactgcagaagtgctttgaagtgggcatgtccaaggagtctgtgagaaacgaccgaaacaagaagaagaaggaggtgcccaagcccgagtgctctgagagctacacgctgacgccggaggtgggggagctcattgagtgcgcaaagcgcaccaggaaaccttccctgccctctgccagctgggcaaatacactacgaacaacagctcagaacaacgtgtctctctggacattgacctctgggacaagttcagtgaactctccaaagtgcatcattaagactgtggagttcgccaagcagctgcccggcttcaccaccctcaccatcgccgaccagatcaccctcctcaaggctgcctgcctggacatcctgatcctgcggatctgcacgcggtacacgcccgagcaggacaccatgaccttctcggacgggctgaccctgaaccggacccagatgcacaacgctggcttcggccccctcaccgacctggtctttgccttcgccaaccagctgctgcccctggagatggatgatgcggagacggggctgctcagcgccatctgcctcatctgcggagaccgccaggacctggagcagccggaccgggtggacatgctgcaggagccgctgctggaggcgctaaaggtctacgtgcggaagcggaggcccagccgcccccacatgttccccaagatgctaatgaagattactgacctgcgaagcatcagcgccaagggggctgagcgggtgatcacgctgaagatggagatcccgggctccatgccgcctctcatccaggaaatgttggagaactcagagggcctggacactctgagcggacagccggggggtggggggcgggacgggggtggcctgccccgccaggcagctgtagccccagcctcagccccagctccaacagaagcagcccggccacccactccccgtgaccgcccacgccacatggacacagccctcgccctccgccccggcttttctctgcctttctaccgaccatgtgaccccgcaccagccctgcccccacctgccctcccgggcagtactggggaccttccctgggggacggggagggaggaggcagcgactccttggacagaggcctgggccctcagtggactgcctgctcccacagcctgggctgacgtcagaggccgaggccaggaactgagtgaggcccctggtcctgggtctcaggatgggtcctgggggcctcgtgttcatcaagacacccctctgcccagctcaccacatcttcatcaccagcaaacgccaggacttggctcccccatcctcagaactcacaagccattgctccccagctggggaacctcaacctcccccctgcctcggttggtgacagagggggtgggacaggggcggggggttccccctgtacataccctgccataccaaccccaggtattaattctcgctggttttgtttttattttaatttttttgttttgatttttttaataagaattttcattttaagcacatttatactgaaggaatttgtgctgtgtattggggggagctggatccagagctggagggggtgggtccgggggagggagtggctcggaaggggcccccactctcctttcatgtccctgtgccccccagttctcctcctcagccttttcctcctcagttttctctttaaaactgtgaagtactaactttccaaggcctgccttcccctccctcccactggagaagccgccagcccctttctccctctgcctgaccactgggtgtggacggtgtggggcagccctgaaaggacaggctcctggccttggcacttgcctgcacccaccatgaggcatggagcagggcagagcaagggccccgggacagagttttcccagacctggctcctcggcagagctgcctcccgtcagggcccacatcatctaggctccccagcccccactgtgaaggggctggccaggggcccgagctgcccccacccccggcctcagccaccagcacccccatagggcccccagacaccacacacatgcgcgtgcgcacacacacaaacacacacacactggacagtagatgggccgacacacacttggcccgagttcctccatttccctggcctgccccccacccccaacctgtcccacccccgtgccccctccttaccccgcaggacgggcctacaggggggtctcccctcacccctgcacccccagctgggggagctggctctgccccgacctccttcaccaggggttggggccccttcccctggagcccgtgggtgcacctgttactgttgggctttccactgagatctactggataaagaataaagttctatttattct

SEQ ID NO: 26071 - DNA, 2285 bp, Homo sapiens
  source 1..2285: mol_type = unassigned DNA
agccgctgtactctgcctcggacgccacgagactctagacgggagtcccctcgaggtgaagccgctgagttcccgggccccgccaggcttccctgggagagccgacggaccccccctcccagcacacacaacttccctgcttttcaccgggactggcggagcggccggcggacttagacgcggggacttcagggcagggggcgccccctgcccgggtcaccagtcggggcgaggggacgtctcctctcccccagctgctctgctcggatggcgccgccggctgagtgacgggggcggcgcgcaggacttcccagctcggacctcttgccttcgaggggaaagatgtacgagagtgtagaagtggggggtcccacccctaatcccttcctagtggtggatttttataaccagaaccgggcctgtttgctcccagagaaggggctccccgccccgggtccgtactccaccccgctccggactccgctttggaatggctcaaaccactccattgagacccagagcagcagttctgaagagatagtgcccagccctccctcgccaccccctctaccccgcatctacaagccttgctttgtctgtcaggacaagtcctcaggctaccactatggggtcagcgcctgtgagggctgcaagggcttcttccgccgcagcatccagaagaacatggtgtacacgtgtcaccgggacaagaactgcatcatcaacaaggtgacccggaaccgctgccagtactgccgactgcagaagtgctttgaagtgggcatgtccaaggagtctgtgagaaacgaccgaaacaagaagaagaaggaggtgcccaagcccgagtgctctgagagctacacgctgacgccggaggtgggggagctcattgagaaggtgcgcaaagcgcaccaggaaaccttccctgccctctgccagctgggcaaatacactacgaacaacagctcagaacaacgtgtctctctggacattgacctctgggacaagttcagtgaactctccaccaagtgcatcattaagactgtggagttcgccaagcagctgcccggcttcaccaccctcaccatcgccgaccagatcaccctcctcaaggctgcctgcctggacatcctgatcctgcggatctgcacgcggtacacgcccgagcaggacaccatgaccttctcggacgggctgaccctgaaccggacccagatgcacaacgctggcttcggccccctcaccgacctggtctttgccttcgccaaccagctgctgcccctggagatggatgatgcggagacggggctgctcagcgccatctgcctcatctgcggagaccgccaggacctggagcagccggaccgggtggacatgctgcaggagccgctgctggaggcgctaaaggtctacgtgcggaagcggaggcccagccgcccccacatgttccccaagatgctaatgaagattactgacctgcgaagcatcagcgccaagggggctgagcgggtgatcacgctgaagatggagatcccgggctccatgccgcctctcatccaggaaatgttggagaactcagagggcctggacactctgagcggacagccggggggtggggggcgggacgggggtggcctggcccccccgccaggcagctgtagccccagcctcagccccagctccaacagaagcagcccggccacccactccccgtgaccgcccacgccacatggacacagccctcgccctccgccccggcttttctctgcctttctaccgaccatgtgaccccgcaccagccctgcccccacctgccctcccgggcagtactggggaccttccctgggggacggggagggaggaggcagcgactccttggacagaggcctgggccctcagtggactgcctgctcccacagcctgggctgacgtcagaggccgaggccaggaactgagtgaggcccctggtcctgggtctcaggatgggtcctgggggcctcgtgttcatcaagacacccctctgcccagctcaccacatcttcatcaccagcaaacgccaggacttggctcccccatcctcagaactcacaagccattgctccccagctggggaacctcaacctcccccctgcctcggttggtgacagagggggtgggacaggggcggggggttccccctgtacataccctgccataccaaccccaggtattaattctcgctggttttgtttttattttaatttttttgttttgatttttttaataagaattttcattttaagcac

SEQ ID NO: 26072 - DNA, 2008 bp, Homo sapiens
  source 1..2008: mol_type = unassigned DNA
acatgatgtcacagacaatgacacaagccggtgtctcattccgacacagcgtccgagctgcacaatgtcacacccgggtgccaaacacttggccccgcgcgacccggccctacgcctcctgccgccgctctccgcgtctccgggggaggtggcccggttcggccgggcagggggctggcgggcgagccccgcgggcgggctggcgagcgggtgatgtcacgggcagcgccattgagacccagagcagcagttctgaagagatagtgcccagccctccctcgccaccccctctaccccgcatctacaagccttgctttgtctgtcaggacaagtcctcaggctaccactatggggtcagcgcctgtgagggctgcaagggcttcttccgccgcagcatccagaagaacatggtgtacacgtgtcaccgggacaagaactgcatcatcaacaaggtgacccggaaccgctgccagtactgccgactgcagaagtgctttgaagtgggcatgtccaaggagtctgtgagaaacgaccgaaacaagaagaagaaggaggtgcccaagcccgagtgctctgagagctacacgctgacgccggaggtgggggagctcattgagaaggtgcgcaaagcgcaccaggaaaccttccctgccctctgccagctgggcaaatacactacgaacaacagctcagaacaacgtgtctctctggacattgacctctgggacaagttcagtgaactctccaccaagtgcatcattaagactgtggagttcgccaagcagctgcccggcttcaccaccctcaccatcgccgaccagatcaccctcctcaaggctgcctgcctggacatcctgatcctgcggatctgcacgcggtacacgcccgagcaggacaccatgaccttctcggacgggctgaccctgaaccggacccagatgcacaacgctggcttcggccccctcaccgacctggtctttgccttcgccaaccagctgctgcccctggagatggatgatgcggagacggggctgctcagcgccatctgcctcatctgcggagaccgccaggacctggagcagccggaccgggtggacatgctgcaggagccgctgctggaggcgctaaaggtctacgtgcggaagcggaggcccagccgcccccacatgttccccaagatgctaatgaagattactgacctgcgaagcatcagcgccaagggggctgagcgggtgatcacgctgaagatggagatcccgggctccatgccgcctctcatccaggaaatgttggagaactcagagggcctggacactctgagcggacagccggggggtggggggcgggacgggggtggcctggcccccccgccaggcagctgtagccccagcctcagccccagctccaacagaagcagcccggccacccactccccgtgaccgcccacgccacatggacacagccctcgccctccgccccggcttttctctgcctttctaccgaccatgtgaccccgcaccagccctgcccccacctgccctcccgggcagtactggggaccttccctgggggacggggagggaggaggcagcgactccttggacagaggcctgggccctcagtggactgcctgctcccacagcctgggctgacgtcagaggccgaggccaggaactgagtgaggcccctggtcctgggtctcaggatgggtcctgggggcctcgtgttcatcaagacacccctctgcccagctcaccacatcttcatcaccagcaaacgccaggacttggctcccccatcctcagaactcacaagccattgctccccagctggggaacctcaacctcccccctgcctcggttggtgacagagggggtgggacaggggcggggggttccccctgtacataccctgccataccaaccccaggtattaattctcgctggttttgtttttattttaatttttttgttttgatttttttaataagaattttcattttaagcac

SEQ ID NO: 26073 - DNA, 3371 bp, Homo sapiens
  source 1..3371: mol_type = unassigned DNA
agtctggggctccgggtaaagtttcagcctccgcacgtgactcgctatggccgctgccatcgccccgcgcccctgagccgcggccccctggacggctcctctcccgggaccccgcaccctgatgccgagcagcaccagggcgccgggttagggcagacgctgtgctcgctggcaccccgaacgggttgcttcccccgctgcgagcatcacaggacatggccccctcagccacctagctggggcccatctaggagtggcatcttttttggtgccctgaaggccagctctggaccttcccaggaaaagtgccagctcacagaactgcttgaccaaaggaccggctcttgagacatcccccaacccacctggcccccagctagggtgggggctccaggagactgagattagcctgccctctttggacagcagctccaggacagggcgggtgggctgaccacccaaaccccatctgggcccaggccccatgccccgaggaggggtggtctgaagcccaccagagccccctgccagactgtctgcctcccttctgactgtggccgcttggcatggccagcaacagcagctcctgcccgacacctgggggcgggcacctcaatgggtacccggtgcctccctacgccttcttcttcccccctatgctgggtggactctccccgccaggcgctctgaccactctccagcaccagcttccagttagtggatatagcacaccatccccagccaccattgagacccagagcagcagttctgaagagatagtgcccagccctccctcgccaccccctctaccccgcatctacaagccttgctttgtctgtcaggacaagtcctcaggctaccactatggggtcagcgcctgtgagggctgcaagggcttcttccgccgcagcatccagaagaacatggtgtacacgtgtcaccgggacaagaactgcatcatcaacaaggtgacccggaaccgctgccagtactgccgactgcagaagtgctttgaagtgggcatgtccaaggagtctgtgagaaacgaccgaaacaagaagaagaaggaggtgcccaagcccgagtgctctgagagctacacgctgacgccggaggtgggggagctcattgagaaggtgcgcaaagcgcaccaggaaaccttccctgccctctgccagctgggcaaatacactacgaacaacagctcagaacaacgtgtctctctggacattgacctctgggacaagttcagtgaactctccaccaagtgcatcattaagactgtggagttcgccaagcagctgcccggcttcaccaccctcaccatcgccgaccagatcaccctcctcaaggctgcctgcctggacatcctgatcctgcggatctgcacgcggtacacgcccgagcaggacaccatgaccttctcggacgggctgaccctgaaccggacccagatgcacaacgctggcttcggccccctcaccgacctggtctttgccttcgccaaccagctgctgcccctggagatggatgatgcggagacggggctgctcagcgccatctgcctcatctgcggagaccgccaggacctggagcagccggaccgggtggacatgctgcaggagccgctgctggaggcgctaaaggtctacgtgcggaagcggaggcccagccgcccccacatgttccccaagatgctaatgaagattactgacctgcgaagcatcagcgccaagggggctgagcgggtgatcacgctgaagatggagatcccgggctccatgccgcctctcatccaggaaatgttggagaactcagagggcctggacactctgagcggacagccggggggtggggggcgggacgggggtggcctggcccccccgccaggcagctgtagccccagcctcagccccagctccaacagaagcagcccggccacccactccccgtgaccgcccacgccacatggacacagccctcgccctccgccccggcttttctctgcctttctaccgaccatgtgaccccgcaccagccctgcccccacctgccctcccgggcagtactggggaccttccctgggggacggggagggaggaggcagcgactccttggacagaggcctgggccctcagtggactgcctgctcccacagcctgggctgacgtcagaggccgaggccaggaactgagtgaggcccctggtcctgggtctcaggatgggtcctgggggcctcgtgttcatcaagacacccctctgcccagctcaccacatcttcatcaccagcaaacgccaggacttggctcccccatcctcagaactcacaagccattgctccccagctggggaacctcaacctcccccctgcctcggttggtgacagagggggtgggacaggggcggggggttccccctgtacataccctgccataccaaccccaggtattaattctcgctggttttgtttttattttaatttttttgttttgatttttttaataagaattttcattttaagcacatttatactgaaggaatttgtgctgtgtattggggggagctggatccagagctggagggggtgggtccgggggagggagtggctcggaaggggcccccactctcctttcatgtccctgtgccccccagttctcctcctcagccttttcctcctcagttttctctttaaaactgtgaagtactaactttccaaggcctgccttcccctccctcccactggagaagccgccagcccctttctccctctgcctgaccactgggtgtggacggtgtggggcagccctgaaaggacaggctcctggccttggcacttgcctgcacccaccatgaggcatggagcagggcagagcaagggccccgggacagagttttcccagacctggctcctcggcagagctgcctcccgtcagggcccacatcatctaggctccccagcccccactgtgaaggggctggccaggggcccgagctgcccccacccccggcctcagccaccagcacccccatagggcccccagacaccacacacatgcgcgtgcgcacacacacaaacacacacacactggacagtagatgggccgacacacacttggcccgagttcctccatttccctggcctgccccccacccccaacctgtcccacccccgtgccccctccttaccccgcaggacgggcctacaggggggtctcccctcacccctgcacccccagctgggggagctggctctgccccgacctccttcaccaggggttggggccccttcccctggagcccgtgggtgcacctgttactgttgggctttccactgagatctactggataaagaataaagttctatttattct

SEQ ID NO: 26074 - DNA, 1052 bp, Homo sapiens
  source 1..1052: mol_type = unassigned DNA
tcagctccccagctaatgggccaagagattctccccgccaggtcccccactctcaggctggggagccctactccccacttgccccaggagctgctcagagccagtcccaagggacccccagggagactgcagctgggagggctggctgtgagaaacgaccgaaacaagaagaagaaggaggtgcccaagcccgagtgctctgagagctacacgctgacgccggaggtgggggagctcattgagaaggtgcgcaaagcgcaccaggaaaccttccctgccctctgccagctgggcaaatacactacgaacaacagctcagaacaacgtgtctctctggacattgacctctgggacaagttcagtgaactctccaccaagtgcatcattaagactgtggagttcgccaagcagctgcccggcttcaccaccctcaccatcgccgaccagatcaccctcctcaaggctgcctgcctggacatcctgatcctgcggatctgcacgcggtacacgcccgagcaggacaccatgaccttctcggacgggctgaccctgaaccggacccagatgcacaacgctggcttcggccccctcaccgacctggtctttgccttcgccaaccagctgctgcccctggagatggatgatgcggagacggggctgctcagcgccatctgcctcatctgcggagaccgccaggacctggagcagccggaccgggtggacatgctgcaggagccgctgctggaggcgctaaaggtctacgtgcggaagcggaggcccagccgcccccacatgttccccaagatgctaatgaagattactgacctgcgaagcatcagcgccaagggggctgagcgggtgatcacgctgaagatggagatcccgggctccatgccgcctctcatccaggaaatgttggagaactcagagggcctggacactctgagcggacagccggggggtggggggcgggacgggggtggcctggcccccccgccaggcagctgtagccccagcctcagccccagctccaacagaagcagcccggccac

SEQ ID NO: 26075 - DNA, 3104 bp, Homo sapiens
  source 1..3104: mol_type = unassigned DNA
ctgctccgtaccctccgccccttcagtctggggctccgggtaaagtttcagcctccgcacgtgactcgctatggccgctgccatcgccccgcgcccctgagccgcggccccctggacggctcctctcccgggaccccgcaccctgatgccgagcagcaccagggcgccgggttagggcagacgctgtgctcgctggcaccccgaacgggttgcttcccccgctgcgagcatcacaggacatggccccctcagccacctagctggggcccatctaggagtggcatcttttttggtgccctgaaggccagctctggaccttcccaggaaaagtgccagctcacagaactgcttgaccaaaggaccggctcttgagacatcccccaacccacctggcccccagctagggtgggggctccaggagactgagattagcctgccctctttggacagcagctccaggacagggcgggtgggctgaccacccaaaccccatctgggcccaggccccatgccccgaggaggggtggtctgaagcccaccagagccccctgccagactgtctgcctcccttctgactgtggccgcttggcatggccagcaacagcagctcctgcccgacacctgggggcgggcacctcaatgggtacccggtgcctccctacgccttcttcttcccccctatgctgggtggactctccccgccaggcgctctgaccactctccagcaccagcttccagttagtggatatagcacaccatccccagccactgtgagaaacgaccgaaacaagaagaagaaggaggtgcccaagcccgagtgctctgagagctacacgctgacgccggaggtgggggagctcattgagaaggtgcgcaaagcgcaccaggaaaccttccctgccctctgccagctgggcaaatacactacgaacaacagctcagaacaacgtgtctctctggacattgacctctgggacaagttcagtgaactctccaccaagtgcatcattaagactgtggagttcgccaagcagctgcccggcttcaccaccctcaccatcgccgaccagatcaccctcctcaaggctgcctgcctggacatcctgatcctgcggatctgcacgcggtacacgcccgagcaggacaccatgaccttctcggacgggctgaccctgaaccggacccagatgcacaacgctggcttcggccccctcaccgacctggtctttgccttcgccaaccagctgctgcccctggagatggatgatgcggagacggggctgctcagcgccatctgcctcatctgcggagaccgccaggacctggagcagccggaccgggtggacatgctgcaggagccgctgctggaggcgctaaaggtctacgtgcggaagcggaggcccagccgcccccacatgttccccaagatgctaatgaagattactgacctgcgaagcatcagcgccaagggggctgagcgggtgatcacgctgaagatggagatcccgggctccatgccgcctctcatccaggaaatgttggagaactcagagggcctggacactctgagcggacagccggggggtggggggcgggacgggggtggcctggcccccccgccaggcagctgtagccccagcctcagccccagctccaacagaagcagcccggccacccactccccgtgaccgcccacgccacatggacacagccctcgccctccgccccggcttttctctgcctttctaccgaccatgtgaccccgcaccagccctgcccccacctgccctcccgggcagtactggggaccttccctgggggacggggagggaggaggcagcgactccttggacagaggcctgggccctcagtggactgcctgctcccacagcctgggctgacgtcagaggccgaggccaggaactgagtgaggcccctggtcctgggtctcaggatgggtcctgggggcctcgtgttcatcaagacacccctctgcccagctcaccacatcttcatcaccagcaaacgccaggacttggctcccccatcctcagaactcacaagccattgctccccagctggggaacctcaacctcccccctgcctcggttggtgacagagggggtgggacaggggcggggggttccccctgtacataccctgccataccaaccccaggtattaattctcgctggttttgtttttattttaatttttttgttttgatttttttaataagaattttcattttaagcacatttatactgaaggaatttgtgctgtgtattggggggagctggatccagagctggagggggtgggtccgggggagggagtggctcggaaggggcccccactctcctttcatgtccctgtgccccccagttctcctcctcagccttttcctcctcagttttctctttaaaactgtgaagtactaactttccaaggcctgccttcccctccctcccactggagaagccgccagcccctttctccctctgcctgaccactgggtgtggacggtgtggggcagccctgaaaggacaggctcctggccttggcacttgcctgcacccaccatgaggcatggagcagggcagagcaagggccccgggacagagttttcccagacctggctcctcggcagagctgcctcccgtcagggcccacatcatctaggctccccagcccccactgtgaaggggctggccaggggcccgagctgcccccacccccggcctcagccaccagcacccccatagggcccccagacaccacacacatgcgcgtgcgcacacacacaaacacacacacactggacagtagatgggccgacacacacttggcccgagttcctccatttccctggcctgccccccacccccaacctgtcccacccccgtgccccctccttaccccgcaggacgggcctacaggggggtctcccctcacccctgcacccccagctgggggagctggctctgccccgacctccttcaccaggggttggggccccttcccctggagcccgtgggtgcacctgttactgttgggctttccactgagatctactggataaagaataaagttctatttattct

SEQ ID NO: 26076 - DNA, 2074 bp, Homo sapiens
  source 1..2074: mol_type = unassigned DNA
gagaaaatgtgtcggatattttggggcggtcacgtgggcgggcgggctccgagaggccccgggacagtcccagcctagagccgtgcccccccaggagccccccagtacggcgagccccggacattgcgacgctccatccaagagactgcccgacgccgggacctcggggctccgccgcctcccttccccctcccactccagcagctacggcccagttccctcaacctgacccagtatgtagaagccagtctctgcaggcggccagcggcggtggagacacagagcaccagctcagaggagatggtgcccagctcgccctcgccccctccgcctcctcgggtctacaagccatgcttcgtgtgcaatgacaagtcctctggctaccactatggggtcagctcttgtgaaggctgcaagggcttctttcgccgaagcatccagaagaacatggtgtacacgtgtcaccgcgacaaaaactgtatcatcaacaaggtgaccaggaatcgctgccagtactgccggctacagaagtgcttcgaagtgggcatgtccaaggaagctgtgcgaaatgaccggaacaagaagaagaaagaggtgaaggaagaagggtcacctgacagctatgagctgagccctcagttagaagagctcatcaccaaggtcagcaaagcccatcaggagactttcccctcgctctgccagctgggcaagtataccacgaactccagtgcagaccaccgcgtgcagctggatctggggctgtgggacaagttcagtgagctggctaccaagtgcatcatcaagatcgtggagtttgccaagcggttgcctggctttacagggctcagcattgctgaccagatcactctgctcaaagctgcctgcctagatatcctgatgctgcgtatctgcacaaggtacaccccagagcaggacaccatgaccttctccgacgggctgaccctgaaccggacccagatgcacaatgccggcttcgggcccctcacagaccttgtctttgcctttgctgggcagctcctgcccctggagatggatgacaccgagacagggctgctcagcgccatctgcctcatctgcggagaccgcatggacctggaggagcccgaaaaagtggacaagctgcaggagccactgctggaagccctgaggctgtacgcccggcgccggcggcccagccagccctacatgttcccaaggatgctaatgaaaatcaccgacctccggggcatcagcactaagggagctgaaagggccattactctgaagatggagattccaggcccgatgcctcccttaatccgagagatgctggagaaccctgaaatgtttgaggatgactcctcgcagcctggtccccaccccaatgcctctagcgaggatgaggttcctgggggccagggcaaagggggcctgaagtccccagcctgaccagggcccctgacctccccgctgtgggggttggggcttcaggcagcagactgaccatctcccagaccgccagtgactgggggaggacctgctctgccctctccccaccccttccaatgagctccttgtttttgccaaagtttctaggggtgcctctgtgttcatccccttcctgatctaaccggctccctcgccagtcccgggggcctgccctgctcccaccaggagagagggcaaagggatgagcctgggtttggactctaaaatctcagcactgccccatgggtcctagacttcccagggcaagaggaagaccctgccattccacagccccttcctctgccaggtgcttggctctctgagagcaaacaggaacactagagaccaaaaaggggacaaaggagaagggctgagcccaccttcttgctcctacccttggtgcctaatgctgtgtgatgcacctgcagggtgtgtgctagcctctgtgccccgtccttgtgccaggtcaaggtgggggcaggctgggccctgcatttctggggcaggaacagagggtgaaagggacagatagatgcaggtccattctgcacctcttggctcgggtgcagagttcaccctgtgccct

SEQ ID NO: 26077 - DNA, 1836 bp, Homo sapiens
  source 1..1836: mol_type = unassigned DNA
ctcttccccgcccaccccttacccgcatgcagcccagcgccctatgctagccctccccctccccccctgctggagcggggcgccgccgggggaggagggggaatcggctgcgggtccttggtgtttccagcacccagtttcccttcaagccgggtcgcgatgtacgactgtatggaaacgtttgccccgggtccgcgacggctgtacggggcggccgggcccggggccggcttgctgcgcagagccaccggcggctcctgtttcgccggacttgaatcttttgcctggccgcaacccgccagcctgcaatcggtggagacacagagcaccagctcagaggagatggtgcccagctcgccctcgccccctccgcctcctcgggtctacaagccatgcttcgtgtgcaatgacaagtcctctggctaccactatggggtcagctcttgtgaaggctgcaagggcttctttcgccgaagcatccagaagaacatggtgtacacgtgtcaccgcgacaaaaactgtatcatcaacaaggtgaccaggaatcgctgccagtactgccggctacagaagtgcttcgaagtgggcatgtccaaggaagctgtgcgaaatgaccggaacaagaagaagaaagaggtgaaggaagaagggtcacctgacagctatgagctgagccctcagttagaagagctcatcaccaaggtcagcaaagcccatcaggagactttcccctcgctctgccagctgggcaagtataccacgaactccagtgcagaccaccgcgtgcagctggatctggggctgtgggacaagttcagtgagctggctaccaagtgcatcatcaagatcgtggagtttgccaagcggttgcctggctttacagggctcagcattgctgaccagatcactctgctcaaagctgcctgcctagatatcctgatgctgcgtatctgcacaaggtacaccccagagcaggacaccatgaccttctccgacgggctgaccctgaaccggacccagatgcacaatgccggcttcgggcccctcacagaccttgtctttgcctttgctgggcagctcctgcccctggagatggatgacaccgagacagggctgctcagcgccatctgcctcatctgcggagaccgcatggacctggaggagcccgaaaaagtggacaagctgcaggagccactgctggaagccctgaggctgtacgcccggcgccggcggcccagccagccctacatgttcccaaggatgctaatgaaaatcaccgacctccggggcatcagcactaagggagctgaaagggccattactctgaagatggagattccaggcccgatgcctcccttaatccgagagatgctggagaaccctgaaatgtttgaggatgactcctcgcagcctggtccccaccccaatgcctctagcgaggatgaggttcctgggggccagggcaaagggggcctgaagtccccagcctgaccagggcccctgacctccccgctgtgggggttggggcttcaggcagcagactgaccatctcccagaccgccagtgactgggggaggacctgctctgccctctccccaccccttccaatgagctccttgtttttgccaaagtttctaggggtgcctctgtgttcatccccttcctgatctaaccggctccctcgccagtcccgggggcctgccctgctcccaccaggagagagggcaaagggatgagcctgggtttggactctaaaatctcagcactgccccatgggtcctagacttcccagggcaagaggaagaccctgccattccacagccccttcctctgcca

SEQ ID NO: 26078 - DNA, 2956 bp, Homo sapiens
  source 1..2956: mol_type = unassigned DNA
tggggggggggtggggagggagaaaaagaaagaaaatattttccgtgtccccgcctgcagagtcagtgtgcggtttgggagaaaatgtgtcggatattttggggcggtcacgtgggcgggcgggctccgagaggccccgggacagtcccagcctagagccgtgcccccccaggagccccccagtacggcgagccccggacattgcgacgctccatccaagagactgcccgacgccgggacctcggggctccgccgcctcccttccccctcccactccagctacggcccagttccctcaacctgacccagtatgtagaagccagtctctgcaggcggccagcgggacttttggaggcccagtgggcaggccaggcagggcgggtacggagcctcccaggctggggcagtgggcatgggcaggggctgtggctgaagacctcgcccgcccactgcagaccccaggggactctcacaccgcagctgccatggccaccaataaggagcgactctttgcggctggtgccctggggcctggatctggctacccaggggcaggtttccccttcgccttcccaggggcactcagggggtctccgcctttcgagatgctgagccctagcttccggggcctgggccagcctgacctccccaaggagatggcctctctgtcggtggagacacagagcaccagctcagaggagatggtgcccagctcgccctcgccccctccgcctcctcgggtctacaagccatgcttcgtgtgcaatgacaagtcctctggctaccactatggggtcagctcttgtgaaggctgcaagggcttctttcgccgaagcatccagaagaacatggtgtacacgtgtcaccgcgacaaaaactgtatcatcaacaaggtgaccaggaatcgctgccagtactgccggctacagaagtgcttcgaagtgggcatgtccaaggaagctgtgcgaaatgaccggaacaagaagaagaaagaggtgaaggaagaagggtcacctgacagctatgagctgagccctcagttagaagagctcatcaccaaggtcagcaaagcccatcaggagactttcccctcgctctgccagctgggcaagtataccacgaactccagtgcagaccaccgcgtgcagctggatctggggctgtgggacaagttcagtgagctggctaccaagtgcatcatcaagatcgtggagtttgccaagcggttgcctggctttacagggctcagcattgctgaccagatcactctgctcaaagctgcctgcctagatatcctgatgctgcgtatctgcacaaggtacaccccagagcaggacaccatgaccttctccgacgggctgaccctgaaccggacccagatgcacaatgccggcttcgggcccctcacagaccttgtctttgcctttgctgggcagctcctgcccctggagatggatgacaccgagacagggctgctcagcgccatctgcctcatctgcggagaccgcatggacctggaggagcccgaaaaagtggacaagctgcaggagccactgctggaagccctgaggctgtacgcccggcgccggcggcccagccagccctacatgttcccaaggatgctaatgaaaatcaccgacctccggggcatcagcactaagggagctgaaagggccattactctgaagatggagattccaggcccgatgcctcccttaatccgagagatgctggagaaccctgaaatgtttgaggatgactcctcgcagcctggtccccaccccaatgcctctagcgaggatgaggttcctgggggccagggcaaagggggcctgaagtccccagcctgaccagggcccctgacctccccgctgtgggggttggggcttcaggcagcagactgaccatctcccagaccgccagtgactgggggaggacctgctctgccctctccccaccccttccaatgagctccttgtttttgccaaagtttctaggggtgcctctgtgttcatccccttcctgatctaaccggctccctcgccagtcccgggggcctgccctgctcccaccaggagagagggcaaagggatgagcctgggtttggactctaaaatctcagcactgccccatgggtcctagacttcccagggcaagaggaagaccctgccattccacagccccttcctctgccaggtgcttggctctctgagagcaaacaggaacactagagaccaaaaaggggacaaaggagaagggctgagcccaccttcttgctcctacccttggtgcctaatgctgtgtgatgcacctgcagggtgtgtgctagcctctgtgccccgtccttgtgccaggtcaaggtgggggcaggctgggccctgcatttctggggcaggaacagagggtgaaagggacagatagatgcaggtccattctgcacctcttggctcgggtgcagagttcaccctgtgccctccgttataagtccctcccccagccctgtcatgtgccttgggctcctcctgccctccatctcagccattggggcagggaccctcctacactacagaggggccaggggatccctctctccctagtgccttccaccctttactccccagagcagcttggcccagggaggggggatgctgcttagctgatcccgccctgacccagaggaagcctctatttatttattagcttttgtttacaccgtggaattgaccccttcctccaggggtcttgggtgggggagcccagggcccctgtgacccctcctttcttcctccaatccccagtttgtatttagctgccaaataagattcccattggctccctgtgttctcttggggggtcagggtgctgtcccctcccctctgtttacatctcccctctaccccgctgtatcgcatattgctgagttttctatttttgcaaaataaagtgatggaaactc

SEQ ID NO: 26079 - DNA, 2959 bp, Homo sapiens
  source 1..2959: mol_type = unassigned DNA
tggggggggggtggggagggagaaaaagaaagaaaatattttccgtgtccccgcctgcagagtcagtgtgcggtttgggagaaaatgtgtcggatattttggggcggtcacgtgggcgggcgggctccgagaggccccgggacagtcccagcctagagccgtgcccccccaggagccccccagtacggcgagccccggacattgcgacgctccatccaagagactgcccgacgccgggacctcggggctccgccgcctcccttccccctcccactccagcagctacggcccagttccctcaacctgacccagtatgtagaagccagtctctgcaggcggccagcgggacttttggaggcccagtgggcaggccaggcagggcgggtacggagcctcccaggctggggcagtgggcatgggcaggggctgtggctgaagacctcgcccgcccactgcagaccccaggggactctcacaccgcagctgccatggccaccaataaggagcgactctttgcggctggtgccctggggcctggatctggctacccaggggcaggtttccccttcgccttcccaggggcactcagggggtctccgcctttcgagatgctgagccctagcttccggggcctgggccagcctgacctccccaaggagatggcctctctgtcggtggagacacagagcaccagctcagaggagatggtgcccagctcgccctcgccccctccgcctcctcgggtctacaagccatgcttcgtgtgcaatgacaagtcctctggctaccactatggggtcagctcttgtgaaggctgcaagggcttctttcgccgaagcatccagaagaacatggtgtacacgtgtcaccgcgacaaaaactgtatcatcaacaaggtgaccaggaatcgctgccagtactgccggctacagaagtgcttcgaagtgggcatgtccaaggaagctgtgcgaaatgaccggaacaagaagaagaaagaggtgaaggaagaagggtcacctgacagctatgagctgagccctcagttagaagagctcatcaccaaggtcagcaaagcccatcaggagactttcccctcgctctgccagctgggcaagtataccacgaactccagtgcagaccaccgcgtgcagctggatctggggctgtgggacaagttcagtgagctggctaccaagtgcatcatcaagatcgtggagtttgccaagcggttgcctggctttacagggctcagcattgctgaccagatcactctgctcaaagctgcctgcctagatatcctgatgctgcgtatctgcacaaggtacaccccagagcaggacaccatgaccttctccgacgggctgaccctgaaccggacccagatgcacaatgccggcttcgggcccctcacagaccttgtctttgcctttgctgggcagctcctgcccctggagatggatgacaccgagacagggctgctcagcgccatctgcctcatctgcggagaccgcatggacctggaggagcccgaaaaagtggacaagctgcaggagccactgctggaagccctgaggctgtacgcccggcgccggcggcccagccagccctacatgttcccaaggatgctaatgaaaatcaccgacctccggggcatcagcactaagggagctgaaagggccattactctgaagatggagattccaggcccgatgcctcccttaatccgagagatgctggagaaccctgaaatgtttgaggatgactcctcgcagcctggtccccaccccaatgcctctagcgaggatgaggttcctgggggccagggcaaagggggcctgaagtccccagcctgaccagggcccctgacctccccgctgtgggggttggggcttcaggcagcagactgaccatctcccagaccgccagtgactgggggaggacctgctctgccctctccccaccccttccaatgagctccttgtttttgccaaagtttctaggggtgcctctgtgttcatccccttcctgatctaaccggctccctcgccagtcccgggggcctgccctgctcccaccaggagagagggcaaagggatgagcctgggtttggactctaaaatctcagcactgccccatgggtcctagacttcccagggcaagaggaagaccctgccattccacagccccttcctctgccaggtgcttggctctctgagagcaaacaggaacactagagaccaaaaaggggacaaaggagaagggctgagcccaccttcttgctcctacccttggtgcctaatgctgtgtgatgcacctgcagggtgtgtgctagcctctgtgccccgtccttgtgccaggtcaaggtgggggcaggctgggccctgcatttctggggcaggaacagagggtgaaagggacagatagatgcaggtccattctgcacctcttggctcgggtgcagagttcaccctgtgccctccgttataagtccctcccccagccctgtcatgtgccttgggctcctcctgccctccatctcagccattggggcagggaccctcctacactacagaggggccaggggatccctctctccctagtgccttccaccctttactccccagagcagcttggcccagggaggggggatgctgcttagctgatcccgccctgacccagaggaagcctctatttatttattagcttttgtttacaccgtggaattgaccccttcctccaggggtcttgggtgggggagcccagggcccctgtgacccctcctttcttcctccaatccccagtttgtatttagctgccaaataagattcccattggctccctgtgttctcttggggggtcagggtgctgtcccctcccctctgtttacatctcccctctaccccgctgtatcgcatattgctgagttttctatttttgcaaaataaagtgatggaaactc

SEQ ID NO: 26080 - DNA, 1757 bp, Homo sapiens
  source 1..1757: mol_type = unassigned DNA
catcatcaagatgagtttgccaagcggttgcctggctttacagggctcagcattgctgaccagatcactctgctcaaagctgcctgcctagatatcctgatgctgcgtatctgcacaaggtacaccccagagcaggacaccatgaccttctccgacgggctgaccctgaaccggacccagatgcacaatgccggcttcgggcccctcacagaccttgtctttgcctttgctgggcagctcctgcccctggagatggatgacaccgagacagggctgctcagcgccatctgcctcatctgcggagaccgcatggacctggaggagcccgaaaaagtggacaagctgcaggagccactgctggaagccctgaggctgtacgcccggcgccggcggcccagccagccctacatgttcccaaggatgctaatgaaaatcaccgacctccggggcatcagcactaagggagctgaaagggccattactctgaagatggagattccaggcccgatgcctcccttaatccgagagatgctggagaaccctgaaatgtttgaggatgactcctcgcagcctggtccccaccccaatgcctctagcgaggatgaggttcctgggggccagggcaaagggggcctgaagtccccagcctgaccagggcccctgacctccccgctgtgggggttggggcttcaggcagcagactgaccatctcccagaccgccagtgactgggggaggacctgctctgccctctccccaccccttccaatgagctccttgtttttgccaaagtttctaggggtgcctctgtgttcatccccttcctgatctaaccggctccctcgccagtcccgggggcctgccctgctcccaccaggagagagggcaaagggatgagcctgggtttggactctaaaatctcagcactgccccatgggtcctagacttcccagggcaagaggaagaccctgccattccacagccccttcctctgccaggtgcttggctctctgagagcaaacaggaacactagagaccaaaaaggggacaaaggagaagggctgagcccaccttcttgctcctacccttggtgcctaatgctgtgtgatgcacctgcagggtgtgtgctagcctctgtgccccgtccttgtgccaggtcaaggtgggggcaggctgggccctgcatttctggggcaggaacagagggtgaaagggacagatagatgcaggtccattctgcacctcttggctcgggtgcagagttcaccctgtgccctccgttataagtccctcccccagccctgtcatgtgccttgggctcctcctgccctccatctcagccattggggcagggaccctcctacactacagaggggccaggggatccctctctccctagtgccttccaccctttactccccagagcagcttggcccagggaggggggatgctgcttagctgatcccgccctgacccagaggaagcctctatttatttattagcttttgtttacaccgtggaattgaccccttcctccaggggtcttgggtgggggagcccagggcccctgtgacccctcctttcttcctccaatccccagtttgtatttagctgccaaataagattcccattggctccctgtgttctcttggggggtcagggtgctgtcccctcccctctgtttacatctcccctctaccccgctgtatcgcatattgctgagttttctatttttgcaaaataaagtgatggaaactc

SEQ ID NO: 26081 - DNA, 1779 bp, Homo sapiens
  source 1..1779: mol_type = unassigned DNA
caagccccaccccccacccctccaggcttcgcttttaaaaaaggtctccccagtgctagctgccgaagcacccagataagagctggacggaggctaaagcggcagccccagcttcgcgccccgcccagtccctttcccctgctggggatcccccctcttccccgcccaccccttacccgcatgcagcccagcgccctatgctagccctccccctccccccctgctggagcggggcgccgccgggggaggagggggaatcggctgcgggtccttggtgtttccagcacccagtttcccttcaagccgggtcgcgatgtacgactgtatggaaacgtttgccccgggtccgcgacggctgtacggggcggccgggcccggggccggcttgctgcgcagagccaccggcggctcctgtttcgccggacttgaatcttttgcctggccgcaacccgccagcctgcaatggcttctttcgccgaagcatccagaagaacatggtgtacacgtgtcaccgcgacaaaaactgtatcatcaacaaggtgaccaggaatcgctgccagtactgccggctacagaagtgcttcgaagtgggcatgtccaaggaagctgtgcgaaatgaccggaacaagaagaagaaagaggtgaaggaagaagggtcacctgacagctatgagctgagccctcagttagaagagctcatcaccaaggtcagcaaagcccatcaggagactttcccctcgctctgccagctgggcaagtataccacgaactccagtgcagaccaccgcgtgcagctggatctggggctgtgggacaagttcagtgagctggctaccaagtgcatcatcaagatcgtggagtttgccaagcggttgcctggctttacagggctcagcattgctgaccagatcactctgctcaaagctgcctgcctagatatcctgatgctgcgtatctgcacaaggtacaccccagagcaggacaccatgaccttctccgacgggctgaccctgaaccggacccagatgcacaatgccggcttcgggcccctcacagaccttgtctttgcctttgctgggcagctcctgcccctggagatggatgacaccgagacagggctgctcagcgccatctgcctcatctgcggagaccgcatggacctggaggagcccgaaaaagtggacaagctgcaggagccactgctggaagccctgaggctgtacgcccggcgccggcggcccagccagccctacatgttcccaaggatgctaatgaaaatcaccgacctccggggcatcagcactaagggagctgaaagggccattactctgaagatggagattccaggcccgatgcctcccttaatccgagagatgctggagaaccctgaaatgtttgaggatgactcctcgcagcctggtccccaccccaatgcctctagcgaggatgaggttcctgggggccagggcaaagggggcctgaagtccccagcctgaccagggcccctgacctccccgctgtgggggttggggcttcaggcagcagactgaccatctcccagaccgccagtgactgggggaggacctgctctgccctctccccaccccttccaatgagctccttgtttttgccaaagtttctaggggtgcctctgtgttcatccccttcctgatctaaccggctccctcgccagtcccgggggcctgccctgctcccaccaggagagagggcaaagggatgagcctgggtttggactctaaaatctcagcactgccccat

SEQ ID NO: 26082 - DNA, 1846 bp, Homo sapiens
  source 1..1846: mol_type = unassigned DNA
cgcccgccgcccgctgcctgcgccgccggccgggcatgagttagtcgcagacatggacaccaaacatttcctgccgctcgatttctccacccaggtgaactcctccctcacctccccgacggggcgaggctccatggctgccccctcgctgcacccgtccctggggcctggcatcggctccccgggacagctgcattctcccatcagcaccctgagctcccccatcaacggcatgggcccgcctttctcggtcatcagctcccccatgggcccccactccatgtcggtgcccaccacacccaccctgggcttcagcactggcagcccccagctcagctcacctatgaaccccgtcagcagcagcgaggacatcaagccccccctgggcctcaatggcgtcctcaaggtccccgcccacccctcaggaaacatggcttccttcaccaagcacatctgcgccatctgcggggaccgctcctcaggcaagcactatggagtgtacagctgcgaggggtgcaagggcttcttcaagcggacggtgcgcaaggacctgacctacacctgccgcgacaacaaggactgcctgattgacaagcggcagcggaaccggtgccagtactgccgctaccagaagtgcctggccatgggcatgaagcgggaagccgtgcaggaggagcggcagcgtggcaaggaccggaacgagaatgaggtggagtcgaccagcagcgccaacgaggacatgccggtggagaggatcctggaggctgagctggccgtggagcccaagaccgagacctacgtggaggcaaacatggggctgaaccccagctcgccgaacgaccctgtcaccaacatttgccaagcagccgacaaacagcttttcaccctggtggagtgggccaagcggatcccacacttctcagagctgcccctggacgaccaggtcatcctgctgcgggcaggctggaatgagctgctcatcgcctccttctcccaccgctccatcgccgtgaaggacgggatcctcctggccaccgggctgcacgtccaccggaacagcgcccacagcgcaggggtgggcgccatctttgacagggtgctgacggagcttgtgtccaagatgcgggacatgcagatggacaagacggagctgggctgcctgcgcgccatcgtcctctttaaccctgactccaaggggctctcgaacccggccgaggtggaggcgctgagggagaaggtctatgcgtccttggaggcctactgcaagcacaagtacccagagcagccgggaaggttcgctaagctcttgctccgcctgccggctctgcgctccatcgggctcaaatgcctggaacatctcttcttcttcaagctcatcggggacacacccattgacaccttccttatggagatgctggaggcgccgcaccaaatgacttaggcctgcgggcccatcctttgtgcccacccgttctggccaccctgcctggacgccagctgttcttctcagcctgagccctgtccctgcccttctctgcctggcctgtttggactttggggcacagcctgtcactgctctgcctaagagatgtgttgtcaccctccttatttctgttactacttgtctgtggcccagggcagtggctttcctgaggcagcagccttcgtggcaagaactagcgtgagcccagccaggcgcctccccaccgggctctcaggacaccctgccacaccccacggggcttgggcgactacagggtcttcgggccccagccctggagctgcaggagttgggaacggggcttttgtttccgttgctgtttatcgatgctggttttcagaattc

SEQ ID NO: 26083 - DNA, 2421 bp, Homo sapiens
  source 1..2421: mol_type = unassigned DNA
actagaccagcgagccctggagggctgggcagggccttgtcccctggtgcctcccggagcccagcacggggcagggccagctgggcacttagtttggacgagctctgtccctccaggggcttcactttcgccttctgcagcgtgggggatcatgtgtgaccttggccagcccctgacctccctgagccgcagcctctgcatctgggacacccagggtttcccatgcagggagtgtcaagtgtgggtgcaaagcccaggcaccgcacccctctgcagacgtctggggctttctcttgccccttcagttccctcccttctctgagaagcgcacctgctgcctgtggacatgaacactgggcatttggtgagtcacacagtggccacccgcttctccagtgggagcttcatggcacccccactgtgctgagttgtcacgggggacctcctggcctctcgcagcccacctgagtcctgcagggaccaagcatccttgtaaagcctcacagcccacctgggcagatcgaggaagaacctagaagccagaacaagctggggctggaagactcattccaggcaccgaggtccatgtgaaaggaggctttgcggtggtttctgctttgcttgcattgagcctcaaactcttcctgtcccgtgagaaggggggatgggatttggaggcctgaggaaggaaggaggggagcttcctgcgcacaagcggcggcaggggtttgcagaagtggaggctgggggctgcctggccaagcgcttaccgccctgcgcagccaggctggctggcaggctgcagcgggaagcgcctgtgggtcctcggcgctgactgcagagctgggtggaggcagcggaaccaaaactgctgtgtcactgcacgctgcagctgttgccagggtgaccggctcagctcacctatgaaccccgtcagcagcagcgaggacatcaagccccccctgggcctcaatggcgtcctcaaggtccccgcccacccctcaggaaacatggcttccttcaccaagcacatctgcgccatctgcggggaccgctcctcaggcaagcactatggagtgtacagctgcgaggggtgcaagggcttcttcaagcggacggtgcgcaaggacctgacctacacctgccgcgacaacaaggactgcctgattgacaagcggcagcggaaccggtgccagtactgccgctaccagaagtgcctggccatgggcatgaagcgggaagccgtgcaggaggagcggcagcgtggcaaggaccggaacgagaatgaggtggagtcgaccagcagcgccaacgaggacatgccggtggagaggatcctggaggctgagctggccgtggagcccaagaccgagacctacgtggaggcaaacatggggctgaaccccagctcgccgaacgaccctgtcaccaacatttgccaagcagccgacaaacagcttttcaccctggtggagtgggccaagcggatcccacacttctcagagctgcccctggacgaccaggtcatcctgctgcgggcaggctggaatgagctgctcatcgcctccttctcccaccgctccatcgccgtgaaggacgggatcctcctggccaccgggctgcacgtccaccggaacagcgcccacagcgcaggggtgggcgccatctttgacagggtgctgacggagcttgtgtccaagatgcgggacatgcagatggacaagacggagctgggctgcctgcgcgccatcgtcctctttaaccctgactccaaggggctctcgaacccggccgaggtggaggcgctgagggagaaggtctatgcgtccttggaggcctactgcaagcacaagtacccagagcagccgggaaggttcgctaagctcttgctccgcctgccggctctgcgctccatcgggctcaaatgcctggaacatctcttcttcttcaagctcatcggggacacacccattgacaccttccttatggagatgctggaggcgccgcaccaaatgacttaggcctgcgggcccatcctttgtgcccacccgttctggccaccctgcctggacgccagctgttcttctcagcctgagccctgtccctgcccttctctgcctggcctgtttggactttggggcacagcctgtcactgctctgcctaagagatgtgttgtcaccctccttatttctgttactacttgtctgtggcccagggcagtggctttcctgaggcagcagccttcgtggcaagaactagcgtgagcccagccaggcgcctccccaccgggctctcaggacaccctgccacaccccacggggcttgggcgactacagggtcttcgggccccagccctggagctgcaggagttgggaacggggcttttgtttccgttgctgtttatcgatgctggttttcag

SEQ ID NO: 26084 - DNA, 2908 bp, Homo sapiens
  source 1..2908: mol_type = unassigned DNA
ggcgggaactcgcgccgagacttcccgtctgtacaaagatggctgccacattggcgctgtcattttggtactgagcagagcgacgggcttaattcgacccaatccaggccagagtctttctctcaggggcttcctcgtgctcagctaatcctccgatcaatccttgggaatccctgggacctcttcggtatccctactctcagccagggatcatgtcttgggccgctcgcccgcccttcctccctcagcggcatgccgcagggcagtgtgggccggtgggggtgcgaaaagaaatgcattgtggggtcgcgtcccggtggcggcggcgacggccctggctggatcccgcagcggcggcggcggcggcggtggcaggcggagaacaacaaaccccggagccggagccaggggaggctggacgggacgggatgggcgacagcgggcgggactcccgaagcccagacagctcctccccaaatccccttccccagggagtccctcccccttctcctcctgggccacccctacccccttcaacagctccatcccttggaggctctggggccccacccccacccccgatgccaccacccccactgggctctccctttccagtcatcagttcttccatggggtcccctggtctgccccctccagctcccccaggattctccgggcctgtcagcagcccccagattaactcaacagtgtcactccctgggggtgggtctggcccccctgaagatgtgaagccaccagtcttaggggtccggggcctgcactgtccaccccctccaggtggccctggggctggcaaacggctatgtgcaatctgcggggacagaagctcaggcaaacactacggggtttacagctgtgagggttgcaagggcttcttcaaacgcaccatccgcaaagaccttacatactcttgccgggacaacaaagactgcacagtggacaagcgccagcggaaccgctgtcagtactgccgctatcagaagtgcctggccactggcatgaagagggaggcggtacaggaggagcgtcagcggggaaaggacaaggatggggatggggagggggctgggggagcccccgaggagatgcctgtggacaggatcctggaggcagagcttgctgtggaacagaagagtgaccagggcgttgagggtcctgggggaaccgggggtagcggcagcagcccaaatgaccctgtgactaacatctgtcaggcagctgacaaacagctattcacgcttgttgagtgggcgaagaggatcccacacttttcctccttgcctctggatgatcaggtcatattgctgcgggcaggctggaatgaactcctcattgcctccttctcacaccgatccattgatgttcgagatggcatcctccttgccacaggtcttcacgtgcaccgcaactcagcccattcagcaggagtaggagccatctttgatcgggtgctgacagagctagtgtccaaaatgcgtgacatgaggatggacaagacagagcttggctgcctgagggcaatcattctgtttaatccagatgccaagggcctctccaaccctagtgaggtggaggtcctgcgggagaaagtgtatgcatcactggagacctactgcaaacagaagtaccctgagcagcagggacggtttgccaagctgctgctacgtcttcctgccctccggtccattggccttaagtgtctagagcatctgtttttcttcaagctcattggtgacacccccatcgacaccttcctcatggagatgcttgaggctccccatcaactggcctgagctcagacccagacgtggtgcttctcacactggaggagcacacatccaagagggactccaagccctggggcagggtggggggccatgttcccagaaccttgatggggtgagaagtacagggcagaaccaagaacataaaccctccaagggatctgcttgatatcccaagttggaagggaccccagatacctgtgaggactggttgtctctcttcggtggccttgagtctctgaatttgtcgggttctcccatgatttggggtgatttctcaccctctgtccttcccccagcacaaagcactggccttgcctccaggaccttgcttccttctcatcttgcctcattttgcttcccatctgaagagtggaaatggggaactcccccagaggtggatactggggggcaggcctcccaagctgatggacatgagagtagggccctgacaggccttcctcctctcaaacctggcagatgggggcctctctggaagagggaggggccctgtcactgtccagagtctctttttacacttcacctccttctgcagtcagactgaaatataaaaaaggtggtggtggtggtgaaggggctggtggagatgtaggaaccgatctgctatttttaatttcctgtgaggatagagacttgcagttagactcaaagaagtactgtactttcccaggttgactaagaaatgccagtggtggaggtgggtgtttgggaaaggcagggccctgaaatggcctgtccctagggctctccaagcactagccttcccagcttcccgccgccccccctatctcttcctgtctaacttggggaaggggcctgggctgtgaggacagggcccccacaggggatggtttcacgagtgtagtcccggaggccttccctttacagctctcctccagccctgggcacatagcataggctggggacacaggatcctggcctgagaattgaggggaggtggccagcccgcagaggtggggtgctggggctgcatgatttttgccctgcgtcccttctctttggggctcctttcccctctcatacataaaatcgctttcaaattaaaatcgctgttttctgga

SEQ ID NO: 26085 - DNA, 2846 bp, Homo sapiens
  source 1..2846: mol_type = unassigned DNA
gcagagcgacgggcttaattcgacccaatccaggccagagtctttctctcaggggcttcctcgtgctcagctaatcctccgatcaatccttgggaatccctgggacctcttcggtatccctactctcagccagggatcatgtcttgggccgctcgcccgcccttcctccctcagcggcatgccgcagggcagtgtgggccggtgggggtgcgaaaagaaatgcattgtggggtcgcgtcccggtggcggcggcgacggccctggctggatcccgcagcggcggcggcggcggcggtggcaggcggagaacaacaaaccccggagccggagccaggggaggctggacgggacgggatgggcgacagcgggcgggactcccgaagcccagacagctcctccccaaatccccttccccagggagtccctcccccttctcctcctgggccacccctacccccttcaacagctccatcccttggaggctctggggccccacccccacccccgatgccaccacccccactgggctctccctttccagtcatcagttcttccatggggtcccctggtctgccccctccagctcccccaggattctccgggcctgtcagcagcccccagattaactcaacagtgtcactccctgggggtgggtctggcccccctgaagatgtgaagccaccagtcttaggggtccggggcctgcactgtccaccccctccaggtggccctggggctggcaaacggctatgtgcaatctgcggggacagaagctcaggcaaacactacggggtttacagctgtgagggttgcaagggcttcttcaaacgcaccatccgcaaagaccttacatactcttgccgggacaacaaagactgcacagtggacaagcgccagcggaaccgctgtcagtactgccgctatcagaagtgcctggccactggcatgaagagggaggcggtacaggaggagcgtcagcggggaaaggacaaggatggggatggggagggggctgggggagcccccgaggagatgcctgtggacaggatcctggaggcagagcttgctgtggaacagaagagtgaccagggcgttgagggtcctgggggaaccgggggtagcggcagcagcccaaatgaccctgtgactaacatctgtcaggcagctgacaaacagctattcacgcttgttgagtgggcgaagaggatcccacacttttcctccttgcctctggatgatcaggtcatattgctgcgggcaggctggaatgaactcctcattgcctccttctcacaccgatccattgatgttcgagatggcatcctccttgccacaggtcttcacgtgcaccgcaactcagcccattcagcaggagtaggagccatctttgatcggtccctctccagggtgctgacagagctagtgtccaaaatgcgtgacatgaggatggacaagacagagcttggctgcctgagggcaatcattctgtttaatccagatgccaagggcctctccaaccctagtgaggtggaggtcctgcgggagaaagtgtatgcatcactggagacctactgcaaacagaagtaccctgagcagcagggacggtttgccaagctgctgctacgtcttcctgccctccggtccattggccttaagtgtctagagcatctgtttttcttcaagctcattggtgacacccccatcgacaccttcctcatggagatgcttgaggctccccatcaactggcctgagctcagacccagacgtggtgcttctcacactggaggagcacacatccaagagggactccaagccctggggcagggtggggggccatgttcccagaaccttgatggggtgagaagtacagggcagaaccaagaacataaaccctccaagggatctgcttgatatcccaagttggaagggaccccagatacctgtgaggactggttgtctctcttcggtggccttgagtctctgaatttgtcgggttctcccatgatttggggtgatttctcaccctctgtccttcccccagcacaaagcactggccttgcctccaggaccttgcttccttctcatcttgcctcattttgcttcccatctgaagagtggaaatggggaactcccccagaggtggatactggggggcaggcctcccaagctgatggacatgagagtagggccctgacaggccttcctcctctcaaacctggcagatgggggcctctctggaagagggaggggccctgtcactgtccagagtctctttttacacttcacctccttctgcagtcagactgaaatataaaaaaggtggtggtggtggtgaaggggctggtggagatgtaggaaccgatctgctatttttaatttcctgtgaggatagagacttgcagttagactcaaagaagtactgtactttcccaggttgactaagaaatgccagtggtggaggtgggtgtttgggaaaggcagggccctgaaatggcctgtccctagggctctccaagcactagccttcccagcttcccgccgccccccctatctcttcctgtctaacttggggaaggggcctgggctgtgaggacagggcccccacaggggatggtttcacgagtgtagtcccggaggccttccctttacagctctcctccagccctgggcacatagcataggctggggacacaggatcctggcctgagaattgaggggaggtggccagcccgcagaggtggggtgctggggctgcatgatttttgccctgcgtcccttctctttggggctcctttcccctctcatacataaaatcgctttcaaattaaaatcgctgttttctgga

SEQ ID NO: 26086 - DNA, 2832 bp, Homo sapiens
  source 1..2832: mol_type = unassigned DNA
gcagagcgacgggcttaattcgacccaatccaggccagagtctttctctcaggggcttcctcgtgctcagctaatcctccgatcaatccttgggaatccctgggacctcttcggtatccctactctcagccagggatcatgtcttgggccgctcgcccgcccttcctccctcagcggcatgccgcagggcagtgtgggccggtgggggtgcgaaaagaaatgcattgtggggtcgcgtcccggtggcggcggcgacggccctggctggatcccgcagcggcggcggcggcggcggtggcaggcggagaacaacaaaccccggagccggagccaggggaggctggacgggacgggatgggcgacagcgggcgggactcccgaagcccagacagctcctccccaaatccccttccccagggagtccctcccccttctcctcctgggccacccctacccccttcaacagctccatcccttggaggctctggggccccacccccacccccgatgccaccacccccactgggctctccctttccagtcatcagttcttccatggggtcccctggtctgccccctccagctcccccaggattctccgggcctgtcagcagcccccagattaactcaacagtgtcactccctgggggtgggtctggcccccctgaagatgtgaagccaccagtcttaggggtccggggcctgcactgtccaccccctccaggtggccctggggctggcaaacggctatgtgcaatctgcggggacagaagctcaggcaaacactacggggtttacagctgtgagggttgcaagggcttcttcaaacgcaccatccgcaaagaccttacatactcttgccgggacaacaaagactgcacagtggacaagcgccagcggaaccgctgtcagtactgccgctatcagaagtgcctggccactggcatgaagagggaggcggtacaggaggagcgtcagcggggaaaggacaaggatggggatggggagggggctgggggagcccccgaggagatgcctgtggacaggatcctggaggcagagcttgctgtggaacagaagagtgaccagggcgttgagggtcctgggggaaccgggggtagcggcagcagcccaaatgaccctgtgactaacatctgtcaggcagctgacaaacagctattcacgcttgttgagtgggcgaagaggatcccacacttttcctccttgcctctggatgatcaggtcatattgctgcgggcaggctggaatgaactcctcattgcctccttttcacaccgatccattgatgttcgagatggcatcctccttgccacaggtcttcacgtgcaccgcaactcagcccattcagcaggagtaggagccatctttgatcggtccctctccagggtgctgacagagctagtgtccaaaatgcgtgacatgaggatggacaagacagagcttggctgcctgagggcaatcattctgtttaatccagatgccaagggcctctccaaccctagtgaggtggaggtcctgcgggagaaagtgtatgcatcactggagacctactgcaaacagaagtaccctgagcagcagggacggtttgccaagctgctgctacgtcttcctgccctccggtccattggccttaagtgtctagagcatctgtttttcttcaagctcattggtgacacccccatcgacaccttcctcatggagatgcttgaggctccccatcaactggcctgagctcagacccagacgtggtgcttctcacactggaggagcacacatccaagagggactccaagccctggggcagggtggggggccatgttcccagaaccttgatggggtgagaagtacagggcagaaccaagaacataaaccctccaagggatctgcttgatatcccaagttggaagggaccccagatacctgtgaggactggttgtctctcttcggtggccttgagtctctgaatttgtcggggtctcccatgatttggggtgatttctcaccctctgtccttcccccagcacaaagcactggccttgcctccaggaccttgcttccttctcatcttgcctcattttgcttcccatctgaagagtggaaatggggatctcccccagaggtggatactggggggcaggcctcccaagctgatggacatgagagtagggccctgacaggccttcctcctctcaaacctggcagatgggggcctctctggaagagggaggggccctgtcactgtccagagtctctttttacacttcacctccttctgcagtcagactgaaatataaaaaaggtggtggtggtggtgaaggggctggtggagatgtaggaaccgatctgctatttttaatttcctgtgaggatagagacttgcagttagactcaaagaagtactgtactttcccaggttgactaagaaatgccagtggtggaggtgggtgtttgggaaaggcagggccctgaaatggcctgtccctagggctctccaagcactagccttcccagcttcccgccgcccccccccatctcttcctgtctaacttggggaaggggcctgggctgtgaggacagggcccccacaggggatggtttcacgagtgtagtcccggaggccttccctttacagctctcctccagccctgggcacatagcataggctggggacacaggatcctggcctgagaattgaggggaggtggccagcccgcagaggtggggtgctggggctgcatgatttttgccctgcgtcccttctctttggggctcctttcccctctcatacataaaatcgctttcaaattaaaa

SEQ ID NO: 26087 - DNA, 2909 bp, Homo sapiens
  source 1..2909: mol_type = unassigned DNA
ggcgggaactcgcgccgagacttcccgtctgtacaaagatggctgccacattggcgctgtcattttggtactgagcagagcgacgggcttaattcgacccaatccaggccagagtctttctctcaggggcttcctcgtgctcagctaatcctccgatcaatccttgggaatccctgggacctcttcggtatccctactctcagccagggatcatgtcttgggccgctcgcccgcccttcctccctcagcggcatgccgcagggcagtgtgggccggtgggggtgcgaaaagaaatgcattgtggggtcgcgtcccggtggcggcggcgacggccctggctggatcccgcagcggcggcggcggcggcggtggcaggcggagaacaacaaaccccggagccggagccaggggaggctggacgggacgggatgggcgacagcgggcgggactcccgaagcccagacagctcctccccaaatccccttccccagggagtccctcccccttctcctcctgggccacccctacccccttcaacagctccatcccttggaggctctggggccccacccccacccccgatgccaccacccccactgggctctccctttccagtcatcagttcttccatggggtcccctggtctgccccctccagctcccccaggattctccgggcctgtcagcagcccccagattaactcaacagtgtcactccctgggggtgggtctggcccccctgaagatgtgaagccaccagtcttaggggtccggggcctgcactgtccaccccctccaggtggccctggggctggcaaacggctatgtgcaatctgcggggacagaagctcaggcaaacactacggggtttacagctgtgagggttgcaagggcttcttcaaacgcaccatccgcaaagaccttacatactcttgccgggacaacaaagactgcacagtggacaagcgccagcggaaccgctgtcagtactgccgctatcagaagtgcctggccactggcatgaagagggaggcggtacaggaggagcgtcagcggggaaaggacaaggatggggatggggagggggctgggggagcccccgaggagatgcctgtggacaggatcctggaggcagagcttgctgtggaacagaagagtgaccagggcgttgagggtcctgggggaaccgggggtagcggcagcagcccaaatgaccctgtgactaacatctgtcaggcagctgacaaacagctattcacgcttgttgagtgggcgaagaggatcccacacttttcctccttgcctctggatgatcaggtcatattgctgcgggcaggctggaatgaactcctcattgcctccttttcacaccgatccattgatgttcgagatggcatcctccttgccacaggtcttcacgtgcaccgcaactcagcccattcagcaggagtaggagccatctttgatcgggtgctgacagagctagtgtccaaaatgcgtgacatgaggatggacaagacagagcttggctgcctgagggcaatcattctgtttaatccagatgccaagggcctctccaaccctagtgaggtggaggtcctgcgggagaaagtgtatgcatcactggagacctactgcaaacagaagtaccctgagcagcagggacggtttgccaagctgctgctacgtcttcctgccctccggtccattggccttaagtgtctagagcatctgtttttcttcaagctcattggtgacacccccatcgacaccttcctcatggagatgcttgaggctccccatcaactggcctgagctcagacccagacgtggtgcttctcacactggaggagcacacatccaagagggactccaagccctggggcagggtggggggccatgttcccagaaccttgatggggtgagaagtacagggcagaaccaagaacataaaccctccaagggatctgcttgatatcccaagttggaagggaccccagatacctgtgaggactggttgtctctcttcggtggccttgagtctctgaatttgtcggggtctcccatgatttggggtgatttctcaccctctgtccttcccccagcacaaagcactggccttgcctccaggaccttgcttccttctcatcttgcctcattttgcttcccatctgaagagtggaaatggggatctcccccagaggtggatactggggggcaggcctcccaagctgatggacatgagagtagggccctgacaggccttcctcctctcaaacctggcagatgggggcctctctggaagagggaggggccctgtcactgtccagagtctctttttacacttcacctccttctgcagtcagactgaaatataaaaaaggtggtggtggtggtgaaggggctggtggagatgtaggaaccgatctgctatttttaatttcctgtgaggatagagacttgcagttagactcaaagaagtactgtactttcccaggttgactaagaaatgccagtggtggaggtgggtgtttgggaaaggcagggccctgaaatggcctgtccctagggctctccaagcactagccttcccagcttcccgccgcccccccccatctcttcctgtctaacttggggaaggggcctgggctgtgaggacagggcccccacaggggatggtttcacgagtgtagtcccggaggccttccctttacagctctcctccagccctgggcacatagcataggctggggacacaggatcctggcctgagaattgaggggaggtggccagcccgcagaggtggggtgctggggctgcatgatttttgccctgcgtcccttctctttggggctcctttcccctctcatacataaaatcgctttcaaattaaaatcgctgttttctgga

SEQ ID NO: 26088 - DNA, 1324 bp, Homo sapiens
  source 1..1324: mol_type = unassigned DNA
acaaagatggctgccacattggcgctgtcattttggtactgagcagagcgacgggcttaattcgacccaatccaggccagagtctttctctcaggggcttcctcgtgctcagctaatcctccgatcaatccttgggaatccctgggacctcttcggtatccctactctcagccagggatcatgtcttgggccgctcgcccgcccttcctccctcagcggcatgccgcagggcagtgtgggccggtgggggtgcgaaaagaaatgcattgtggggtcgcgtcccggtggcggcggcgacggccctggctggatcccgcagcggcggcggcggcggcggtggcaggcggagaacaacaaaccccggagccggagccaggggaggctggacgggacgggatgggcgacagcgggcgggattaactcaacagtgtcactccctgggggtgggtctggcccccctgaagatgtgaagccaccagtcttaggggtccggggcctgcactgtccaccccctccaggtggccctggggctggcaaacggctatgtgcaatctgcggggacagaagctcaggcaaacactacggggtttacagctgtgagggttgcaagggcttcttcaaacgcaccatccgcaaagaccttacatactcttgccgggacaacaaagactgcacagtggacaagcgccagcggaaccgctgtcagtactgccgctatcagaagtgcctggccactggcatgaagagggaggcggtacaggaggagcgtcagcggggaaaggacaaggatggggatggggagggggctgggggagcccccgaggagatgcctgtggacaggatcctggaggcagagcttgctgtggaacagaagagtgaccagggcgttgagggtcctgggggaaccgggggtagcggcagcagcgtgagtgttggggtcaatccactctccttcgtgatgggggttgggggaggcagtctaggtctgttctacatcccctccccctcctttcccctcataaccttcctaacactacttgggactggaggtgctgccaaacaaggtctttcaaacatctgaggtggatgtgatagctccttctgtctccactccccaaacaacccactggcagaaccataggcatgtcccaaataaataattgtttgcactaatgccagaagagaagactcacttacagggattggtttggatggggctcacaggaagactatatgtaaggagggggtgtcaaaagcctcttacaagggggctcccagcatatctcaaaatcttccataactcttacccccgtcccctgcagcc

SEQ ID NO: 26089 - DNA, 2908 bp, Homo sapiens; identical to SEQ ID NO: 26084
  source 1..2908: mol_type = unassigned DNA

SEQ ID NO: 26090 - DNA, 287 bp, Homo sapiens
  source 1..287: mol_type = unassigned DNA
gcagcccaaatgaccctgtgactaacatctgtcaggcagctgacaaacagctattcacgcttgttgagtgggcgaagaggatcccacacttttcctccttgcctctggatgatcaggtcatattgctgcgggcaggtcttcacgtgcaccgcaactcagcccattcagcaggagtaggagccatctttgatcgggtgctgacagagctagtgtccaaaatgcgtgacatgaggatggacaagacagagcttggctgcctgagggcaatcattctgtttaatccagat

SEQ ID NO: 26091 - DNA, 2908 bp, Homo sapiens
  source 1..2908: mol_type = unassigned DNA
ggcgggaactcgcgccgagacttcccgtctgtacaaagatggctgccacattggcgctgtcattttggtactgagcagagcgacgggcttaattcgacccaatccaggccagagtctttctctcaggggcttcctcgtgctcagctaatcctccgatcaatccttgggaatccctgggacctcttcggtatccctactctcagccagggatcatgtcttgggccgctcgcccgcccttcctccctcagcggcatgccgcagggcagtgtgggccggtgggggtgcgaaaagaaatgcattgtggggtcgcgtcccggtggcggcggcgacggccctggctggatcccgcagcggcggcggcggcggcggtggcaggcggagaacaacaaaccccggagccggagccaggggaggctggacgggacgggatgggcgacagcgggcgggactcccgaagcccagacagctcctccccaaatccccttccccagggagtccctcccccttctcctcctgggccacccctacccccttcaacagctccatcccttggaggctctggggccccacccccacccccgatgccaccacccccactgggctctccctttccagtcatcagttcttccatggggtcccctggtctgccccctccagctcccccaggattctccgggcctgtcagcagcccccagattaactcaacagtgtcactccctgggggtgggtctggcccccctgaagatgtgaagccaccagtcttaggggtccggggcctgcactgtccaccccctccaggtggccctggggctggcaaacggctatgtgcaatctgcggggacagaagctcaggcaaacactacggggtttacagctgtgagggttgcaagggcttcttcaaacgcaccatccgcaaagaccttacatactcttgccgggacaacaaagactgcacagtggacaagcgccagcggaaccgctgtcagtactgccgctatcagaagtgcctggccactggcatgaagagggaggcggtacaggaggagcgtcagcggggaaaggacaaggatggggatggggagggggctgggggagcccccgaggagatgcctgtggacaggatcctggaggcagagcttgctgtggaacagaagagtgaccagggcgttgagggtcctgggggaaccgggggtagcggcagcagcccaaatgaccctgtgactaacatctgtcaggcagctgacaaacagctattcacgcttgttgagtgggcgaagaggatcccacacttttcctccttgcctctggatgatcaggtcatattgctgcgggcaggctggaatgaactcctcattgcctccttttcacaccgatccattgatgttcgagatggcatcctccttgccacaggtcttcacgtgcaccgcaactcagcccattcagcaggagtaggagccatctttgatcgggtgctgacagagctagtgtccaaaatgcgtgacatgaggatggacaagacagagcttggctgcctgagggcaatcattctgtttaatccagatgccaagggcctctccaaccctagtgaggtggaggtcctgcgggagaaagtgtatgcatcactggagacctactgcaaacagaagtaccctgagcagcagggacggtttgccaagctgctgctacgtcttcctgccctccggtccattggccttaagtgtctagagcatctgtttttcttcaagctcattggtgacacccccatcgacaccttcctcatggagatgcttgaggctccccatcaactggcctgagctcagacccagacgtggtgcttctcacactggaggagcacacatccaagagggactccaagccctggggcagggtggggggccatgttcccagaaccttgatggggtgagaagtacagggcagaaccaagaacataaaccctccaagggatctgcttgatatcccaagttggaagggaccccagatacctgtgaggactggttgtctctcttcggtggccttgagtctctgaatttgtcggggtctcccatgatttggggtgatttctcaccctctgtccttcccccagcacaaagcactggccttgcctccaggaccttgcttccttctcatcttgcctcattttgcttcccatctgaagagtggaaatggggatctcccccagaggtggatactggggggcaggcctcccaagctgatggacatgagagtagggccctgacaggccttcctcctctcaaacctggcagatgggggcctctctggaagagggaggggccctgtcactgtccagagtctctttttacacttcacctccttctgcagtcagactgaaatataaaaaaggtggtggtggtggtgaaggggctggtggagatgtaggaaccgatctgctatttttaatttcctgtgaggatagagacttgcagttagactcaaagaagtactgtactttcccaggttgactaagaaatgccagtggtggaggtgggtgtttgggaaaggcagggccctgaaatggcctgtccctagggctctccaagcactagccttcccagcttcccgccgccccccccatctcttcctgtctaacttggggaaggggcctgggctgtgaggacagggcccccacaggggatggtttcacgagtgtagtcccggaggccttccctttacagctctcctccagccctgggcacatagcataggctggggacacaggatcctggcctgagaattgaggggaggtggccagcccgcagaggtggggtgctggggctgcatgatttttgccctgcgtcccttctctttggggctcctttcccctctcatacataaaatcgctttcaaattaaaatcgctgttttctgga

SEQ ID NO: 26092 - DNA, 287 bp, Homo sapiens; identical to SEQ ID NO: 26090
  source 1..287: mol_type = unassigned DNA

SEQ ID NO: 26093 - DNA, 2846 bp, Homo sapiens
  source 1..2846: mol_type = unassigned DNA
gcagagcgacgggcttaattcgacccaatccaggccagagtctttctctcaggggcttcctcgtgctcagctaatcctccgatcaatccttgggaatccctgggacctcttcggtatccctactctcagccagggatcatgtcttgggccgctcgcccgcccttcctccctcagcggcatgccgcagggcagtgtgggccggtgggggtgcgaaaagaaatgcattgtggggtcgcgtcccggtggcggcggcgacggccctggctggatcccgcagcggcggcggcggcggcggtggcaggcggagaacaacaaaccccggagccggagccaggggaggctggacgggacgggatgggcgacagcgggcgggactcccgaagcccagacagctcctccccaaatccccttccccagggagtccctcccccttctcctcctgggccacccctacccccttcaacagctccatcccttggaggctctggggccccacccccacccccgatgccaccacccccactgggctctccctttccagtcatcagttcttccatggggtcccctggtctgccccctccagctcccccaggattctccgggcctgtcagcagcccccagattaactcaacagtgtcactccctgggggtgggtctggcccccctgaagatgtgaagccaccagtcttaggggtccggggcctgcactgtccaccccctccaggtggccctggggctggcaaacggctatgtgcaatctgcggggacagaagctcaggcaaacactacggggtttacagctgtgagggttgcaagggcttcttcaaacgcaccatccgcaaagaccttacatactcttgccgggacaacaaagactgcacagtggacaagcgccagcggaaccgctgtcagtactgccgctatcagaagtgcctggccactggcatgaagagggaggcggtacaggaggagcgtcagcggggaaaggacaaggatggggatggggagggggctgggggagcccccgaggagatgcctgtggacaggatcctggaggcagagcttgctgtggaacagaagagtgaccagggcgttgagggtcctgggggaaccgggggtagcggcagcagcccaaatgaccctgtgactaacatctgtcaggcagctgacaaacagctattcacgcttgttgagtgggcgaagaggatcccacacttttcctccttgcctctggatgatcaggtcatattgctgcgggcaggctggaatgaactcctcattgcctccttttcacaccgatccattgatgttcgagatggcatcctccttgccacaggtcttcacgtgcaccgcaactcagcccattcagcaggagtaggagccatctttgatcggtccctctccagggtgctgacagagctagtgtccaaaatgcgtgacatgaggatggacaagacagagcttggctgcctgagggcaatcattctgtttaatccagatgccaagggcctctccaaccctagtgaggtggaggtcctgcgggagaaagtgtatgcatcactggagacctactgcaaacagaagtaccctgagcagcagggacggtttgccaagctgctgctacgtcttcctgccctccggtccattggccttaagtgtctagagcatctgtttttcttcaagctcattggtgacacccccatcgacaccttcctcatggagatgcttgaggctccccatcaactggcctgagctcagacccagacgtggtgcttctcacactggaggagcacacatccaagagggactccaagccctggggcagggtggggggccatgttcccagaaccttgatggggtgagaagtacagggcagaaccaagaacataaaccctccaagggatctgcttgatatcccaagttggaagggaccccagatacctgtgaggactggttgtctctcttcggtggccttgagtctctgaatttgtcggggtctcccatgatttggggtgatttctcaccctctgtccttcccccagcacaaagcactggccttgcctccaggaccttgcttccttctcatcttgcctcattttgcttcccatctgaagagtggaaatggggatctcccccagaggtggatactggggggcaggcctcccaagctgatggacatgagagtagggccctgacaggccttcctcctctcaaacctggcagatgggggcctctctggaagagggaggggccctgtcactgtccagagtctctttttacacttcacctccttctgcagtcagactgaaatataaaaaaggtggtggtggtggtgaaggggctggtggagatgtaggaaccgatctgctatttttaatttcctgtgaggatagagacttgcagttagactcaaagaagtactgtactttcccaggttgactaagaaatgccagtggtggaggtgggtgtttgggaaaggcagggccctgaaatggcctgtccctagggctctccaagcactagccttcccagcttcccgccgccccccccatctcttcctgtctaacttggggaaggggcctgggctgtgaggacagggcccccacaggggatggtttcacgagtgtagtcccggaggccttccctttacagctctcctccagccctgggcacatagcataggctggggacacaggatcctggcctgagaattgaggggaggtggccagcccgcagaggtggggtgctggggctgcatgatttttgccctgcgtcccttctctttggggctcctttcccctctcatacataaaatcgctttcaaattaaaatcgctgttttctgga

SEQ ID NO: 26094 - DNA, 2894 bp, Homo sapiens
  source 1..2894: mol_type = unassigned DNA
ggcgggaactcgcgccgagacttcccgtctgtacaaagatggctgccacattggcgctgtcattttggtactgagcagagcgacgggcttaattcgacccaatccaggccagagtctttctctcaggggcttcctcgtgctcagctaatcctccgatcaatccttgggaatccctgggacctcttcggtatccctactctcagccagggatcatgtcttgggccgctcgcccgcccttcctccctcagcggcatgccgcagggcagtgtgggccggtgggggtgcgaaaagaaatgcattgtggggtcgcgtcccggtggcggcggcgacggccctggctggatcccgcagcggcggcggcggcggcggtggcaggcggagaacaacaaaccccggagccggagccaggggaggctggacgggacgggatgggcgacagcgggcgggactcccgaagcccagacagctcctccccaaatccccttccccagggagtccctcccccttctcctcctgggccacccctacccccttcaacagctccatcccttggaggctctggggccccacccccacccccgatgccaccacccccactgggctctccctttccagtcatcagttcttccatggggtcccctggtctgccccctccagctcccccaggattctccgggcctgtcagcagcccccagattaactcaacagtgtcactccctgggggtgggtctggcccccctgaagatgtgaagccaccagtcttaggggtccggggcctgcactgtccaccccctccaggtggccctggggctggcaaacggctatgtgcaatctgcggggacagaagctcaggcaaacactacggggtttacagctgtgagggttgcaagggcttcttcaaacgcaccatccgcaaagaccttacatactcttgccgggacaacaaagactgcacagtggacaagcgccagcggaaccgctgtcagtactgccgctatcagaagtgcctggccactggcatgaagagggaggcggtacaggaggagcgtcagcggggaaaggacaaggatggggatggggagggggctgggggagcccccgaggagatgcctgtggacaggatcctggaggcagagcttgctgtggaacagaagagtgaccagggcgttgagggtcctgggggaaccgggggtagcggcagcagcccaaatgaccctgtgactaacatctgtcaggcagctgacaaacagctattcacgcttgttgagtgggcgaagaggatcccacacttttcctccttgcctctggatgatcaggtcatattgctgcgggcaggctggaatgaactcctcattgcctccttttcacaccgatccattgatgttcgagatggcatcctccttgccacaggtcttcacgtgcaccgcaactcagcccattcagcaggagtaggagccatctttgatcgggtgctgacagagctagtgtccaaaatgcgtgacatgaggatggacaagacagagcttggctgcctgagggcaatcattctgtttaatccagatgccaagggcctctccaaccctagtgaggtggaggtcctgcgggagaaagtgtatgcatcactggagacctactgcaaacagaagtaccctgagcagcagggacggtttgccaagctgctgctacgtcttcctgccctccggtccattggccttaagtgtctagagcatctgtttttcttcaagctcattggtgacacccccatcgacaccttcctcatggagatgcttgaggctccccatcaactggcctgagctcagacccagacgtggtgcttctcacactggaggagcacacatccaagagggactccaagccctggggcagggtggggggccatgttcccagaaccttgatggggtgagaagtacagggcagaaccaagaacataaaccctccaagggatctgcttgatatcccaagttggaagggaccccagatacctgtgaggactggttgtctctcttcggtggccttgagtctctgaatttgtcggggtctcccatgatttggggtgatttctcaccctctgtccttcccccagcacaaagcactggccttgcctccaggaccttgcttccttctcatcttgcctcattttgcttcccatctgaagagtggaaatggggatctcccccagaggtggatactggggggcaggcctcccaagctgatggacatgagagtagggccctgacaggccttcctcctctcaaacctggcagatgggggcctctctggaagagggaggggccctgtcactgtccagagtctctttttacacttcacctccttctgcagtcagactgaaatataaaaaaggtggtggtggtggtgaaggggctggtggagatgtaggaaccgatctgctatttttaatttcctgtgaggatagagacttgcagttagactcaaagaagtactgtactttcccaggttgactaagaaatgccagtggtggaggtgggtgtttgggaaaggcagggccctgaaatggcctgtccctagggctctccaagcactagccttcccagcttcccgccgcccccccccatctcttcctgtctaacttggggaaggggcctgggctgtgaggacagggcccccacaggggatggtttcacgagtgtagtcccggaggccttccctttacagctctcctccagccctgggcacatagcataggctggggacacaggatcctggcctgagaattgaggggaggtggccagcccgcagaggtggggtgctggggctgcatgatttttgccctgcgtcccttctctttggggctcctttcccctctcatacataaaatcgctttcaaattaaaa

SEQ ID NO: 26095 - DNA, 2908 bp, Homo sapiens
  source 1..2908: mol_type = unassigned DNA
ggcgggaactcgcgccgagacttcccgtctgtacaaagatggctgccacattggcgctgtcattttggtactgagcagagcgacgggcttaattcgacccaatccaggccagagtctttctctcaggggcttcctcgtgctcagctaatcctccgatcaatccttgggaatccctgggacctcttcggtatccctactctcagccagggatcatgtcttgggccgctcgcccgcccttcctccctcagcggcatgccgcagggcagtgtgggccggtgggggtgcgaaaagaaatgcattgtggggtcgcgtcccggtggcggcggcgacggccctggctggatcccgcagcggcggcggcggcggcggtggcaggcggagaacaacaaaccccggagccggagccaggggaggctggacgggacgggatgggcgacagcgggcgggactcccgaagcccagacagctcctccccaaatccccttccccagggagtccctcccccttctcctcctgggccacccctacccccttcaacagctccatcccttggaggctctggggccccacccccacccccgatgccaccacccccactgggctctccctttccagtcatcagttcttccatggggtcccctggtctgccccctccagctcccccaggattctccgggcctgtcagcagcccccagattaactcaacagtgtcactccctgggggtgggtctggcccccctgaagatgtgaagccaccagtcttaggggtccggggcctgcactgtccaccccctccaggtggccctggggctggcaaacggctatgtgcaatctgcggggacagaagctcaggcaaacactacggggtttacagctgtgagggttgcaagggcttcttcaaacgcaccatccgcaaagaccttacatactcttgccgggacaacaaagactgcacagtggacaagcgccagcggaaccgctgtcagtactgccgctatcagaagtgcctggccactggcatgaagagggaggcggtacaggaggagcgtcagcggggaaaggacaaggatggggatggggagggggctgggggagcccccgaggagatgcctgtggacaggatcctggaggcagagcttgctgtggaacagaagagtgaccagggcgttgagggtcctgggggaaccgggggtagcggcagcagcccaaatgaccctgtgactaacatctgtcaggcagctgacaaacagctattcacgcttgttgagtgggcgaagaggatcccacacttttcctccttgcctctggatgatcaggtcatattgctgcgggcaggctggaatgaactcctcattgcctccttttcacaccgatccattgatgttcgagatggcatcctccttgccacaggtcttcacgtgcaccgcaactcagcccattcagcaggagtaggagccatctttgatcgggtgctgacagagctagtgtccaaaatgcgtgacatgaggatggacaagacagagcttggctgcctgagggcaatcattctgtttaatccagatgccaagggcctctccaaccctagtgaggtggaggtcctgcgggagaaagtgtatgcatcactggagacctactgcaaacagaagtaccctgagcagcagggacggtttgccaagctgctgctacgtcttcctgccctccggtccattggccttaagtgtctagagcatctgtttttcttcaagctcattggtgacacccccatcgacaccttcctcatggagatgcttgaggctccccatcaactggcctgagctcagacccagacgtggtgcttctcacactggaggagcacacatccaagagggactccaagccctggggcagggtggggggccatgttcccagaaccttgatggggtgagaagtacagggcagaaccaagaacataaaccctccaagggatctgcttgatatcccaagttggaagggaccccagatacctgtgaggactggttgtctctcttcggtggccttgagtctctgaatttgtcggggtctcccatgatttggggtgatttctcaccctctgtccttcccccagcacaaagcactggccttgcctccaggaccttgcttccttctcatcttgcctcattttgcttcccatctgaagagtggaaatggggaactcccccagaggtggatactggggggcaggcctcccaagctgatggacatgagagtagggccctgacaggccttcctcctctcaaacctggcagatgggggcctctctggaagagggaggggccctgtcactgtccagagtctctttttacacttcacctccttctgcagtcagactgaaatataaaaaaggtggtggtggtggtgaaggggctggtggagatgtaggaaccgatctgctatttttaatttcctgtgaggatagagacttgcagttagactcaaagaagtactgtactttcccaggttgactaagaaatgccagtggtggaggtgggtgtttgggaaaggcagggccctgaaatggcctgtccctagggctctccaagcactagccttcccagcttcccgccgccccccccatctcttcctgtctaacttggggaaggggcctgggctgtgaggacagggcccccacaggggatggtttcacgagtgtagtcccggaggccttccctttacagctctcctccagccctgggcacatagcataggctggggacacaggatcctggcctgagaattgaggggaggtggccagcccgcagaggtggggtgctggggctgcatgatttttgccctgcgtcccttctctttggggctcctttcccctctcatacataaaatcgctttcaaattaaaatcgctgttttctgga

SEQ ID NO: 26096 - DNA, 287 bp, Homo sapiens; identical to SEQ ID NO: 26090
  source 1..287: mol_type = unassigned DNA

SEQ ID NO: 26097 - DNA, 287 bp, Homo sapiens; identical to SEQ ID NO: 26090
  source 1..287: mol_type = unassigned DNA

SEQ ID NO: 26098 - DNA, 2846 bp, Homo sapiens
  source 1..2846: mol_type = unassigned DNA
gcagagcgacgggcttaattcgacccaatccaggccagagtctttctctcaggggcttcctcgtgctcagctaatcctccgatcaatccttgggaatccctgggacctcttcggtatccctactctcagccagggatcatgtcttgggccgctcgcccgcccttcctccctcagcggcatgccgcagggcagtgtgggccggtgggggtgcgaaaagaaatgcattgtggggtcgcgtcccggtggcggcggcgacggccctggctggatcccgcagcggcggcggcggcggcggtggcaggcggagaacaacaaaccccggagccggagccaggggaggctggacgggacgggatgggcgacagcgggcgggactcccgaagcccagacagctcctccccaaatccccttccccagggagtccctcccccttctcctcctgggccacccctacccccttcaacagctccatcccttggaggctctggggccccacccccacccccgatgccaccacccccactgggctctccctttccagtcatcagttcttccatggggtcccctggtctgccccctccagctcccccaggattctccgggcctgtcagcagcccccagattaactcaacagtgtcactccctgggggtgggtctggcccccctgaagatgtgaagccaccagtcttaggggtccggggcctgcactgtccaccccctccaggtggccctggggctggcaaacggctatgtgcaatctgcggggacagaagctcaggcaaacactacggggtttacagctgtgagggttgcaagggcttcttcaaacgcaccatccgcaaagaccttacatactcttgccgggacaacaaagactgcacagtggacaagcgccagcggaaccgctgtcagtactgccgctatcagaagtgcctggccactggcatgaagagggaggcggtacaggaggagcgtcagcggggaaaggacaaggatggggatggggagggggctgggggagcccccgaggagatgcctgtggacaggatcctggaggcagagcttgctgtggaacagaagagtgaccagggcgttgagggtcctgggggaaccgggggtagcggcagcagcccaaatgaccctgtgactaacatctgtcaggcagctgacaaacagctattcacgcttgttgagtgggcgaagaggatcccacacttttcctccttgcctctggatgatcaggtcatattgctgcgggcaggctggaatgaactcctcattgcctccttttcacaccgatccattgatgttcgagatggcatcctccttgccacaggtcttcacgtgcaccgcaactcagcccattcagcaggagtaggagccatctttgatcggtccctctccagggtgctgacagagctagtgtccaaaatgcgtgacatgaggatggacaagacagagcttggctgcctgagggcaatcattctgtttaatccagatgccaagggcctctccaaccctagtgaggtggaggtcctgcgggagaaagtgtatgcatcactggagacctactgcaaacagaagtaccctgagcagcagggacggtttgccaagctgctgctacgtcttcctgccctccggtccattggccttaagtgtctagagcatctgtttttcttcaagctcattggtgacacccccatcgacaccttcctcatggagatgcttgaggctccccatcaactggcctgagctcagacccagacgtggtgcttctcacactggaggagcacacatccaagagggactccaagccctggggcagggtggggggccatgttcccagaaccttgatggggtgagaagtacagggcagaaccaagaacataaaccctccaagggatctgcttgatatcccaagttggaagggaccccagatacctgtgaggactggttgtctctcttcggtggccttgagtctctgaatttgtcggggtctcccatgatttggggtgatttctcaccctctgtccttcccccagcacaaagcactggccttgcctccaggaccttgcttccttctcatcttgcctcattttgcttcccatctgaagagtggaaatggggaactcccccagaggtggatactggggggcaggcctcccaagctgatggacatgagagtagggccctgacaggccttcctcctctcaaacctggcagatgggggcctctctggaagagggaggggccctgtcactgtccagagtctctttttacacttcacctccttctgcagtcagactgaaatataaaaaaggtggtggtggtggtgaaggggctggtggagatgtaggaaccgatctgctatttttaatttcctgtgaggatagagacttgcagttagactcaaagaagtactgtactttcccaggttgactaagaaatgccagtggtggaggtgggtgtttgggaaaggcagggccctgaaatggcctgtccctagggctctccaagcactagccttcccagcttcccgccgccccccccatctcttcctgtctaacttggggaaggggcctgggctgtgaggacagggcccccacaggggatggtttcacgagtgtagtcccggaggccttccctttacagctctcctccagccctgggcacatagcataggctggggacacaggatcctggcctgagaattgaggggaggtggccagcccgcagaggtggggtgctggggctgcatgatttttgccctgcgtcccttctctttggggctcctttcccctctcatacataaaatcgctttcaaattaaaatcgctgttttctgga

SEQ ID NO: 26099 - DNA, 287 bp, Homo sapiens; identical to SEQ ID NO: 26090
  source 1..287: mol_type = unassigned DNA

SEQ ID NO: 26100 - DNA, 2846 bp, Homo sapiens; identical to SEQ ID NO: 26085
  source 1..2846: mol_type = unassigned DNA

SEQ ID NO: 26101 - DNA, 2832 bp, Homo sapiens; identical to SEQ ID NO: 26086
  source 1..2832: mol_type = unassigned DNA

SEQ ID NO: 26102 - DNA, 1227 bp, Homo sapiens
  source 1..1227: mol_type = unassigned DNA
accttcgccctaatgcctttaccaatatggcggcactccggtagcgacgaatccatcctgcactgacacgcatgcgcgagtgtggaggtggccctggggctggcaaacggctatgtgcaatctgcggggacagaagctcaggcaaacactacggggtttacagctgtgagggttgcaagggcttcttcaaacgcaccatccgcaaagaccttacatactcttgccgggacaacaaagactgcacagtggacaagcgccagcggaaccgctgtcagtactgccgctatcagaagtgcctggccactggcatgaagagggaggcggtacaggaggagcgtcagcggggaaaggacaaggatggggatggggagggggctgggggagcccccgaggagatgcctgtggacaggatcctggaggcagagcttgctgtggaacagaagagtgaccagggcgttgagggtcctgggggaaccgggggtagcggcagcagcccaaatgaccctgtgactaacatctgtcaggcagctgacaaacagctattcacgcttgttgagtgggcgaagaggatcccacacttttcctccttgcctctggatgatcaggtcatattgctgcgggcaggctggaatgaactcctcattgcctccttctcacaccgatccattgatgttcgagatggcatcctccttgccacaggtcttcacgtgcaccgcaactcagcccattcagcaggagtaggagccatctttgatcggtccctctccagggtgctgacagagctagtgtccaaaatgcgtgacatgaggatggacaagacagagcttggctgcctgagggcaatcattctgtttaatccagatgccaagggcctctccaaccctagtgaggtggaggtcctgcgggagaaagtgtatgcatcactggagacctactgcaaacagaagtaccctgagcagcagggacggtttgccaagctgctgctacgtcttcctgccctccggtccattggccttaagtgtctagagcatctgtttttcttcaagctcattggtgacacccccatcgacaccttcctcatggagatgcttgaggctccccatcaactggcctgagctcagacccagacgtggtgcttctcacactggaggagcacacatccaagagggactccaagccctggggcagggtggggggccatgttcccagaaccttgatggggtgaga

SEQ ID NO: 26103 - DNA, 2869 bp, Homo sapiens
  source 1..2869: mol_type = unassigned DNA
caaagatggctgccacattggcgctgtcattttggtactgagcagagcgacgggcttaattcgacccaatccaggccagagtctttctctcaggggcttcctcgtgctcagctaatcctccgatcaatccttgggaatccctgggacctcttcggtatccctactctcagccagggatcatgtcttgggccgctcgcccgcccttcctccctcagcggcatgccgcagggcagtgtgggccggtgggggtgcgaaaagaaatgcattgtggggtcgcgtcccggtggcggcggcgacggccctggctggatcccgcagcggcggcggcggcggcggtggcaggcggagaacaacaaaccccggagccggagccaggggaggctggacgggacgggatgggcgacagcgggcgggactcccgaagcccagacagctcctccccaaatccccttccccagggagtccctcccccttctcctcctgggccacccctacccccttcaacagctccatcccttggaggctctggggccccacccccacccccgatgccaccacccccactgggctctccctttccagtcatcagttcttccatggggtcccctggtctgccccctccagctcccccaggattctccgggcctgtcagcagcccccagattaactcaacagtgtcactccctgggggtgggtctggcccccctgaagatgtgaagccaccagtcttaggggtccggggcctgcactgtccaccccctccaggtggccctggggctggcaaacggctatgtgcaatctgcggggacagaagctcaggcaaacactacggggtttacagctgtgagggttgcaagggcttcttcaaacgcaccatccgcaaagaccttacatactcttgccgggacaacaaagactgcacagtggacaagcgccagcggaaccgctgtcagtactgccgctatcagaagtgcctggccactggcatgaagagggaggcggtacaggaggagcgtcagcggggaaaggacaaggatggggatggggagggggctgggggagcccccgaggagatgcctgtggacaggatcctggaggcagagcttgctgtggaacagaagagtgaccagggcgttgagggtcctgggggaaccggggctccttctccaaatgaccctgtgactaacatctgtcaggcagctgacaaacagctattcacgcttgttgagtgggcgaagaggatcccacacttttcctccttgcctctggatgatcaggtcatattgctgcgggcaggctggaatgaactcctcattgcctccttttcacaccgatccattgatgttcgagatggcatcctccttgccacaggtcttcacgtgcaccgcaactcagcccattcagcaggagtaggagccatctttgatcgggtgctgacagagctagtgtccaaaatgcgtgacatgaggatggacaagacagagcttggctgcctgagggcaatcattctgtttaatccagatgccaagggcctctccaaccctagtgaggtggaggtcctgcgggagaaagtgtatgcatcactggagacctactgcaaacagaagtaccctgagcagcagggacggtttgccaagctgctgctacgtcttcctgccctccggtccattggccttaagtgtctagagcatctgtttttcttcaagctcattggtgacacccccatcgacaccttcctcatggagatgcttgaggctccccatcaactggcctgagctcagacccagacgtggtgcttctcacactggaggagcacacatccaagagggactccaagccctggggcagggtggggggccatgttcccagaaccttgatggggtgagaagtacagggcagaaccaagaacataaaccctccaagggatctgcttgatatcccaagttggaagggaccccagatacctgtgaggactggttgtctctcttcggtggccttgagtctctgaatttgtcggggtctcccatgatttggggtgatttctcaccctctgtccttcccccagcacaaagcactggccttgcctccaggaccttgcttccttctcatcttgcctcattttgcttcccatctgaagagtggaaatggggatctcccccagaggtggatactggggggcaggcctcccaagctgatggacatgagagtagggccctgacaggccttcctcctctcaaacctggcagatgggggcctctctggaagagggaggggccctgtcactgtccagagtctctttttacacttcacctccttctgcagtcagactgaaatataaaaaaggtggtggtggtggtgaaggggctggtggagatgtaggaaccgatctgctatttttaatttcctgtgaggatagagacttgcagttagactcaaagaagtactgtactttcccaggttgactaagaaatgccagtggtggaggtgggtgtttgggaaaggcagggccctgaaatggcctgtccctagggctctccaagcactagccttcccagcttcccgccgcccccccccatctcttcctgtctaacttggggaaggggcctgggctgtgaggacagggcccccacaggggatggtttcacgagtgtagtcccggaggccttccctttacagctctcctccagccctgggcacatagcataggctggggacacaggatcctggcctgagaattgaggggaggtggccagcccgcagaggtggggtgctggggctgcatgatttttgccctgcgtcccttctctttggggctcctttcccctctcatacataaaatcgctttcaaattaaaatcgctgttttctgg

SEQ ID NO: 26104 - DNA, 2859 bp, Homo sapiens
  source 1..2859: mol_type = unassigned DNA
caaagatggctgccacattggcgctgtcattttggtactgagcagagcgacgggcttaattcgacccaatccaggccagagtctttctctcaggggcttcctcgtgctcagctaatcctccgatcaatccttgggaatccctgggacctcttcggtatccctactctcagccagggatcatgtcttgggccgctcgcccgcccttcctccctcagcggcatgccgcagggcagtgtgggccggtgggggtgcgaaaagaaatgcattgtggggtcgcgtcccggtggcggcggcgacggccctggctggatcccgcagcggcggcggcggcggcggtggcaggcggagaacaacaaaccccggagccggagccaggggaggctggacgggacgggatgggcgacagcgggcgggactcccgaagcccagacagctcctccccaaatccccttccccagggagtccctcccccttctcctcctgggccacccctacccccttcaacagctccatcccttggaggctctggggccccacccccacccccgatgccaccacccccactgggctctccctttccagtcatcagttcttccatggggtcccctggtctgccccctccagctcccccaggattctccgggcctgtcagcagcccccagattaactcaacagtgtcactccctgggggtgggtctggcccccctgaagatgtgaagccaccagtcttaggggtccggggcctgcactgtccaccccctccaggtggccctggggctggcaaacggctatgtgcaatctgcggggacagaagctcaggcaaacactacggggtttacagctgtgagggttgcaagggcttcttcaaacgcaccatccgcaaagaccttacatactcttgccgggacaacaaagactgcacagtggacaagcgccagcggaaccgctgtcagtactgccgctatcagaagtgcctggccactggcatgaagagggaggcggtacaggaggagcgtcagcggggaaaggacaaggatggggatggggagggggctgggggagcccccgaggagatgcctgtggacaggatcctggaggcagagcttgctgtggaacagaagagtgaccaggggggctcccagcatatctcaaaatctccaaatgaccctgtgactaacatctgtcaggcagctgacaaacagctattcacgcttgttgagtgggcgaagaggatcccacacttttcctccttgcctctggatgatcaggtcatattgctgcgggcaggctggaatgaactcctcattgcctccttctcacaccgatccattgatgttcgagatggcatcctccttgccacaggtcttcacgtgcaccgcaactcagcccattcagcaggagtaggagccatctttgatcgggtgctgacagagctagtgtccaaaatgcgtgacatgaggatggacaagacagagcttggctgcctgagggcaatcattctgtttaatccagatgccaagggcctctccaaccctagtgaggtggaggtcctgcgggagaaagtgtatgcatcactggagacctactgcaaacagaagtaccctgagcagcagggacggtttgccaagctgctgctacgtcttcctgccctccggtccattggccttaagtgtctagagcatctgtttttcttcaagctcattggtgacacccccatcgacaccttcctcatggagatgcttgaggctccccatcaactggcctgagctcagacccagacgtggtgcttctcacactggaggagcacacatccaagagggactccaagccctggggcagggtggggggccatgttcccagaaccttgatggggtgagaagtacagggcagaaccaagaacataaaccctccaagggatctgcttgatatcccaagttggaagggaccccagatacctgtgaggactggttgtctctcttcggtggccttgagtctctgaatttgtcgggttctcccatgatttggggtgatttctcaccctctgtccttcccccagcacaaagcactggccttgcctccaggaccttgcttccttctcatcttgcctcattttgcttcccatctgaagagtggaaatggggaactcccccagaggtggatactggggggcaggcctcccaagctgatggacatgagagtagggccctgacaggccttcctcctctcaaacctggcagatgggggcctctctggaagagggaggggccctgtcactgtccagagtctctttttacacttcacctccttctgcagtcagactgaaatataaaaaaggtggtggtggtggtgaaggggctggtggagatgtaggaaccgatctgctatttttaatttcctgtgaggatagagacttgcagttagactcaaagaagtactgtactttcccaggttgactaagaaatgccagtggtggaggtgggtgtttgggaaaggcagggccctgaaatggcctgtccctagggctctccaagcactagccttcccagcttcccgccgccccccctatctcttcctgtctaacttggggaaggggcctgggctgtgaggacagggcccccacaggggatggtttcacgagtgtagtcccggaggccttccctttacagctctcctccagccctgggcacatagcataggctggggacacaggatcctggcctgagaattgaggggaggtggccagcccgcagaggtggggtgctggggctgcatgatttttgccctgcgtcccttctctttggggctcctttcccctctcatacataaaatcgctttcaaattaaaatcgctgttttctgg

SEQ ID NO: 26105 - DNA, 1227 bp, Homo sapiens
  source 1..1227: mol_type = unassigned DNA
accttcgccctaatgcctttaccaatatggcggcactccggtagcgacgaatccatcctgcactgacacgcatgcgcgagtgtggaggtggccctggggctggcaaacggctatgtgcaatctgcggggacagaagctcaggcaaacactacggggtttacagctgtgagggttgcaagggcttcttcaaacgcaccatccgcaaagaccttacatactcttgccgggacaacaaagactgcacagtggacaagcgccagcggaaccgctgtcagtactgccgctatcagaagtgcctggccactggcatgaagagggaggcggtacaggaggagcgtcagcggggaaaggacaaggatggggatggggagggggctgggggagcccccgaggagatgcctgtggacaggatcctggaggcagagcttgctgtggaacagaagagtgaccagggcgttgagggtcctgggggaaccgggggtagcggcagcagcccaaatgaccctgtgactaacatctgtcaggcagctgacaaacagctattcacgcttgttgagtgggcgaagaggatcccacacttttcctccttgcctctggatgatcaggtcatattgctgcgggcaggctggaatgaactcctcattgcctccttttcacaccgatccattgatgttcgagatggcatcctccttgccacaggtcttcacgtgcaccgcaactcagcccattcagcaggagtaggagccatctttgatcggtccctctccagggtgctgacagagctagtgtccaaaatgcgtgacatgaggatggacaagacagagcttggctgcctgagggcaatcattctgtttaatccagatgccaagggcctctccaaccctagtgaggtggaggtcctgcgggagaaagtgtatgcatcactggagacctactgcaaacagaagtaccctgagcagcagggacggtttgccaagctgctgctacgtcttcctgccctccggtccattggccttaagtgtctagagcatctgtttttcttcaagctcattggtgacacccccatcgacaccttcctcatggagatgcttgaggctccccatcaactggcctgagctcagacccagacgtggtgcttctcacactggaggagcacacatccaagagggactccaagccctggggcagggtggggggccatgttcccagaaccttgatggggtgaga

SEQ ID NO: 26106 - DNA, 2868 bp, Homo sapiens
  source 1..2868: mol_type = unassigned DNA
caaagatggctgccacattggcgctgtcattttggtactgagcagagcgacgggcttaattcgacccaatccaggccagagtctttctctcaggggcttcctcgtgctcagctaatcctccgatcaatccttgggaatccctgggacctcttcggtatccctactctcagccagggatcatgtcttgggccgctcgcccgcccttcctccctcagcggcatgccgcagggcagtgtgggccggtgggggtgcgaaaagaaatgcattgtggggtcgcgtcccggtggcggcggcgacggccctggctggatcccgcagcggcggcggcggcggcggtggcaggcggagaacaacaaaccccggagccggagccaggggaggctggacgggacgggatgggcgacagcgggcgggactcccgaagcccagacagctcctccccaaatccccttccccagggagtccctcccccttctcctcctgggccacccctacccccttcaacagctccatcccttggaggctctggggccccacccccacccccgatgccaccacccccactgggctctccctttccagtcatcagttcttccatggggtcccctggtctgccccctccagctcccccaggattctccgggcctgtcagcagcccccagattaactcaacagtgtcactccctgggggtgggtctggcccccctgaagatgtgaagccaccagtcttaggggtccggggcctgcactgtccaccccctccaggtggccctggggctggcaaacggctatgtgcaatctgcggggacagaagctcaggcaaacactacggggtttacagctgtgagggttgcaagggcttcttcaaacgcaccatccgcaaagaccttacatactcttgccgggacaacaaagactgcacagtggacaagcgccagcggaaccgctgtcagtactgccgctatcagaagtgcctggccactggcatgaagagggaggcggtacaggaggagcgtcagcggggaaaggacaaggatggggatggggagggggctgggggagcccccgaggagatgcctgtggacaggatcctggaggcagagcttgctgtggaacagaagagtgaccagggcgttgagggtcctgggggaaccggggctccttctccaaatgaccctgtgactaacatctgtcaggcagctgacaaacagctattcacgcttgttgagtgggcgaagaggatcccacacttttcctccttgcctctggatgatcaggtcatattgctgcgggcaggctggaatgaactcctcattgcctccttctcacaccgatccattgatgttcgagatggcatcctccttgccacaggtcttcacgtgcaccgcaactcagcccattcagcaggagtaggagccatctttgatcgggtgctgacagagctagtgtccaaaatgcgtgacatgaggatggacaagacagagcttggctgcctgagggcaatcattctgtttaatccagatgccaagggcctctccaaccctagtgaggtggaggtcctgcgggagaaagtgtatgcatcactggagacctactgcaaacagaagtaccctgagcagcagggacggtttgccaagctgctgctacgtcttcctgccctccggtccattggccttaagtgtctagagcatctgtttttcttcaagctcattggtgacacccccatcgacaccttcctcatggagatgcttgaggctccccatcaactggcctgagctcagacccagacgtggtgcttctcacactggaggagcacacatccaagagggactccaagccctggggcagggtggggggccatgttcccagaaccttgatggggtgagaagtacagggcagaaccaagaacataaaccctccaagggatctgcttgatatcccaagttggaagggaccccagatacctgtgaggactggttgtctctcttcggtggccttgagtctctgaatttgtcgggttctcccatgatttggggtgatttctcaccctctgtccttcccccagcacaaagcactggccttgcctccaggaccttgcttccttctcatcttgcctcattttgcttcccatctgaagagtggaaatggggaactcccccagaggtggatactggggggcaggcctcccaagctgatggacatgagagtagggccctgacaggccttcctcctctcaaacctggcagatgggggcctctctggaagagggaggggccctgtcactgtccagagtctctttttacacttcacctccttctgcagtcagactgaaatataaaaaaggtggtggtggtggtgaaggggctggtggagatgtaggaaccgatctgctatttttaatttcctgtgaggatagagacttgcagttagactcaaagaagtactgtactttcccaggttgactaagaaatgccagtggtggaggtgggtgtttgggaaaggcagggccctgaaatggcctgtccctagggctctccaagcactagccttcccagcttcccgccgccccccctatctcttcctgtctaacttggggaaggggcctgggctgtgaggacagggcccccacaggggatggtttcacgagtgtagtcccggaggccttccctttacagctctcctccagccctgggcacatagcataggctggggacacaggatcctggcctgagaattgaggggaggtggccagcccgcagaggtggggtgctggggctgcatgatttttgccctgcgtcccttctctttggggctcctttcccctctcatacataaaatcgctttcaaattaaaatcgctgttttctgg

SEQ ID NO: 26107 - DNA, 2859 bp, Homo sapiens
  source 1..2859: mol_type = unassigned DNA
caaagatggctgccacattggcgctgtcattttggtactgagcagagcgacgggcttaattcgacccaatccaggccagagtctttctctcaggggcttcctcgtgctcagctaatcctccgatcaatccttgggaatccctgggacctcttcggtatccctactctcagccagggatcatgtcttgggccgctcgcccgcccttcctccctcagcggcatgccgcagggcagtgtgggccggtgggggtgcgaaaagaaatgcattgtggggtcgcgtcccggtggcggcggcgacggccctggctggatcccgcagcggcggcggcggcggcggtggcaggcggagaacaacaaaccccggagccggagccaggggaggctggacgggacgggatgggcgacagcgggcgggactcccgaagcccagacagctcctccccaaatccccttccccagggagtccctcccccttctcctcctgggccacccctacccccttcaacagctccatcccttggaggctctggggccccacccccacccccgatgccaccacccccactgggctctccctttccagtcatcagttcttccatggggtcccctggtctgccccctccagctcccccaggattctccgggcctgtcagcagcccccagattaactcaacagtgtcactccctgggggtgggtctggcccccctgaagatgtgaagccaccagtcttaggggtccggggcctgcactgtccaccccctccaggtggccctggggctggcaaacggctatgtgcaatctgcggggacagaagctcaggcaaacactacggggtttacagctgtgagggttgcaagggcttcttcaaacgcaccatccgcaaagaccttacatactcttgccgggacaacaaagactgcacagtggacaagcgccagcggaaccgctgtcagtactgccgctatcagaagtgcctggccactggcatgaagagggaggcggtacaggaggagcgtcagcggggaaaggacaaggatggggatggggagggggctgggggagcccccgaggagatgcctgtggacaggatcctggaggcagagcttgctgtggaacagaagagtgaccaggggggctcccagcatatctcaaaatctccaaatgaccctgtgactaacatctgtcaggcagctgacaaacagctattcacgcttgttgagtgggcgaagaggatcccacacttttcctccttgcctctggatgatcaggtcatattgctgcgggcaggctggaatgaactcctcattgcctccttttcacaccgatccattgatgttcgagatggcatcctccttgccacaggtcttcacgtgcaccgcaactcagcccattcagcaggagtaggagccatctttgatcgggtgctgacagagctagtgtccaaaatgcgtgacatgaggatggacaagacagagcttggctgcctgagggcaatcattctgtttaatccagatgccaagggcctctccaaccctagtgaggtggaggtcctgcgggagaaagtgtatgcatcactggagacctactgcaaacagaagtaccctgagcagcagggacggtttgccaagctgctgctacgtcttcctgccctccggtccattggccttaagtgtctagagcatctgtttttcttcaagctcattggtgacacccccatcgacaccttcctcatggagatgcttgaggctccccatcaactggcctgagctcagacccagacgtggtgcttctcacactggaggagcacacatccaagagggactccaagccctggggcagggtggggggccatgttcccagaaccttgatggggtgagaagtacagggcagaaccaagaacataaaccctccaagggatctgcttgatatcccaagttggaagggaccccagatacctgtgaggactggttgtctctcttcggtggccttgagtctctgaatttgtcggggtctcccatgatttggggtgatttctcaccctctgtccttcccccagcacaaagcactggccttgcctccaggaccttgcttccttctcatcttgcctcattttgcttcccatctgaagagtggaaatggggatctcccccagaggtggatactggggggcaggcctcccaagctgatggacatgagagtagggccctgacaggccttcctcctctcaaacctggcagatgggggcctctctggaagagggaggggccctgtcactgtccagagtctctttttacacttcacctccttctgcagtcagactgaaatataaaaaaggtggtggtggtggtgaaggggctggtggagatgtaggaaccgatctgctatttttaatttcctgtgaggatagagacttgcagttagactcaaagaagtactgtactttcccaggttgactaagaaatgccagtggtggaggtgggtgtttgggaaaggcagggccctgaaatggcctgtccctagggctctccaagcactagccttcccagcttcccgccgccccccccatctcttcctgtctaacttggggaaggggcctgggctgtgaggacagggcccccacaggggatggtttcacgagtgtagtcccggaggccttccctttacagctctcctccagccctgggcacatagcataggctggggacacaggatcctggcctgagaattgaggggaggtggccagcccgcagaggtggggtgctggggctgcatgatttttgccctgcgtcccttctctttggggctcctttcccctctcatacataaaatcgctttcaaattaaaatcgctgttttctgg

SEQ ID NO: 26108 - DNA, 1324 bp, Homo sapiens; identical to SEQ ID NO: 26088
  source 1..1324: mol_type = unassigned DNA

SEQ ID NO: 26109 - DNA, 2860 bp, Homo sapiens
  source 1..2860: mol_type = unassigned DNA
caaagatggctgccacattggcgctgtcattttggtactgagcagagcgacgggcttaattcgacccaatccaggccagagtctttctctcaggggcttcctcgtgctcagctaatcctccgatcaatccttgggaatccctgggacctcttcggtatccctactctcagccagggatcatgtcttgggccgctcgcccgcccttcctccctcagcggcatgccgcagggcagtgtgggccggtgggggtgcgaaaagaaatgcattgtggggtcgcgtcccggtggcggcggcgacggccctggctggatcccgcagcggcggcggcggcggcggtggcaggcggagaacaacaaaccccggagccggagccaggggaggctggacgggacgggatgggcgacagcgggcgggactcccgaagcccagacagctcctccccaaatccccttccccagggagtccctcccccttctcctcctgggccacccctacccccttcaacagctccatcccttggaggctctggggccccacccccacccccgatgccaccacccccactgggctctccctttccagtcatcagttcttccatggggtcccctggtctgccccctccagctcccccaggattctccgggcctgtcagcagcccccagattaactcaacagtgtcactccctgggggtgggtctggcccccctgaagatgtgaagccaccagtcttaggggtccggggcctgcactgtccaccccctccaggtggccctggggctggcaaacggctatgtgcaatctgcggggacagaagctcaggcaaacactacggggtttacagctgtgagggttgcaagggcttcttcaaacgcaccatccgcaaagaccttacatactcttgccgggacaacaaagactgcacagtggacaagcgccagcggaaccgctgtcagtactgccgctatcagaagtgcctggccactggcatgaagagggaggcggtacaggaggagcgtcagcggggaaaggacaaggatggggatggggagggggctgggggagcccccgaggagatgcctgtggacaggatcctggaggcagagcttgctgtggaacagaagagtgaccaggggggctcccagcatatctcaaaatctccaaatgaccctgtgactaacatctgtcaggcagctgacaaacagctattcacgcttgttgagtgggcgaagaggatcccacacttttcctccttgcctctggatgatcaggtcatattgctgcgggcaggctggaatgaactcctcattgcctccttttcacaccgatccattgatgttcgagatggcatcctccttgccacaggtcttcacgtgcaccgcaactcagcccattcagcaggagtaggagccatctttgatcgggtgctgacagagctagtgtccaaaatgcgtgacatgaggatggacaagacagagcttggctgcctgagggcaatcattctgtttaatccagatgccaagggcctctccaaccctagtgaggtggaggtcctgcgggagaaagtgtatgcatcactggagacctactgcaaacagaagtaccctgagcagcagggacggtttgccaagctgctgctacgtcttcctgccctccggtccattggccttaagtgtctagagcatctgtttttcttcaagctcattggtgacacccccatcgacaccttcctcatggagatgcttgaggctccccatcaactggcctgagctcagacccagacgtggtgcttctcacactggaggagcacacatccaagagggactccaagccctggggcagggtggggggccatgttcccagaaccttgatggggtgagaagtacagggcagaaccaagaacataaaccctccaagggatctgcttgatatcccaagttggaagggaccccagatacctgtgaggactggttgtctctcttcggtggccttgagtctctgaatttgtcggggtctcccatgatttggggtgatttctcaccctctgtccttcccccagcacaaagcactggccttgcctccaggaccttgcttccttctcatcttgcctcattttgcttcccatctgaagagtggaaatggggatctcccccagaggtggatactggggggcaggcctcccaagctgatggacatgagagtagggccctgacaggccttcctcctctcaaacctggcagatgggggcctctctggaagagggaggggccctgtcactgtccagagtctctttttacacttcacctccttctgcagtcagactgaaatataaaaaaggtggtggtggtggtgaaggggctggtggagatgtaggaaccgatctgctatttttaatttcctgtgaggatagagacttgcagttagactcaaagaagtactgtactttcccaggttgactaagaaatgccagtggtggaggtgggtgtttgggaaaggcagggccctgaaatggcctgtccctagggctctccaagcactagccttcccagcttcccgccgcccccccccatctcttcctgtctaacttggggaaggggcctgggctgtgaggacagggcccccacaggggatggtttcacgagtgtagtcccggaggccttccctttacagctctcctccagccctgggcacatagcataggctggggacacaggatcctggcctgagaattgaggggaggtggccagcccgcagaggtggggtgctggggctgcatgatttttgccctgcgtcccttctctttggggctcctttcccctctcatacataaaatcgctttcaaattaaaatcgctgttttctgg

SEQ ID NO: 26110 - DNA, 1324 bp, Homo sapiens; identical to SEQ ID NO: 26088
  source 1..1324: mol_type = unassigned DNA

SEQ ID NO: 26111 - DNA, 2868 bp, Homo sapiens
  source 1..2868: mol_type = unassigned DNA
caaagatggctgccacattggcgctgtcattttggtactgagcagagcgacgggcttaattcgacccaatccaggccagagtctttctctcaggggcttcctcgtgctcagctaatcctccgatcaatccttgggaatccctgggacctcttcggtatccctactctcagccagggatcatgtcttgggccgctcgcccgcccttcctccctcagcggcatgccgcagggcagtgtgggccggtgggggtgcgaaaagaaatgcattgtggggtcgcgtcccggtggcggcggcgacggccctggctggatcccgcagcggcggcggcggcggcggtggcaggcggagaacaacaaaccccggagccggagccaggggaggctggacgggacgggatgggcgacagcgggcgggactcccgaagcccagacagctcctccccaaatccccttccccagggagtccctcccccttctcctcctgggccacccctacccccttcaacagctccatcccttggaggctctggggccccacccccacccccgatgccaccacccccactgggctctccctttccagtcatcagttcttccatggggtcccctggtctgccccctccagctcccccaggattctccgggcctgtcagcagcccccagattaactcaacagtgtcactccctgggggtgggtctggcccccctgaagatgtgaagccaccagtcttaggggtccggggcctgcactgtccaccccctccaggtggccctggggctggcaaacggctatgtgcaatctgcggggacagaagctcaggcaaacactacggggtttacagctgtgagggttgcaagggcttcttcaaacgcaccatccgcaaagaccttacatactcttgccgggacaacaaagactgcacagtggacaagcgccagcggaaccgctgtcagtactgccgctatcagaagtgcctggccactggcatgaagagggaggcggtacaggaggagcgtcagcggggaaaggacaaggatggggatggggagggggctgggggagcccccgaggagatgcctgtggacaggatcctggaggcagagcttgctgtggaacagaagagtgaccagggcgttgagggtcctgggggaaccggggctccttctccaaatgaccctgtgactaacatctgtcaggcagctgacaaacagctattcacgcttgttgagtgggcgaagaggatcccacacttttcctccttgcctctggatgatcaggtcatattgctgcgggcaggctggaatgaactcctcattgcctccttttcacaccgatccattgatgttcgagatggcatcctccttgccacaggtcttcacgtgcaccgcaactcagcccattcagcaggagtaggagccatctttgatcgggtgctgacagagctagtgtccaaaatgcgtgacatgaggatggacaagacagagcttggctgcctgagggcaatcattctgtttaatccagatgccaagggcctctccaaccctagtgaggtggaggtcctgcgggagaaagtgtatgcatcactggagacctactgcaaacagaagtaccctgagcagcagggacggtttgccaagctgctgctacgtcttcctgccctccggtccattggccttaagtgtctagagcatctgtttttcttcaagctcattggtgacacccccatcgacaccttcctcatggagatgcttgaggctccccatcaactggcctgagctcagacccagacgtggtgcttctcacactggaggagcacacatccaagagggactccaagccctggggcagggtggggggccatgttcccagaaccttgatggggtgagaagtacagggcagaaccaagaacataaaccctccaagggatctgcttgatatcccaagttggaagggaccccagatacctgtgaggactggttgtctctcttcggtggccttgagtctctgaatttgtcggggtctcccatgatttggggtgatttctcaccctctgtccttcccccagcacaaagcactggccttgcctccaggaccttgcttccttctcatcttgcctcattttgcttcccatctgaagagtggaaatggggatctcccccagaggtggatactggggggcaggcctcccaagctgatggacatgagagtagggccctgacaggccttcctcctctcaaacctggcagatgggggcctctctggaagagggaggggccctgtcactgtccagagtctctttttacacttcacctccttctgcagtcagactgaaatataaaaaaggtggtggtggtggtgaaggggctggtggagatgtaggaaccgatctgctatttttaatttcctgtgaggatagagacttgcagttagactcaaagaagtactgtactttcccaggttgactaagaaatgccagtggtggaggtgggtgtttgggaaaggcagggccctgaaatggcctgtccctagggctctccaagcactagccttcccagcttcccgccgccccccccatctcttcctgtctaacttggggaaggggcctgggctgtgaggacagggcccccacaggggatggtttcacgagtgtagtcccggaggccttccctttacagctctcctccagccctgggcacatagcataggctggggacacaggatcctggcctgagaattgaggggaggtggccagcccgcagaggtggggtgctggggctgcatgatttttgccctgcgtcccttctctttggggctcctttcccctctcatacataaaatcgctttcaaattaaaatcgctgttttctgg

SEQ ID NO: 26112 - DNA, 1227 bp, Homo sapiens; identical to SEQ ID NO: 26102
  source 1..1227: mol_type = unassigned DNA

SEQ ID NO: 26113 - DNA, 2869 bp, Homo sapiens; identical to SEQ ID NO: 26103
  source 1..2869: mol_type = unassigned DNA

SEQ ID NO: 26114 - DNA, 2868 bp, Homo sapiens
  source 1..2868: mol_type = unassigned DNA
caaagatggctgccacattggcgctgtcattttggtactgagcagagcgacgggcttaattcgacccaatccaggccagagtctttctctcaggggcttcctcgtgctcagctaatcctccgatcaatccttgggaatccctgggacctcttcggtatccctactctcagccagggatcatgtcttgggccgctcgcccgcccttcctccctcagcggcatgccgcagggcagtgtgggccggtgggggtgcgaaaagaaatgcattgtggggtcgcgtcccggtggcggcggcgacggccctggctggatcccgcagcggcggcggcggcggcggtggcaggcggagaacaacaaaccccggagccggagccaggggaggctggacgggacgggatgggcgacagcgggcgggactcccgaagcccagacagctcctccccaaatccccttccccagggagtccctcccccttctcctcctgggccacccctacccccttcaacagctccatcccttggaggctctggggccccacccccacccccgatgccaccacccccactgggctctccctttccagtcatcagttcttccatggggtcccctggtctgccccctccagctcccccaggattctccgggcctgtcagcagcccccagattaactcaacagtgtcactccctgggggtgggtctggcccccctgaagatgtgaagccaccagtcttaggggtccggggcctgcactgtccaccccctccaggtggccctggggctggcaaacggctatgtgcaatctgcggggacagaagctcaggcaaacactacggggtttacagctgtgagggttgcaagggcttcttcaaacgcaccatccgcaaagaccttacatactcttgccgggacaacaaagactgcacagtggacaagcgccagcggaaccgctgtcagtactgccgctatcagaagtgcctggccactggcatgaagagggaggcggtacaggaggagcgtcagcggggaaaggacaaggatggggatggggagggggctgggggagcccccgaggagatgcctgtggacaggatcctggaggcagagcttgctgtggaacagaagagtgaccagggcgttgagggtcctgggggaaccggggctccttctccaaatgaccctgtgactaacatctgtcaggcagctgacaaacagctattcacgcttgttgagtgggcgaagaggatcccacacttttcctccttgcctctggatgatcaggtcatattgctgcgggcaggctggaatgaactcctcattgcctccttttcacaccgatccattgatgttcgagatggcatcctccttgccacaggtcttcacgtgcaccgcaactcagcccattcagcaggagtaggagccatctttgatcgggtgctgacagagctagtgtccaaaatgcgtgacatgaggatggacaagacagagcttggctgcctgagggcaatcattctgtttaatccagatgccaagggcctctccaaccctagtgaggtggaggtcctgcgggagaaagtgtatgcatcactggagacctactgcaaacagaagtaccctgagcagcagggacggtttgccaagctgctgctacgtcttcctgccctccggtccattggccttaagtgtctagagcatctgtttttcttcaagctcattggtgacacccccatcgacaccttcctcatggagatgcttgaggctccccatcaactggcctgagctcagacccagacgtggtgcttctcacactggaggagcacacatccaagagggactccaagccctggggcagggtggggggccatgttcccagaaccttgatggggtgagaagtacagggcagaaccaagaacataaaccctccaagggatctgcttgatatcccaagttggaagggaccccagatacctgtgaggactggttgtctctcttcggtggccttgagtctctgaatttgtcggggtctcccatgatttggggtgatttctcaccctctgtccttcccccagcacaaagcactggccttgcctccaggaccttgcttccttctcatcttgcctcattttgcttcccatctgaagagtggaaatggggaactcccccagaggtggatactggggggcaggcctcccaagctgatggacatgagagtagggccctgacaggccttcctcctctcaaacctggcagatgggggcctctctggaagagggaggggccctgtcactgtccagagtctctttttacacttcacctccttctgcagtcagactgaaatataaaaaaggtggtggtggtggtgaaggggctggtggagatgtaggaaccgatctgctatttttaatttcctgtgaggatagagacttgcagttagactcaaagaagtactgtactttcccaggttgactaagaaatgccagtggtggaggtgggtgtttgggaaaggcagggccctgaaatggcctgtccctagggctctccaagcactagccttcccagcttcccgccgccccccccatctcttcctgtctaacttggggaaggggcctgggctgtgaggacagggcccccacaggggatggtttcacgagtgtagtcccggaggccttccctttacagctctcctccagccctgggcacatagcataggctggggacacaggatcctggcctgagaattgaggggaggtggccagcccgcagaggtggggtgctggggctgcatgatttttgccctgcgtcccttctctttggggctcctttcccctctcatacataaaatcgctttcaaattaaaatcgctgttttctgg

SEQ ID NO: 26115 - DNA, 1324 bp, Homo sapiens; identical to SEQ ID NO: 26088
  source 1..1324: mol_type = unassigned DNA

SEQ ID NO: 26116 - DNA, 2860 bp, Homo sapiens; identical to SEQ ID NO: 26109
  source 1..2860: mol_type = unassigned DNA

SEQ ID NO: 26117 - DNA, 1227 bp, Homo sapiens; identical to SEQ ID NO: 26105
  source 1..1227: mol_type = unassigned DNA

SEQ ID NO: 26118 - DNA, 2859 bp, Homo sapiens
  source 1..2859: mol_type = unassigned DNA
caaagatggctgccacattggcgctgtcattttggtactgagcagagcgacgggcttaattcgacccaatccaggccagagtctttctctcaggggcttcctcgtgctcagctaatcctccgatcaatccttgggaatccctgggacctcttcggtatccctactctcagccagggatcatgtcttgggccgctcgcccgcccttcctccctcagcggcatgccgcagggcagtgtgggccggtgggggtgcgaaaagaaatgcattgtggggtcgcgtcccggtggcggcggcgacggccctggctggatcccgcagcggcggcggcggcggcggtggcaggcggagaacaacaaaccccggagccggagccaggggaggctggacgggacgggatgggcgacagcgggcgggactcccgaagcccagacagctcctccccaaatccccttccccagggagtccctcccccttctcctcctgggccacccctacccccttcaacagctccatcccttggaggctctggggccccacccccacccccgatgccaccacccccactgggctctccctttccagtcatcagttcttccatggggtcccctggtctgccccctccagctcccccaggattctccgggcctgtcagcagcccccagattaactcaacagtgtcactccctgggggtgggtctggcccccctgaagatgtgaagccaccagtcttaggggtccggggcctgcactgtccaccccctccaggtggccctggggctggcaaacggctatgtgcaatctgcggggacagaagctcaggcaaacactacggggtttacagctgtgagggttgcaagggcttcttcaaacgcaccatccgcaaagaccttacatactcttgccgggacaacaaagactgcacagtggacaagcgccagcggaaccgctgtcagtactgccgctatcagaagtgcctggccactggcatgaagagggaggcggtacaggaggagcgtcagcggggaaaggacaaggatggggatggggagggggctgggggagcccccgaggagatgcctgtggacaggatcctggaggcagagcttgctgtggaacagaagagtgaccaggggggctcccagcatatctcaaaatctccaaatgaccctgtgactaacatctgtcaggcagctgacaaacagctattcacgcttgttgagtgggcgaagaggatcccacacttttcctccttgcctctggatgatcaggtcatattgctgcgggcaggctggaatgaactcctcattgcctccttttcacaccgatccattgatgttcgagatggcatcctccttgccacaggtcttcacgtgcaccgcaactcagcccattcagcaggagtaggagccatctttgatcgggtgctgacagagctagtgtccaaaatgcgtgacatgaggatggacaagacagagcttggctgcctgagggcaatcattctgtttaatccagatgccaagggcctctccaaccctagtgaggtggaggtcctgcgggagaaagtgtatgcatcactggagacctactgcaaacagaagtaccctgagcagcagggacggtttgccaagctgctgctacgtcttcctgccctccggtccattggccttaagtgtctagagcatctgtttttcttcaagctcattggtgacacccccatcgacaccttcctcatggagatgcttgaggctccccatcaactggcctgagctcagacccagacgtggtgcttctcacactggaggagcacacatccaagagggactccaagccctggggcagggtggggggccatgttcccagaaccttgatggggtgagaagtacagggcagaaccaagaacataaaccctccaagggatctgcttgatatcccaagttggaagggaccccagatacctgtgaggactggttgtctctcttcggtggccttgagtctctgaatttgtcggggtctcccatgatttggggtgatttctcaccctctgtccttcccccagcacaaagcactggccttgcctccaggaccttgcttccttctcatcttgcctcattttgcttcccatctgaagagtggaaatggggaactcccccagaggtggatactggggggcaggcctcccaagctgatggacatgagagtagggccctgacaggccttcctcctctcaaacctggcagatgggggcctctctggaagagggaggggccctgtcactgtccagagtctctttttacacttcacctccttctgcagtcagactgaaatataaaaaaggtggtggtggtggtgaaggggctggtggagatgtaggaaccgatctgctatttttaatttcctgtgaggatagagacttgcagttagactcaaagaagtactgtactttcccaggttgactaagaaatgccagtggtggaggtgggtgtttgggaaaggcagggccctgaaatggcctgtccctagggctctccaagcactagccttcccagcttcccgccgccccccccatctcttcctgtctaacttggggaaggggcctgggctgtgaggacagggcccccacaggggatggtttcacgagtgtagtcccggaggccttccctttacagctctcctccagccctgggcacatagcataggctggggacacaggatcctggcctgagaattgaggggaggtggccagcccgcagaggtggggtgctggggctgcatgatttttgccctgcgtcccttctctttggggctcctttcccctctcatacataaaatcgctttcaaattaaaatcgctgttttctgg

SEQ ID NO: 26119 - DNA, 1227 bp, Homo sapiens; identical to SEQ ID NO: 26105
  source 1..1227: mol_type = unassigned DNA

SEQ ID NO: 26120 - DNA, 1324 bp, Homo sapiens; identical to SEQ ID NO: 26088
  source 1..1324: mol_type = unassigned DNA

SEQ ID NO: 26121 - DNA, 2036 bp, Homo sapiens
  source 1..2036: mol_type = unassigned DNA
gcggtggcaagagtagcggtgacggcggcggcggcggcggcggcagcattatgcgtgattactgacaggcaccagctgctgccgccacagccgtctcaaacgcactatgtggactctccgatctagaggcagattcctgactaatcccagagggctggcccagcctgtgctccccgggctgctaggaagcgatgaccactcttgttagcccaagttgaagaaagccgggctgtgcctgggagccgagagaggcggtaatatttagaagctgcacaggagaggaacatgaactgacgagtaaacatgtatggaaattattctcacttcatgaagtttcccgcaggctatggaggctcccctggccacactggctctacatccatgagcccatcagcagccttgtccacagggaagccaatggacagccaccccagctacacagataccccagtgagtgccccacggactctgagtgcagtggggacccccctcaatgccctgggctctccatatcgagtcatcacctctgccatgggcccaccctcaggagcacttgcagcgcctccaggaatcaacttggttgccccacccagctctcagctaaatgtggtcaacagtgtcagcagttcagaggacatcaagcccttaccagggcttcccgggattggaaacatgaactacccatccaccagccccggatctctggttaaacacatctgtgccatctgtggagacagatcctcaggaaagcactacggggtatacagttgtgaaggctgcaaagggttcttcaagaggacgataaggaaggacctcatctacacgtgtcgggataataaagactgcctcattgacaagcgtcagcgcaaccgctgccagtactgtcgctatcagaagtgccttgtcatgggcatgaagagggaagctgtgcaagaagaaagacagaggagccgagagcgagctgagagtgaggcagaatgtgctaccagtggtcatgaagacatgcctgtggagaggattctagaagctgaacttgctgttgaaccaaagacagaatcctatggtgacatgaatatggagaactcgacaaatgaccctgttaccaacatatgtcatgctgctgacaagcagcttttcaccctcgttgaatgggccaagcgtattccccacttctctgacctcaccttggaggaccaggtcattttgcttcgggcagggtggaatgaattgctgattgcctctttctcccaccgctcagtttccgtgcaggatggcatccttctggccacgggtttacatgtccaccggagcagtgcccacagtgctggggtcggctccatctttgacagagtcctaactgagctggtttccaaaatgaaagacatgcagatggacaagtcggaactgggatgcctgcgagccattgtactctttaacccagatgccaagggcctgtccaacccctctgaggtggagactctgcgagagaaggtttatgccacccttgaggcctacaccaagcagaagtatccggaacagccaggcaggtttgccaagctgctgctgcgcctcccagctctgcgttccattggcttgaaatgcctggagcacctcttcttcttcaagctcatcggggacacccccattgacaccttcctcatggagatgttggagaccccgctgcagatcacctgagccccaccagccacagcctccccacccaggatgacccctgggcaggtgtgtgtggacccccaccctgcactttcctccacctcccaccctgacccccttcctgtccccaaaatgtgatgcttataataaagaaaacctttctacacatgagacttttataggtggacttttgtatagatgttaaaggtaatacgctttgctgtctacagggctgggagactttctggaagttcttgggaaaactaatcaagcctctgtacatacaattggtttaaattattttttcacttgccctggaaagcaaacaaatgagtaataaaataatatgtgtgaaattggca

SEQ ID NO: 26122 - DNA, 694 bp, Homo sapiens
  source 1..694: mol_type = unassigned DNA
ctgcagcctgctccttgccatccaccacaaaccctcaccgaaccagtggccaccaccatgacaagggaccagaatggaacctgggagatggagagtaatgaaaactttgagggctacatgaaggccctggatattgattttgccacccgcaagattgcagtacgtctcactcagacgaaggttattgatcaagatggtgataacttcaagacaaaaaccactagcacattccgcaactatgatgtggatttcactgttggagtagagtttgacgagtacacaaagagcctggataaccggcatgttaaggcactggtcacctgggaaggtgatgtccttgtgtgtgtgcaaaagggggagaaggagaaccgcggctggaagcagtggattgagggggacaagctgtacctggagctgacctgtggtgaccaggtgtgccgtcaagtgttcaaaaagaaatgatggcgacgtgggaggcctgccaagcacaagctccccactgcccacactgagtggtctactggctttgagaaacagctgtggggaccttcccactcttgacagagccccattaaggcatctgggtgggttttaaacagaatgcctatgtagcagtgatagacatattcccctcctttgaaacctagcattaaatggaaaaacaaaaattactcccatattttgaaacccttta

SEQ ID NO: 26123 - DNA, 180 bp, Homo sapiens
  source 1..180: mol_type = unassigned DNA
tagggagccagcccaggagcccagctgctgcagtcagatgctcccaaggacagcagcctgctccttgccatccaccacaaaccctcaccgaaccagtggccaccaccatgacaagggaccagaatggaacctgggagatggagagtaatgaaaactttgagggctacatgaaggccctgg

SEQ ID NO: 26124 - DNA, 489 bp, Homo sapiens
  source 1..489: mol_type = unassigned DNA
ctgctgcagtcagatgctcccaaggacagcagtctccagaaagcttcttgtaacctggaaagattggttatagttgatcattttcctccatcttaaaagtcacctgaagaattccacaaggacttagcctgctccttgccatccaccacaaaccctcaccgaaccagtggccaccaccatgacaagggaccagaatggaacctgggagatggagagtaatgaaaactttgagggctacatgaaggccctggatattgattttgccacccgcaagattgcagtacgtctcactcagacgaaggttattgatcaagatggtgataacttcaagacaaaaaccactagcacattccgcaactatgatgtggatttcactgttggagtagagtttgacgagtacacaaagagcctggataaccggcatgttaaggcactggtcacctgggaaggtgatgtccttgtgtgtgtgcaaaagggggagaaggagaa

SEQ ID NO: 26125 - DNA, 4276 bp, Homo sapiens
  source 1..4276: mol_type = unassigned DNA
tgtccaccagctgagaaggacaagggcggaaggcagctgcacagagcagggccacggccttgcacacagtccagggagcttttgtgcaggagccaggcctccccctgggtccccatgatgagagaatgggttctgctcatgtccgtgctgctctgtggcctggctggccccacacacctgttccagccaagcctggtgctggacatggccaaggtcctcttggataactactgcttcccggagaacctgctgggcatgcaggaagccatccagcaggccatcaagagccatgagattctgagcatctcagacccgcagacgctggccagtgtgctgacagccggggtgcagagctccctgaacgatcctcgcctggtcatctcctatgagcccagcacccccgagcctcccccacaagtcccagcactcaccagcctctcagaagaggaactgcttgcctggctgcaaaggggcctccgccatgaggttctggagggtaatgtgggctacctgcgggtggacagcgtcccgggccaggaggtgctgagcatgatgggggagttcctggtggcccacgtgtgggggaatctcatgggcacctccgccttagtgctggatctccggcactgcacaggaggccaggtctctggcattccctacatcatctcctacctgcacccagggaacaccatcctgcacgtggacactatctacaaccgcccctccaacaccaccacggagatctggaccttgccccaggtcctgggagaaaggtacggtgccgacaaggatgtggtggtcctcaccagcagccagaccaggggcgtggccgaggacatcgcgcacatccttaagcagatgcgcagggccatcgtggtgggcgagcggactgggggaggggccctggacctccggaagctgaggataggcgagtctgacttcttcttcacggtgcccgtgtccaggtccctggggccccttggtggaggcagccagacgtgggagggcagcggggtgctgccctgtgtggggactccggccgagcaggccctggagaaagccctggccatcctcactctgcgcagcgcccttccaggggtagtccactgcctccaggaggtcctgaaggactactacacgctggtggaccgtgtgcccaccctgctgcagcacttggccagcatggacttctccacggtggtctccgaggaagatctggtcaccaagctcaatgccggcctgcaggctgcgtctgaggatcccaggctcctggtgcgagccatcgggcccacagaaactccttcttggcccgcgcccgacgctgcagccgaagactcaccaggggtggccccagagttgcctgaggacgaggctatccggcaagcactggtggactctgtgttccaggtgtcggtgctgccaggcaatgtgggctacctgcgcttcgatagttttgctgacgcctccgtcctgggtgtgttggccccatatgtcctgcgccaggtgtgggagccgctacaggacacggagcacctcatcatggacctgcgccacaaccctggagggccatcctctgctgtgcccctgctcctgtcctacttccagggccctgaggccggccccgtgcacctcttcaccacctatgatcgccgcaccaacatcacgcaggagcacttcagccacatggagctcccgggcccacgctacagcacccaacgtggggtgtatctgctcaccagccaccgcaccgccacggccgcggaggagttcgccttccttatgcagtcgctgggctgggccacactggtaggtgagatcaccgcgggcaacctgctgcacacccgcacggtgccgctgctggacacacccgaaggcagcctcgcgctcaccgtgccggtcctcaccttcatcgacaatcacggcgaggcctggctgggtggtggagtggtgcccgatgccatcgtgctggccgaggaggccctggacaaagcccaggaagtgctggagttccaccaaagcctgggggccttggtggagggcacagggcacctgctggaggcccactatgctcggccagaggtcgtggggcagaccagtgccctcctgcgggccaagctggcccagggcgcctaccgcacagctgtggacttggagtctctggcctctcagctcacagcagacctccaggaggtgtctggggaccaccgcttgctagtgttccacagccctggcgagctggtggtagaggaagcacccccaccaccccctgctgtcccctctccagaggagctcacctaccttattgaggccctgttcaagacagaggtgctgcccggccagctgggctacctgcgttttgacgccatggctgaactggagacagtgaaggccgtggggccacagctggtgcggctggtatggcaacagctggtggacacggctgcgctggtgatcgacctgcgctacaaccctggcagctactccacggccatcccgctgctctgctcctacttctttgaggcagagccccgccagcacctgtattctgtctttgacagggccacctcaaaagtcacggaggtgtggaccttgccccaggtcgccggccagcgctacggctcacacaaggacctctacatcctgatgagccacaccagtggctctgcggccgaggcctttgcacacaccatgcaggacctgcagcgggccacggtcattggggagcccacggccggaggcgcactctctgtgggcatctaccaggtgggcagcagccccttatatgcatccatgcccacccagatggccatgagtgccaccacaggcaaggcctgggacctggctggtgtggagcccgacatcactgtgcccatgagcgaagccctttccatagcccaggacatagtggctctgcgtgccaaggtgcccacggtgctgcagacggccgggaagctggtggctgataactatgcctctgccgagctgggggccaagatggccaccaaactgagcggtctgcagagccgctactccagggtgacctcagaagtggccctagccgagatcctgggggctgacctgcagatgctctccggagacccacacctgaaggcagcccatatccctgagaatgccaaggaccgcattcctggaattgtgcccatgcagatcccttcccctgaagtatttgaagagctgatcaagttttccttccacactaacgtgcttgaggacaacattggctacttgaggtttgacatgtttggggacggtgagctgctcacccaggtctccaggctgctggtggagcacatctggaagaagatcatgcacacggatgccatgatcatcgacatgaggttcaacatcggtggccccacatcctccattcccatcttgtgctcctacttctttgatgaaggccctccagttctgctggacaagatctacagccggcctgatgactctgtcagtgaactctggacacacgcccaggttgtaggtgaacgctatggctccaagaagagcatggtcattctgaccagcagtgtgacggccggcaccgcggaggagttcacctatatcatgaagaggctgggccgggccctggtcattggggaggtgaccagtgggggctgccagccaccacagacctaccacgtggatgacaccaacctctacctcactatccccacggcccgttctgtgggggcctcggatggcagctcctgggaaggggtgggggtgacaccccatgtggttgtccctgcagaagaggctctcgccagggccaaggagatgctccagcacaaccagctgagggtgaagcggagcccaggcctgcaggaccacctgtagggaagggccccataggcagagccccagggcagacagaacctctgggacacacaccaagggcactcctgcaggtggcccggcctgaggttcccaggagcagcaaaggggcctgctgagctctggttaggttacagctggaggtgtgtatatatacacacacacacatgtatatacacatatatatgtgtatgtatatatatgtatatatatatggctttccaataaccacctaaattttaacaaaggttccttctaagtggtagaacttggggtggtatttttaccttccttcttcatactttgctctttttcttaaatactcattaatgtgcatatatcattattttcagatgcagctatcattattccaaaatacaaaataaagaagataaaataaattatatacccgagccattaa

SEQ ID NO: 26126 - DNA, 838 bp, Homo sapiens
  source 1..838: mol_type = unassigned DNA
atgaattattccaaaattcctgcacaagtggacctcagaaggcagacggagcgcgactgccgagtgagcagcttccgagtcaaggagaacttcgacaaggctcgcttctctgggacctggtacgccatggccaagaaggaccccgagggcctctttctgcaggacaacatcgtcgcggagttctccgtggacgagaccggccagatgagcgccacagccaagggccgagtccgtcttttgaataactgggacgtgtgcgcagacatggtgggcaccttcacagacaccgaggaccctgccaagttcaagatgaagtactggggcgtagcctcctttctccagaaaggaaatgatgaccactggatcgtcgacacagactacgacacgtatgccgtgcagtactcctgccgcctcctgaacctcgatggcacctgtgctgacagctactccttcgtgttttcccgggaccccaacggcctgcccccagaagcgcagaagattgtaaggcagcggcaggaggagctgtgcctggccaggcagtacaggctgatcgtccacaacggttactgcgatggcagatcagaaagaaaccttttgtagcaatatcaagaatctagtttcatctgagaacttctgattagctctcagtcttcagctctatttatcttaggagtttaatttgcccttctctccccatcttccctcagttcccataaaaccttcattacacataaagatacacgtgggggtcagtgaatctgcttgcctttcctgaaagtttctggggcttaagattccagactctgattcattaaactatagtcacccgtgtcctgtg

SEQ ID NO: 26127 - DNA, 1068 bp, Homo sapiens
  source 1..1068: mol_type = unassigned DNA
gctccacgcgcgcccggactcggcggccaggcttgcgcgcggttcccctcccggtgggcggattcctgggcaagatgaagtgggtgtgggcgctcttgctgttggcggcgctgggcagcggccgcgcggagcgcgactgccgagtgagcagcttccgagtcaaggagaacttcgacaaggctcgcttctctgggacctggtacgccatggccaagaaggaccccgagggcctctttctgcaggacaacatcgtcgcggagttctccgtggacgagaccggccagatgagcgccacagccaagggccgagtccgtcttttgaataactgggacgtgtgcgcagacatggtgggcaccttcacagacaccgaggaccctgccaagttcaagatgaagtactggggcgtagcctcctttctccagaaaggaaatgatgaccactggatcgtcgacacagactacgacacgtatgccgtgcagtactcctgccgcctcctgaacctcgatggcacctgtgctgacagctactccttcgtgttttcccgggaccccaacggcctgcccccagaagcgcagaagattgtaaggcagcggcaggaggagctgtgcctggccaggcagtacaggctgatcgtccacaacggttactgcgatggcagatcagaaagaaaccttttgtagcaatatcaagaatctagtttcatctgagaacttctgattagctctcagtcttcagctctatttatcttaggagtttaatttgcccttctctccccatcttccctcagttcccataaaaccttcattacacataaagatacacgtgggggtcagtgaatctgcttgcctttcctgaaagtttctggggcttaagattccagactctgattcattaaactatagtcacccgtgtcctgtgattttagttttcatttgtgtttatgtctgtgctgcagacggatgggtggggtgcgcttctttataccaggagcacgtggctctttctgacctttggcctgttctagtgcctaatctccattattaaatactggcttctcccaacttcctg

SEQ ID NO: 26128 - DNA, 1314 bp, Homo sapiens
  source 1..1314: mol_type = unassigned DNA
gccaatttggcatggccagggcctgggcactcacgcaccagggagcctcgcgggtccgctctcgctctgtgaggccacggtcttcccgccaggttgactcgagcctcctgccagagccactggccccggaggccaccctagaccgcagctggcggccgctggcacgagtgcagggtaactgagccagggccgctggcgcatttggcctggccgaggccaccccgcgcggccgctccactgtgcccgaggctgtcctggaggtgaggccggcccacagggaccctgcccgtgcccgggctccgggcggattcctgggcaagatgaagtgggtgtgggcgctcttgctgttggcggcgctgggcagcggccgcgcggagcgcgactgccgagtgagcagcttccgagtcaaggagaacttcgacaaggctcgcttctctgggacctggtacgccatggccaagaaggaccccgagggcctctttctgcaggacaacatcgtcgcggagttctccgtggacgagaccggccagatgagcgccacagccaagggccgagtccgtcttttgaataactgggacgtgtgcgcagacatggtgggcaccttcacagacaccgaggaccctgccaagttcaagatgaagtactggggcgtagcctcctttctccagaaaggaaatgatgaccactggatcgtcgacacagactacgacacgtatgccgtgcagtactcctgccgcctcctgaacctcgatggcacctgtgctgacagctactccttcgtgttttcccgggaccccaacggcctgcccccagaagcgcagaagattgtaaggcagcggcaggaggagctgtgcctggccaggcagtacaggctgatcgtccacaacggttactgcgatggcagatcagaaagaaaccttttgtagcaatatcaagaatctagtttcatctgagaacttctgattagctctcagtcttcagctctatttatcttaggagtttaatttgcccttctctccccatcttccctcagttcccataaaaccttcattacacataaagatacacgtgggggtcagtgaatctgcttgcctttcctgaaagtttctggggcttaagattccagactctgattcattaaactatagtcacccgtgtcctgtgattttagttttcatttgtgtttatgtctgtgctgcagacggatgggtggggtgcgcttctttataccaggagcacgtggctctttctgacctttggcctgttctagtgcctaatctccattattaaatactggcttctcccaacttcctg

SEQ ID NO: 26129 - DNA, 1016 bp, Homo sapiens
  source 1..1016: mol_type = unassigned DNA
atcctttataaaatgaaaaactacttggatgaattattccaaaattcctgcacaagtggacctcagaaggcaggcggagcgcgactgccgagtgagcagcttccgagtcaaggagaacttcgacaaggctcgcttctctgggacctggtacgccatggccaagaaggaccccgagggcctctttctgcaggacaacatcgtcgcggagttctccgtggacgagaccggccagatgagcgccacagccaagggccgagtccgtcttttgaataactgggacgtgtgcgcagacatggtgggcaccttcacagacaccgaggaccctgccaagttcaagatgaagtactggggcgtagcctcctttctccagaaaggaaatgatgaccactggatcgtcgacacagactacgacacgtatgccgtgcagtactcctgccgcctcctgaacctcgatggcacctgtgctgacagctactccttcgtgttttcccgggaccccaacggcctgcccccagaagcgcagaagattgtaaggcagcggcaggaggagctgtgcctggccaggcagtacaggctgatcgtccacaacggttactgcgatggcagatcagaaagaaaccttttgtagcaatatcaagaatctagtttcatctgagaacttctgattagctctcagtcttcagctctatttatcttaggagtttaatttgcccttctctccccatcttccctcagttcccataaaaccttcattacacataaagatacacgtgggggtcagtgaatctgcttgcctttcctgaaagtttctggggcttaagattccagactctgattcattaaactatagtcacccgtgtcctgtgattttagttttcatttgtgtttatgtctgtgctgcagacggatgggtggggtgcgcttctttataccaggagcacgtggctctttctgacctttggcctgttctagtgcctaatctccattattaaatactggcttctcccaacttcctg

SEQ ID NO: 26130 - DNA, 1012 bp, Homo sapiens
  source 1..1012: mol_type = unassigned DNA
ttattgcaacagggccccagccttataaaaagccctggtaacccggccattacacatcctgtctctgtgtgtggagctggctggaatctctcagcctcacctgccagacaacaccccctccttcctcaccctgtctcctgcattctcctgaaaccttcatccacacaatgcctcccaacctcactggctactaccgctttgtctcgcagaagaacatggaggactacctgcaagccctaaacatcagcttggctgtgcggaagatcgcgctgctgctgaagccggacaaggagatcgaacaccagggcaaccacatgacggtgaggacgctcagcaccttccgaaactacactgtgcagtttgatgtgggagtggagtttgaggaggacctcaggagcgtggacggacgaaaatgccagaccatagtaacctgggaggaggagcacctggtgtgtgtgcagaaaggggaggtccccaaccggggctggagacactggctggagggagagatgctgtatctggaactgactgcaagggatgcagtgtgcgagcaggtcttcaggaaggtcagatagccggagaggagccaagatccctccagacagcaccagctcacagacgctcttgttgtgcccccttcaagcccagattgtgccaggtcagctgtcccttcctctggccacctttcctccctctgggtccctcctcacccctccccgtgttaatctgtaacttgcagcccccaggccaaagtcctttctcacactccactgcccaatagtgacctcacttccaggtcaaggtctggcgtcccaaatgaaagaagcaggcaaagggaaggagcccctgagaacaaccaatctccgctctctcctgtccatttgacctcttcttttccttctaagaaagaactaagctttgggcatttggcgattagtgaaaattctatcctgatggacttctggaaaactgtgactggggttcaagagtttaaacaggggctactggcaga

SEQ ID NO: 26131 - DNA, 3949 bp, Homo sapiens
  source 1..3949: mol_type = unassigned DNA
cggagcgctctgacttgcaagcgggctgcgctgcggagcccagtgcccgagtgacacccgcggagagtgcagggccggggaacgcgagccctcgggggcagctgcaaggcgttgggcagcgcttgcctgcgccgagcgagtctccccttcccggcgctccgccgccccgcaccccactctcccaccctctcgcaacttgggtcgagttgacaactcccgcggcagcccgctggcccgtgccgcctccgctgcgcacccctcccccggggtgagagggagccggcgcgccggttccggggacgctcgggcggcagcagcttggccatgagggcagttcgagtagtctaactcgcggctgtcaccgccactgcagcggagccggccggccgggcgctgcgggacgggcgggcggctgccggcaggaggcgccgagccgggtgactgccgcggcgggcacagtccggggccacagcgccgagcccgggcgggagtggccccgcgcaggcagggagcggcgccgcgcactccaacccggcgggcacctcgggggcgggcgcggggcgcagccttctcgtcccggcctctgtgacaagcgccccggagccgggagcccgattgccgggctcggggtgggcgcggacgcaggcactgggctcgtgcggggccccgggcgtcgcgatgaacatcgtggtggagttcttcgtggtcactttcaaagtgctctgggcgttcgtgctggccgcggcgcgctggctggtgcggcccaaggagaagagcgtggcgggccaggtgtgcctcatcaccggcgccggcagcggcctgggccgcctcttcgcgctggagttcgcccggcgtcgggcgctgctggtgctgtgggacatcaacacgcaaagcaacgaggagacggctggcatggtgcgccacatctaccgcgacctggaggcggccgacgccgctgcgctgcaagctgggaatggtgaggaagaaattctgccccactgtaacttgcaggtttttacctacacctgtgacgtggggaagagggagaacgtctacctgacggctgaaagagtccgcaaggaggttggcgaagtctcagtcctggtcaataatgctggtgtggtctctgggcatcaccttctggaatgtcctgatgagctcattgagagaaccatgatggtcaattgccatgcacacttctggaccactaaggcttttcttcctacgatgctggagattaatcatggtcatattgtgacagttgcaagttccttgggattgttcagtactgccggagttgaggattactgtgccagtaaatttggagttgtgggttttcatgaatccctgagccatgaactaaaggctgctgaaaaggatggaattaaaacaaccttggtttgcccttatcttgtagacactggcatgttcagaggctgccgaatcaggaaagaaattgagccttttctgccacctctgaagcctgattactgtgtgaagcaggccatgaaggccatcctcactgaccagcccatgatctgcactccccgcctcatgtacatcgtgaccttcatgaagagcatcctaccatttgaagcagttgtgtgcatgtatcggttcctaggagcggacaagtgtatgtacccctttattgctcaaagaaagcaagccacaaacaataatgaagcaaaaaatggaatctaagaatctttttgtatggaatattacttctatcagaagatgatcaagatgtttcagtccagtgcacatcagcattgctgacattttatggattctaaacttgtgttgtttcttttttaaatcaactttttaaaaaaataaagtgtaaattaaccgactagagtacttggaaaatgtgatcagtacaagtgaacttaggttgttgccaacagggtccttttaggcagaacccagaaaccagtcaaatctgtagagaagcagtgtgacatcttcaggttaccattattttttaatgagcaggaagtctagaaatgataactagactgtatgtttcatgtgtgtgatttttcagaattcccagagtttactcattcttgttattaaactctagccagttgacatcttcgcaatttcaaggactgatagtgctgtattttctcacgttttctaagtttccgttttgcaaggcctaggtgactttttcatggtgtttgtatgtttagctcttttgaaaaggaattttgaaatctccatcaactgaagtaaatgatgtctgagtgttacagtaaaggtgaccaagtctctttcttaaagtcacaatgactaaagtattagttgaatttttttttttttttttttgatggagtctcgctctgtcaccaggctggagtgcagtagcacaatcacggctcactgcaatctctgcctcccagtttcaagtgattctgctgtctcagcctcccaagtagctgggactacaggcatgcgccaccacgcccagctaatttttgtatttttagtagagacggggtttcaccatgttggtcaggatggtctccatctcttgacattgtgatccacctgcctcggcctcccaaagtgctgggattacaggcatgagccactgcacccagccttgaatttttaattttatctctgatatacttcattaagtgtctggagacctaattatcctaaaagatcatacattttctacctatgaattttgctgcatacagaaagtgccctttcctcaggaagttgctgtgtttcatttctttggatggactcttatctagaatacatagcagctctgcaaaggaacagtttttaaaaatgggaacttctacattgaaaagtccccatttttgtgccaactatgattagtgagaggaagaaatcttattctatggcatatgtatggaagggtgtaaagattcttttgaaaggtttattcacattgtagaacagcaaatgacatttttacagtatttttttgtaaagcaaactattttgtgccttgaatttggtatatgtgtattagtgaaacattgtaaaggtgaacttctacctctgtatctaaatgtataccatccacttgtaaatgactataaactattatgtgattgcttttttttttagaatgtcttgtttaaatagtggccaatgtttaaggctgttaaaataagccaacttttactaattggggagttttataaatgactgattaaatttaaagaattaacttacatgcaattgtgtgattattagttatcagcagtgttgtaaggaaaattattgtgtttttttttatgatcattatcccactttaggtaaagaaaaatattggaatggaatagtgttgggaaacagacattaacaacctagggtgcctgcactcaaatagccgatgttactgtccctagattagagacttgattaagggcttgtttgtaccaaaagtggggaaacaatgccatgacctgtgttttagtttggctgcaccacagatcaaatctgcactgtgtctacatataggaaaggtcctggtgtgtgctaatgttcccaatgcaggacttgaggaagagctctgttatatgtttccatttctctttatcaaagataaccaaaccttatggcccttataacaatggaggcactggctgcctcttaattttcaatcatggacctaaagaagtactctgaagggtctcaacaatgccaggtggggacagatatactcagagattatccaggtctgcctcccagcgagcctggagtacaccagaccctcctagagaaatctgttataatttaacaacccacttatccaccttaaaactgaggaaagtcgtctttacatctaattttattcttgtgtgttataacttaaacctatttctatttttgtttgttattgcccttataagggtgtccatctccaagttcaataaactaattcatttaa

SEQ ID NO: 26132 - DNA, 2588 bp, Homo sapiens
  source 1..2588: mol_type = unassigned DNA
gtctgctccccgggctgtcgcaatttgaattggggcgtgtctagaaagagaagccatagtcggcgagcaacgctggagcatcccgctctggtgccgctgcagccggcagagatggttgagctcatgttcccgctgttgctcctccttctgcccttccttctgtatatggctgcgccccaaatcaggaaaatgctgtccagtggggtgtgtacatcaactgttcagcttcctgggaaagtagttgtggtcacaggagctaatacaggtatcgggaaggagacagccaaagagctggctcagagaggagctcgagtatatttagcttgccgggatgtggaaaagggggaattggtggccaaagagatccagaccacgacagggaaccagcaggtgttggtgcggaaactggacctgtctgatactaagtctattcgagcttttgctaagggcttcttagctgaggaaaagcacctccacgttttgatcaacaatgcaggagtgatgatgtgtccgtactcgaagacagcagatggctttgagatgcacataggagtcaaccacttgggtcacttcctcctaacccatctgctgctagagaaactaaaggaatcagccccatcaaggatagtaaatgtgtcttccctcgcacatcacctgggaaggatccacttccataacctgcagggcgagaaattctacaatgcaggcctggcctactgtcacagcaagctagccaacatcctcttcacccaggaactggcccggagactaaaaggctctggcgttacgacgtattctgtacaccctggcacagtccaatctgaactggttcggcactcatctttcatgagatggatgtggtggcttttctcctttttcatcaagactcctcagcagggagcccagaccagcctgcactgtgccttaacagaaggtcttgagattctaagtgggaatcatttcagtgactgtcatgtggcatgggtctctgcccaagctcgtaatgagactatagcaaggcggctgtgggacgtcagttgtgacctgctgggcctcccaatagactaacaggcagtgccagttggacccaagagaagactgcagcagactacacagtacttcttgtcaaaatgattctccttcaaggttttcaaaacctttagcacaaagagagcaaaaccttccagccttgcctgcttggtgtccagttaaaactcagtgtactgccagattcgtctaaatgtctgtcatgtccagatttactttgcttctgttactgccagagttactagagatatcataataggataagaagaccctcatatgacctgcacagctcattttccttctgaaagaaactactacctaggagaatctaagctatagcagggatgatttatgcaaatttgaactagcttctttgttcacaattcagttcctcccaaccaaccagtcttcacttcaagagggccacactgcaacctcagcttaacatgaataacaaagactggctcaggagcagggcttgcccaggcatggtggatcaccggaggtcagtagttcaagaccagcctggccaacatggtgaaaccccacctctactaaaaattgtgtatatctttgtgtgtcttcctgtttatgtgtgccaagggagtattttcacaaagttcaaaacagccacaataatcagagatggagcaaaccagtgccatccagtctttatgcaaatgaaatgctgcaaagggaagcagattctgtatatgttggtaactacccaccaagagcacatgggtagcagggaagaagtaaaaaaagagaaggagaatactggaagataatgcacaaaatgaagggactagttaaggattaactagccctttaaggattaactagttaaggattaatagcaaaagatattaaatatgctaacatagctatggaggaattgagggcaagcacccaggactgatgaggtcttaacaaaaaccagtgtggcaaaaaaaaaaaaaaaaaaaaaaaaaaaaatcctaaaaacaaacaaacaaaaaaaacaattcttcattcagaaaaattatcttagggactgatattggtaattatggtcaatttaataatattttggggcatttccttacattgtcttgacaagattaaaatgtctgtgccaaaattttgtattttatttggagacttcttatcaaaagtaatgctgccaaaggaagtctaaggaattagtagtgttcccatcacttgtttggagtgtgctattctaaaagattttgatttcctggaatgacaattatattttaactttggtgggggaaagagttataggaccacagtcttcacttctgatacttgtaaattaatcttttattgcacttgttttgaccattaagctatatgtttagaaatggtcattttacggaaaaattagaaaaattctgataatagtgcagaataaatgaattaatgttttacttaatttatattgaactgtcaatgacaaataaaaattctttttgattattttttgttttcatttaccagaataaaaactaagaattaaaagtttgattacagtcaaa

SEQ ID NO: 26133 - DNA, 1926 bp, Homo sapiens
  source 1..1926: mol_type = unassigned DNA
cggcgagcaacgctggagcatcccgctctggtgccgctgcagccggcagagatggttgagctcatgttcccgctgttgctcctccttctgcccttccttctgtatatggctgcgccccaaatcaggaaaatgctgtccagtggggtgtgtacatcaactgttcagcttcctgggaaagtagttgtggtcacaggagctaatacaggagctcgagtatatttagcttgccgggatgtggaaaagggggaattggtggccaaagagatccagaccacgacagggaaccagcaggtgttggtgcggaaactggacctgtctgatactaagtctattcgagcttttgctaagggcttcttagctgaggaaaagcacctccacgttttgatcaacaatgcaggagtgatgatgtgtccgtactcgaagacagcagatggctttgagatgcacataggagtcaaccacttgggtcacttcctcctaacccatctgctgctagagaaactaaaggaatcagccccatcaaggatagtaaatgtgtcttccctcgcacatcacctgggaaggatccacttccataacctgcagggcgagaaattctacaatgcaggcctggcctactgtcacagcaagctagccaacatcctcttcacccaggaactggcccggagactaaaaggctctggcgttacgacgtattctgtacaccctggcacagtccaatctgaactggttcggcactcatctttcatgagatggatgtggtggcttttctcctttttcatcaagactcctcagcagggagcccagaccagcctgcactgtgccttaacagaaggtcttgagattctaagtgggaatcatttcagtgactgtcatgtggcatgggtctctgcccaagctcgtaatgagactatagcaaggcggctgtgggacgtcagttgtgacctgctgggcctcccaatagactaacaggcagtgccagttggacccaagagaagactgcagcagactacacagtacttcttgtcaaaatgattctccttcaaggttttcaaaacctttagcacaaagagagcaaaaccttccagccttgcctgcttggtgtccagttaaaactcagtgtactgccagattcgtctaaatgtctgtcatgtccagatttactttgcttctgttactgccagagttactagagatatcataataggataagaagaccctcatatgacctgcacagctcattttccttctgaaagaaactactacctaggagaatctaagctatagcagggatgatttatgcaaatttgaactagcttctttgttcacaattcagttcctcccaaccaaccagtcttcacttcaagagggccacactgcaacctcagcttaacatgaataacaaagactggctcaggagcagggcttgcccaggcatggtggatcaccggaggtcagtagttcaagaccagcctggccaacatggtgaaaccccacctctactaaaaattgtgtatatctttgtgtgtcttcctgtttatgtgtgccaagggagtattttcacaaagttcaaaacagccacaataatcagagatggagcaaaccagtgccatccagtctttatgcaaatgaaatgctgcaaagggaagcagattctgtatatgttggtaactacccaccaagagcacatgggtagcagggaagaagtaaaaaaagagaaggagaatactggaagataatgcacaaaatgaagggactagttaaggattaactagccctttaaggattaactagttaaggattaatagcaaaagatattaaatatgctaacatagctatggaggaattgagggcaagcacccaggactgatgaggtcttaacaaaaaccagtgtggcaaaaaaaaaaaaaaaaaaaaaaaaaaaaa

SEQ ID NO: 26134 - DNA, 1833 bp, Homo sapiens
  source 1..1833: mol_type = unassigned DNA
ctccagaggactgtatgctgttcttaaggactctctgcttcctggacaagctcaagctaaggactacatctcccagcaggctgtgctctgacagctcttggatttaaataggattctgggctctgctcagagtcaggctgctgctcagcacccaggacggagaggagcagagaagcagcagaagcagccaagagctggagccagaccaggaacctgagccagagctggggttgaagctggagcagcagcaaaagcaacagcagctacagaagttggaacgatgctggtcaccttgggactgctcacctccttcttctcgttcctgtatatggtagctccatccatcaggaagttctttgctggtggagtgtgtagaacaaatgtgcagcttcctggcaaggtagtggtgatcactggcgccaacacgggcattggcaaggagacggccagagagctcgctagccgaggagcccgagtctatattgcctgcagagatgtactgaagggggagtctgctgccagtgaaatccgagtggatacaaagaactcccaggtgctggtgcggaaattggacctatccgacaccaaatctatccgagcctttgctgagggctttctggcagaggaaaagcagctccatattctgatcaacaatgcgggagtaatgatgtgtccatattccaagacagctgatggctttgaaacccacctgggagtcaaccacctgggccacttcctcctcacctacctgctcctggagcggctaaaggtgtctgcccctgcacgggtggttaatgtgtcctcggtggctcaccacattggcaagattcccttccacgacctccagagcgagaagcgctacagcaggggttttgcctattgccacagcaagctggccaatgtgctttttactcgtgagctggccaagaggctccaaggcaccggggtcaccacctacgcagtgcacccaggcgtcgtccgctctgagctggtccggcactcctccctgctctgcctgctctggcggctcttctccccctttgtcaagacggcacgggagggggcgcagaccagcctgcactgcgccctggctgagggcctggagcccctgagtggcaagtacttcagtgactgcaagaggacctgggtgtctccaagggcccgaaataacaaaacagctgagcgcctatggaatgtcagctgtgagcttctaggaatccggtgggagtagctggtggaagagctgcagctttatcaggcccaatccatgccataatgaacagggaccaaggagaaggccaaccctaaaggattgtcctcttggccagctggtgctgcgaatcctgcctgctctgatcctcttgacccttctgggaatgtttgcacacctgacactcttgtgagactggcttatggcatgagttgtggacacctatagagtgttcttctctaagacctggaaagtcagcaaccctctgggggcagcaggactgggcagatcccaggctgggcatgggggtggcagaagagcccgagaaattgggtcagttccctcatcagcaccagaggctcagctgaggcaagaagagcaccatcactgcctatttctaggggctatacactccaactcttggttgatctctttctttttaaaaatatttgccaccaccctggagtctagaccaacacacaaagatcctggctaaccctggcctatttagattccttcctctcacctggaccttcccatttcaatcatgcagatggtttctttttgtaaagagttccgtttgcctttcaatttttagagaaaataaagactgcattcatctc

SEQ ID NO: 26135 - DNA, 1723 bp, Homo sapiens
  source 1..1723: mol_type = unassigned DNA
ggattctgggctctgctcagagtcaggctgctgctcagcacccaggacggagaggagcagagaagcagcagaagcagccaagagctggagccagaccaggaacctgagccagagctggggttgaagctggagcagcagcaaaagcaacagcagctacagaagttggaacgatgctggtcaccttgggactgctcacctccttcttctcgttcctgtatatggtagctccatccatcaggaagttctttgctggtggagtgtgtagaacaaatgtgcagcttcctggcaaggtagtggtgatcactggcgccaacacgggcattggcaaggagacggccagagagctcgctagccgaggagcccgagtctatattgcctgcagagatgtactgaagggggagtctgctgccagtgaaatccgagtggatacaaagaactcccaggtgctggtgcggaaattggacctatccgacaccaaatctatccgagcctttgctgagggctttctggcagaggaaaagcagctccatattctgatcaacaatgcgggagtaatgatgtgtccatattccaagacagctgatggctttgaaacccacctgggagtcaaccacctgggccacttcctcctcacctacctgctcctggagcggctaaaggtgtctgcccctgcacgggtggttaatgtgtcctcggtggctcaccacattggcaagattcccttccacgacctccagagcgagaagcgctacagcaggggttttgcctattgccacagcaagctggccaatgtgctttttactcgtgagctggccaagaggctccaaggcaccggggtcaccacctacgcagtgcacccaggcgtcgtccgctctgagctggtccggcactcctccctgctctgcctgctctggcggctcttctccccctttgtcaagacggcacgggagggggcgcagaccagcctgcactgcgccctggctgagggcctggagcccctgagtggcaagtacttcagtgactgcaagaggacctgggtgtctccaagggcccgaaataacaaaacagctgagcgcctatggaatgtcagctgtgagcttctaggaatccggtgggagtagctggtggaagagctgcagctttatcaggcccaatccatgccataatgaacagggaccaaggagaaggccaaccctaaaggattgtcctcttggccagctggtgctgcgaatcctgcctgctctgatcctcttgacccttctgggaatgtttgcacacctgacactcttgtgagactggcttatggcatgagttgtggacacctatagagtgttcttctctaagacctggaaagtcagcaaccctctgggggcagcaggactgggcagatcccaggctgggcatgggggtggcagaagagcccgagaaattgggtcagttccctcatcagcaccagaggctcagctgaggcaagaagagcaccatcactgcctatttctaggggctatacactccaactcttggttgatctctttctttttaaaaatatttgccaccaccctggagtctagaccaacacacaaagatcctggctaaccctggcctatttagattccttcctctcacctggaccttcccatttcaatcatgcagatggtttctttttgtaaagagttccgtttgcctttcaatttttagagaaaataaagactgcattcatctc

SEQ ID NO: 26136 - DNA, 1879 bp, Homo sapiens
  source 1..1879: mol_type = unassigned DNA
gggcacaagcaatcctcccttctcagcttcctgagtggccaggactacagaggactgtatgctgttcttaaggactctctgcttcctggacaagctcaagctaaggactacatctcccagcaggctgtgctctgacagctcttggatttaaataggattctgggctctgctcagagtcaggctgctgctcagcacccaggacggagaggagcagagaagcagcagaagcagccaagagctggagccagaccaggaacctgagccagagctggggttgaagctggagcagcagcaaaagcaacagcagctacagaagttggaacgatgctggtcaccttgggactgctcacctccttcttctcgttcctgtatatggtagctccatccatcaggaagttctttgctggtggagtgtgtagaacaaatgtgcagcttcctggcaaggtagtggtgatcactggcgccaacacgggcattggcaaggagacggccagagagctcgctagccgaggagcccgagtctatattgcctgcagagatgtactgaagggggagtctgctgccagtgaaatccgagtggatacaaagaactcccaggtgctggtgcggaaattggacctatccgacaccaaatctatccgagcctttgctgagggctttctggcagaggaaaagcagctccatattctgatcaacaatgcgggagtaatgatgtgtccatattccaagacagctgatggctttgaaacccacctgggagtcaaccacctgggccacttcctcctcacctacctgctcctggagcggctaaaggtgtctgcccctgcacgggtggttaatgtgtcctcggtggctcaccacattggcaagattcccttccacgacctccagagcgagaagcgctacagcaggggttttgcctattgccacagcaagctggccaatgtgctttttactcgtgagctggccaagaggctccaaggcaccggggtcaccacctacgcagtgcacccaggcgtcgtccgctctgagctggtccggcactcctccctgctctgcctgctctggcggctcttctccccctttgtcaagacggcacgggagggggcgcagaccagcctgcactgcgccctggctgagggcctggagcccctgagtggcaagtacttcagtgactgcaagaggacctgggtgtctccaagggcccgaaataacaaaacagctgagcgcctatggaatgtcagctgtgagcttctaggaatccggtgggagtagctggtggaagagctgcagctttatcaggcccaatccatgccataatgaacagggaccaaggagaaggccaaccctaaaggattgtcctcttggccagctggtgctgcgaatcctgcctgctctgatcctcttgacccttctgggaatgtttgcacacctgacactcttgtgagactggcttatggcatgagttgtggacacctatagagtgttcttctctaagacctggaaagtcagcaaccctctgggggcagcaggactgggcagatcccaggctgggcatgggggtggcagaagagcccgagaaattgggtcagttccctcatcagcaccagaggctcagctgaggcaagaagagcaccatcactgcctatttctaggggctatacactccaactcttggttgatctctttctttttaaaaatatttgccaccaccctggagtctagaccaacacacaaagatcctggctaaccctggcctatttagattccttcctctcacctggaccttcccatttcaatcatgcagatggtttctttttgtaaagagttccgtttgcctttcaatttttagagaaaataaagactgcattcatctcat

SEQ ID NO: 26137 - DNA, 1269 bp, Homo sapiens
  source 1..1269: mol_type = unassigned DNA
ggactttggccttagcagtagttagtgtgggaggctgggaagactgggagcagtctcttaaacaaaagcaaaagaataagcttcgggcgctgtagtacctgccagctttcgccacaggaggctgccacctgtaggtcacttgggctccagctatgtggctgcctcttctgctgggtgccttactctgggcagtgctgtggttgctcagggaccggcagagcctgcccgccagcaatgcctttgtcttcatcaccggctgtgactcaggctttgggcgccttctggcactgcagctggaccagagaggcttccgagtcctggccagctgcctgaccccctccggggccgaggacctgcagcgggtggcctcctcccgcctccacaccaccctgttggatatcactgatccccagagcgtccagcaggcagccaagtgggtggagatgcacgttaaggaagcagggctttttggtctggtgaataatgctggtgtggctggtatcatcggacccacaccatggctgacccgggacgatttccagcgggtgctgaatgtgaacacaatgggtcccatcggggtcacccttgccctgctgcctctgctgcagcaagcccggggccgggtgatcaacatcaccagcgtcctgggtcgcctggcagccaatggtgggggctactgtgtctccaaatttggcctggaggccttctctgacagcctgaggcgggatgtagctcattttgggatacgagtctccatcgtggagcctggcttcttccgaacccctgtgaccaacctggagagtctggagaaaaccctgcaggcctgctgggcacggctgcctcctgccacacaggcccactatgggggggccttcctcaccaagtacctgaaaatgcaacagcgcatcatgaacctgatctgtgacccggacctaaccaaggtgagccgatgcctggagcatgccctgactgctcgacacccccgaacccgctacagcccaggttgggatgccaagctgctctggctgcctgcctcctacctgccagccagcctggtggatgctgtgctcacctgggtccttcccaagcctgcccaagcagtctactgaatccagccttccagcaagagattgtttttcaaggacaaggactttgatttatttctgcccccaccctggtactgcctggtgcctgccacaaaataagcactaacaaaagtgtattgtttaaaaaataaaaagaaggtgggcagaaatgtgcccagtggaa

SEQ ID NO: 26138 - DNA, 1259 bp, Homo sapiens
  source 1..1259: mol_type = unassigned DNA
cagtagttagtgtgggaggctgggaagactgggagcagtctcttaaacaaaagcaaaagaataagcttcgggcgctgtagtacctgccagctttcgccacaggagcctaggctgccacctgtaggtcacttgggctccagctatgtggctgcctcttctgctgggtgccttactctgggcagtgctgtggttgctcagggaccggcagagcctgcccgccagcaatgcctttgtcttcatcaccggctgtgactcaggctttgggcgccttctggcactgcagctggaccagagaggcttccgagtcctggccagctgcctgaccccctccggggccgaggacctgcagcgggtggcctcctcccgcctccacaccaccctgttggatatcactgatccccagagcgtccagcaggcagccaagtgggtggagatgcacgttaaggaagcagggctttttggtctggtgaataatgctggtgtggctggtatcatcggacccacaccatggctgacccgggacgatttccagcgggtgctgaatgtgaacacaatgggtcccatcggggtcacccttgccctgctgcctctgctgcagcaagcccggggccgggtgatcaacatcaccagcgtcctgggtcgcctggcagccaatggtgggggctactgtgtctccaaatttggcctggaggccttctctgacagcctgaggcgggatgtagctcattttgggatacgagtctccatcgtggagcctggcttcttccgaacccctgtgaccaacctggagagtctggagaaaaccctgcaggcctgctgggcacggctgcctcctgccacacaggcccactatgggggggccttcctcaccaagtacctgaaaatgcaacagcgcatcatgaacctgatctgtgacccggacctaaccaaggtgagccgatgcctggagcatgccctgactgctcgacacccccgaacccgctacagcccaggttgggatgccaagctgctctggctgcctgcctcctacctgccagccagcctggtggatgctgtgctcacctgggtccttcccaagcctgcccaagcagtctactgaatccagccttccagcaagagattgtttttcaaggacaaggactttgatttatttctgcccccaccctggtactgcctggtgcctgccacaaaataagcactaacaaaagtgtattgtttaaaaaataaaaagaaggtgggcagaaatgtgcccagtggaa

SEQ ID NO: 26139 - DNA, 1714 bp, Homo sapiens
  source 1..1714: mol_type = unassigned DNA
tgtctatagtaggtgcggagaagaaatgtttggcagatgaagaaaatgaggtgcagagaggatttaagagattctctcttactgcctgttcagggtcagtccagaattgagggtctccgggggagggcagaggctttgccctgcaggggatctgtgggagggggttaggagggagcagatgagcccaggatgaatggtcagagtcaggtgctgcccggcggaggtcacgagtccagggaggggatcaacatggccgctgcaccccggactgtgttgatctccggctgctcatcaggaattggtctggaacttgcagtgcaactggcccatgaccccaagaagcgctaccaggtcgtggccaccatgagggacctggggaagaaggagacactggaggcagctgctggggaggctctggggcagaccctcaccgtggcccagctggacgtgtgcagtgatgagtcggtggcccagtgtctcagctgtatccagggagaagtggacgtgctggtgaataatgctggaatgggcctggtggggcccctggaggggctcagccttgctgccatgcagaatgtctttgacaccaactttttcggagctgtccgtctcgtcaaagctgtgcttccaggcatgaagaggaggcggcagggccacatcgtggtgatcagcagtgtcatgggcctgcagggtgtcatcttcaacgatgtctatgcagcttccaagttcgccctggagggattcttcgaaagcctcgctatccagctgctgcagttcaacatcttcatctccctggtggagccaggccccgtggtcaccgagtttgaggggaagcttctggcgcaggtttctatggctgagttcccaggcactgaccctgagaccctgcactacttccgggacctctatctcccagcctccaggaagctgttttgctccgtgggacagaacccacaggacgtggttcaggccattgtcaacgtcatcagctcgactcgaccacccctgcgccgacagaccaacatccgctactcgccgctgaccacgctcaaaaccgtggattcctctggcagcctgtatgtgcgaacgacccaccgcctcctcttccgctgtccacgcctcctcaaccttggccttcaatgtctgtcctgcggctgcctcccaacgcgggtgcggccaagatgagcagaacagagcttcacgatccccatccctgaacaaccagacctcttcattccacatctaattcaaaggatgaacagactcttcatttattcattctgcaaactccccctcccctcctctgtgcctagacatggctagaatcccagaagggcctttattttcaggcatagactcctctgtggtcacagctggagcacagagagggaccctgggaacttggcctgggaagcccagagcaggaagccacagctgtctctgggaaagcaagggaggcttcctggaggaagcggcattgttatgagccttgaaggaagagacagactctgctacattcaacctcgtgacttcatgatcctgggcctgagaacacaggaatgattcatagcccaccccccacctccatgcatacaccagagctctgtggaccaaggggtcattcctggtcacacactccatcagcaaaatgtatttgagcacacaccagcaatgtatgtatattttttccattaaatatatatttataaccaca

SEQ ID NO: 26140 - DNA, 2810 bp, Homo sapiens
  source 1..2810: mol_type = unassigned DNA
cagttcagtaaggtagagctttggccgaggacgaggggaagatgtcacgcaagatagaaggctttttgttattacttctctttggctatgaagccacattgggattatcgtctaccgaggatgaaggcgaggacccctggtaccaaaaagcatgcaagtgcgattgccaaggaggacccaatgctctgtggtctgcaggtgccacctccttggactgtataccagaatgcccatatcacaagcctctgggtttcgagtcaggggaggtcacaccggaccagatcacctgctctaacccggagcagtatgtgggctggtattcttcgtggactgcaaacaaggcccggctcaacagtcaaggctttgggtgtgcctggctctccaagttccaggacagtagccagtggttacagatagatctgaaggagatcaaagtgatttcagggatcctcacccaggggcgctgtgacatcgatgagtggatgaccaagtacagcgtgcagtacaggaccgatgagcgcctgaactggatttactacaaggaccagactggaaacaaccgggtcttctatggcaactcggaccgcacctccacggttcagaacctgctgcggccccccatcatctcccgcttcatccgcctcatcccgctgggctggcacgtccgcattgccatccggatggagctgctggagtgcgtcagcaagtgtgcctgatgcctgcctcagctcggcgcctgccagggggtgactggcacagagcgggccgtaggggaccccctcacacaccaccgagatggacagggctatatttcgcaaagcaattgtaactgcagtgctgggtagataatttttttttttttaagatatagctttctgatttcaatgaaataaaaatgaacttattccccactcagggccagagaaagtcagaacaaagaaaatgtccccgaaacgaattttcttacaaaagcctaagtagcaggggtaattttctgctcattttttgtctcagtgatactgtgaaaggtgcagtctcaggggaacacaaagcagccctgataatttgaaaattcatttgctttaccacattcaagacagaaacatacagtttcctaaagcctggctttgaatgcagaagggagcagctcctcctagttaagtttccactaaatcatcgccaaagaggacttcagagccctggggaggcagctgagggtctcaagggtgactgggtggcagggatgagtgcggtgggtgagaatcccggtgccctgagaggctatacgtgacaaatgaccaaaagcccaaggtaggggagtttcctctgctcacagttcttaccttcaaggcggatctgggcttccaccctcatgaacacagggattggggagggaccagagcgcccaatacacacagctccattatgcaatccattccagcaaattccccgtgtctgtggtcaccatttaggtgatcatacaggacaggctgcacatctcagtatatgtagggaccccaaatgaccacaacacagtacaattgccctttacctagggctaccatttcctagcaaaccaaacatagttcgagaacagctggcccaggagctaccactggctactcagaggaggctcattagctggctacatgcttcgcaggaagtgggaaggactcacatcataaaaaggaccatgtagctttttccctgaaagcttctcaccctccaccctctgccttgcaatacgcaaactgcgcctgctcctgaaaagctctctgggaaggaatgggcctggctttccgttcctggaggcggcgccttagattgggaggcctcattggccacttagagcgcagcctgagtttccaggccccttcctgggagaggctgttaacacgggggaggggcaggagagggatatggagagcaggtggtggaatcagaggacgaggctgctctaaagactgttctggccccagacacagggtagtctttgctagcagctcatttccgagttacttttcattttcaaatgccaaggcaagtgactagactcgcgctaatacagtgctggacaacacattcaccttttctgtgaacaggcagccttctaaaagccccaaacatccttcttgatgctttgggggctcaattattttatatccaacccagcatctttctagtccctatgctgtatgcttgaacttcggaaaatgcttttccccgcccaatcttctctcaaatataaacacatcacacagggtgttgggggtggggggggggggtggggggacttatccctggccttaggacacaggacaaatctattttggatagaaatgcctgaacagagacccttatttggaaaggtgaattaactttggtcacgacatggactgtcagacaaaatggcagtatcctaagagttaaggcacatcaaacacaggagtcgagagagtgcagttcagggaaaaaggagaggaggaaacagtgaggcagggagaaaggctttccaaataagagttcatgttggaaacttttgtcacggctttattgagattaagttcacatacaatttgtatccatttaaagtgtacaatttgatgacttttggtatattcagagttgtgcaaccattatcactagatcaattttagaaagtttatcaccccaaagagaaatcctgcacccatcagccaacactccccaacccatcggccaccccaagccctctgcaaccacgaatcgactgtctctgtagattggccttctggacgttctacataaatgaaatcatatagtatgtggta

SEQ ID NO: 26141 - DNA, 4193 bp, Homo sapiens
  source 1..4193: mol_type = unassigned DNA
gactggacgccatcacaaccttaccaatcttcagaatacactcctttccatccgacgaaatgatagaaccctctgaagactcatttgagacgatgatggagcataagaatccatcatcaaaacaaatggagtcctccgagggctcatccaacaccaccgaggcgacgtcgggcagtggagtgcggggagaggcagggccagccagcggcccagcccaggaaaagaaggagccccccagtggcccactccaggaaatggaagagctgcccactgatctactccaagacatggaggagccatccagtggcccacgtaaggaaatagaggatccacccaatgacctactccaagacctggaggagtcatgcaacggttcacaccaggcaaggggggatccactcagtggagcatctgataggatgaaagaagcatcagtcaacccatcgggagcccgagaagaacaagaggctcacactgacctgaaggaatcgggaagggaggagactcctcaagagcaaaaccagaccgagcactcaaccgcagaacttatggccatggtgaggtccatcatctcgctgtacttccgaatgcaagacctcaaagagcaacagagagtagcagaagagatcttgatcaaagggatcaatgcaggccaactgcccgccccaaagcacttctctggcgatcgcagagaattccacgagttcatcgtactctgccaactgaccttacagagctacccaagaatgttctataacgaccgtctgagagttggctatgtcatcaatcacctgtccggcttggcattagaatgggccaaagctctactgcaggaaaacagccccctgatcggagacttcccagccttcctggaggccatgtccgaagtgtttgagtaccgccaggcactgcgtgtggcagaagaggccatgttcaccatcaggcagggcggccgctctgccactgagtacatcgatgagttccagagcctggtacccatcttgggctggccagatgaagtcctgcaggcccacttgtgccaggggctcaacgaggagatcaggcactatctattccgggtccctcagccggattccctagacagtctgattgtgctcatcctgcaaatagaagagaagctggcagagagaagagctatgctcaggctgccccccgaggcccgcccccggaacctgacctggatcgactcacctgctccagagaggtggatggtcagcagctggttgcccagcgaagtccatccggacatcaatcgcgcccacctcttcctgctgctcatggtgagagtgaacccctaccacagcgtcgcggtccaggccctggtggattcgggagctgacggcaacttcatggatgagaagttcgcccaagagcactacgtcgagctctacgagaagccgtacccacagccggtccaatccgtggacggctcgctgattggcaacgagcctgtctggctctacacggagcccctggtgtgtatccaccagaaccaccaggagtccatcgaatttgacatcgtaccttcaccgaacttctctgtggtcctaggcatccgctggctccgagtccacgcccccgaagtcgactggatcaaaggccgctgcaccttccactctccctactgcctgaagaactgcttccgcccgcccccgccatgcattgccctagagaggcacggcatgagcctgctacccggactgccacacccatactcagacctggccgacgtgtttaacccgaaggaagcagatgatgagacttccgaccagccaagctcagacggatccgatgatctttctgaatcagagccctctgagcttcagcaggctggagacagtgatcacagcgagaccttttacgagtgtccctccaccgcgccttgggaacctgtgggtgccaggatgcaagaaagagccaggctacaggaggaatactgggacctgcaggacatgctgaccaacagacaggactacatacagatgattccggaactgtttgaccagttacacggagccgagtggttcacaaaactggagctgcgtgggaccattgtggaggaaagcgtgaacgggcaccgcaccgaagatgtgtggaaagcagcgtttggtttggagcttgaagagatgaagagctaccagccgtttgcgctctccccagaccctatcatacctcagaacgtgattcacttcatcctaaaggacatgctagggttctttgtgctttcttatggccaggaagtcctgatctactcaatgagtcaggaggagcacctccaccacgtccgccaagtcctggtccgcttccgccatcacaacgtctactgctccctggacaagagccagttccaccgccaaaccgtggaattcctgggcttcgtcgtcacccccaaaggggtgaaactgaacaagaacgtcatgaccatcataacagggtaccctacccctggctccaagctatctctgcgaaacttcatcgaattcgtcttcccctaccgccacttcgtggagcgcttcagcatcatcgcagagcccctggtgcggcagctgctgagctcctaccagttctactggggagtcgaggagcaagaggccttcgagtgcctgaagagggctttccgcaaggcgcctctcctccaccaccccaagccccagaacccattctacttggaaaccggcgtcaccggcacggccctgcacgcctccctgatccaaatcgacgaccaaaccggcaagagagcctgctgcgctttctactcccgcaacatctcccctatcgaggttgagtactctcaagcggagatgaagattcttccaatacgggctgccttcatggtgtggtgccgctacctggagaacaccgaggagcccatcatgatccttctcaacacagaggatctagcctctctgaataatgacaggctcaccgtacttctccccgggcattgggtcttcttcttctcccacttcaactttgacgtcatggagctgccagaacaagacggcggccgagctctgccacctgtgagaaacctccggtggaggagagccttccagaggaacactgccgccaggcaaaccctgctgctggcctcaaggggattccccagggatccatcgacggaatccggggaagaagagaatgaagaacaggatgagctcaatgaacagatcctacggcaagagctgctggccatgatacccatcgaccagatcctcaacagcttcctcgcccacttcagcatggcccagatcagggccgtcattctgcacttcttccgaggcctcctgtactggaagaacaccctagccctggcagccatcctcgtgctactgcgcgtgaggcaatgcctctcgctgcggccggcacccgccatgcgggtggctcggccccagccccagcgctccctacgactcatcctggattcgtccctcatcgcaggcagcagcatcacgacagccatcacccagctgctcacccagatgcccgctctcgtaggtgcaaacaccatcccagcccaggagctggctgagctgttcctgggccctggccgctggcagcgaaatgctctgcactcccaggcccaccgaggcctgcagttcacccctggcttctggctgacgctgtgtgagttcttcggtgtcagagtcaccccccaggagggccacctccctgccctgcgtcagaaccgctacctggagctgcacgtcgttggtgatgaggatgtcgtcttgcgagaagccctgcaagacgacctgcaacgttaccgtcagtgtggcctgcatgacggcctgcaagacacctcgcaggacaagcaggacaacgacgtgcaggaggccccacccagccacacagcagccacccacccaccccgcccacgccacctgatggatccccaggtcctggaattccttggtagccgcctgctccacatccacagtgcagatggccagctgcacctgctcagccgggagcaggcagccagggccctgagccagttcctgaccctgatctacaggcgggccctgcccatccccgcctgggagagccagcccagggagcaggcaaggctagaagagctgcctgatgaggacgaagatgctaacctcgactgaagacgcctccctgtctccagcaaagagtcccctctatttctcaccccaacacctccc

SEQ ID NO: 26142 - DNA, 10789 bp, Homo sapiens
  source 1..10789: mol_type = unassigned DNA
cgagatctgcgcctcgcctccctcctcacgcgggcggattttcttaccttgtgaaaaaccgtctcagcggctgcccccgcctcctctgctggatgtgaaatggcggtcggcgagtggttgcgtccgtgacatcatcatcatggcaacaagagctgcagcctgggaccgaggagcccgtgtgattcccggcggtggcggcagtggcggcagcaccagcaccgacgaaagctcgagggcttctctcctgcggccccttgccgggtgctcctgaggaggcggcggcagcagcgcctacaccgccccgcccgccgctcctcgaggtgcctctgtgtgaggggagggggccgtgccgagaaggggagggggcgccgccgccgctgcggagggagccgccgccgctgctgctgccgctgccgggtcgccagtgaagggaggcagtggcggcggcggcgaacatgttttcagtaaggatagtgactgcagactactacatggccagcccgctgcaggggctggatacctgccaatcccccctcacccaggcccctgtcaagaaggtgccggtggtgcgagtcttcggagcgaccccggcaggtcagaagacatgtcttcatctacatggcatctttccttacctctatgtgccatacgatggttatggacagcagccagaaagctatctttctcagatggcattcagtatcgacagagcacttaatgtggctttaggcaatccatcttccactgctcagcatgtgttcaaagtgtcattagtatcaggaatgcctttttatggttatcatgagaaggaaagacactttatgaagatctatctttacaatcctacaatggtgaaaaggatatgtgaacttttgcaaagcggagccataatgaataaattttaccagcctcatgaagcgcatattccctacctcctacagctcttcattgactacaatctttatggcatgaatttaataaatctggctgctgtcaagttccgaaaagcaagaaggaaaagtaatacattgcatgcaactggatcctgcaagaatcatttatcaggaaattctcttgctgatactttatttcggtgggaacaagatgaaataccaagctctttaatattggaaggtgttgaaccacagagtacatgtgaattagaagtggatgctgtagctgctgatatcttaaatcgtctggacattgaagctcaaattggtggaaaccctggtctacaggccatatgggaagatgaaaagcaacggcgaagaaacagaaatgaaacttctcaaatgagccaacctgagtcacaagatcacaggtttgtgccagcaacagaaagtgaaaaaaaatttcagaagagacttcaggaaattctcaaacagaatgatttctctgtaacattatcaggatctgtggactacagcgatggatcccaggagttctctgctgagttaacattgcactctgaggttctgtctcctgaaatgcttcagtgtacaccagccaatatggtagaagttcacaaagacaaagagtcaagcaaaggtcacactagacacaaagtggaagaagctcttattaatgaagaagcaattttgaaccttatggaaaatagtcagacttttcagcctttgacccaaagactgagtgagtcacctgttttcatggacagtagtcctgatgaggctctggtacatcttcttgctggtttggaaagtgatggatatcggggggaaagaaataggatgccatcaccatgtcgctcctttggaaataataaatatccacaaaatagtgatgatgaagaaaatgaaccacagattgaaaaagaggaaatggagcttagtttggtgatgtcccagagatgggacagcaatattgaagaacattgtgccaaaaagagatcactgtgcagaaatacccacagaagttcaactgaagatgatgactcatcttcaggagaagaaatggaatggagtgataacagtttgcttctagccagtctttctatacctcagttagatggaactgcagatgaaaatagtgacaatccattgaacaatgaaaattctagaacccactcttctgtaattgcaacaagcaagctttcagttaaaccctccatctttcacaaagatgctgctacattagaaccctcatcttctgctaagattacctttcagtgtaaacacacaagtgccctttcttcccatgttttgaacaaggaagatttaattgaagacctttcacagacaaacaaaaatacagaaaaaggtctagataactcagtcacttcttttacaaacgaaagcacttattctatgaaataccctggatctttaagcagtactgttcattcagaaaattctcataaagagaatagtaagaaagagatcctcccagtatcttcctgtgaaagtagtatttttgattatgaagaagatattccatctgttacaagacaagtaccaagtagaaaatatacaaacattagaaaaatcgaaaaggattccccttttatacatatgcaccgtcaccctaacgagaatacattgggcaaaaattctttcaacttttctgacttaaatcattcaaaaaataaagtatcctctgaaggaaatgaaaaaggaaacagcacagctctgagtagtttattcccttcatcatttactgaaaattgtgaattactgtcatgctcaggggagaatagaactatggtgcattctcttaatagcactgctgatgaaagtggactaaataaacttaaaattaggtatgaagaatttcaagaacataaaacagaaaagccaagcctcagccagcaagcagcacactatatgttttttcccagtgttgttctttctaactgtcttactagaccacagaaactatctcctgtcacatataaattacaacctggcaataaaccatcccggttaaaattgaataaaaggaaacttgcaggtcatcaggagacttctaccaaaagtagtgagactggatccacaaaagataattttatacaaaataatccttgtaatagtaatcctgagaaggataatgcattggctagtgatttaactaaaaccactcgtggagcttttgaaaataaaacacccacagatggttttatagactgtcactttggagatggaacgttagaaactgagcagtcctttggactatatggaaataaatacacacttagagccaaacgcaaggtaaattatgagactgaagacagtgagtcaagttttgtaactcacaactcaaaaattagtctacctcatcccatggaaattggtgaaagtttagatggaactctcaaatcccgaaaacgaagaaaaatgtctaaaaagctgccccctgtcatcataaagtatattattattaatagatttagagggagaaaaaatatgcttgtgaagctaggaaaaatagactctaaagaaaaacaagtaatattaacagaagaaaaaatggaactatataaaaagcttgcacctttgaaggacttttggccaaaagttcccgactcccctgcaaccaaatatcccatttatccactaacaccaaagaaaagtcacagaagaaagtcaaaacataaatctgctaagaaaaaaactggtaaacaacaaaggacaaataatgaaaatattaaaagaactttgtctttcaggaaaaaacggtcacatgctattctttctcctccctcaccatcttacaatgctgaaaccgaagattgtgacctgaattatagtgatgttatgtctaaactaggttttctttctgagagaagcacaagtcccataaattcttctccacctcgctgctggtctcccacagatccaagagctgaagaaatcatggctgctgcagaaaaagaggcaatgctttttaagggtcctaatgtatataagaagactgttaattctcgtataggaaaaactagtcgcgcaagagcacagattaagaaatcaaaagcaaagcttgctaatccctctatagttactaagaaaaggaacaaacgaaatcagacaaataaactagtagatgatggaaaaaagaaaccaagagcaaaacaaaaaacaaatgagaaaggtacatcgagaaagcatacaacacttaaggatgaaaaaataaaatctcagtctggtgctgaggttaagtttgtactgaaacaccagaatgtgtctgaatttgcaagtagttctggaggctctcaactactttttaaacagaaagatatgccactaatgggctctgctgtagatcatcccctttctgcttccctacccactggaattaatgcacaacagaagttatctggctgcttttcttctttcttagaaagcaagaagtctgtagatttgcagacattccccagttcacgagatgatttgcatccatcagttgtttgtaattctataggacctggagtctcaaaaattaatgttcaaaggcctcataatcaaagtgctatgtttactctaaaggaatcaacgttaattcaaaaaaatatatttgacctttccaatcatttatctcaggtagcacagaatacacagatatcttctggtatgtcctcaaagatagaagataatgcaaataatatacaaagaaactatttgtcatcaatcggaaagttaagtgaatatcgcaattccctagaatcaaagctggaccaagcatatacccctaattttttgcattgcaaagacagtcagcagcagattgtgtgcatagcggaacagtcaaagcacagtgaaacttgttctccgggaaatacagcttcagaggaaagccaaatgcctaataattgctttgtaacttccttgagaagtccaatcaaacaaatagcatgggagcaaaagcaaaggggctttattttagatatgtcaaattttaaacctgaaagagtaaaaccgaggtcgttatcagaagcaatttcacaaaccaaagcactttctcagtgtaaaaatcgaaatgtgtcaacaccttcagcatttggtgaaggacagtctggactggcagttctaaaagaattgttacaaaaaagacagcagaaagcacaaaatgcaaatactacacaagacccattatccaataaacatcaaccaaataaaaatatttctggttcccttgagcataacaaagcaaataaacggacacgatcggtaacgtccccaagaaaacctcgaactcccagaagtacaaaacaaaaagaaaaaatccccaaacttctcaaagtagactctttaaatttacaaaactctagccagttggataactctgtatcagatgatagtcccatctttttttcagatccaggctttgaaagttgttactcacttgaagatagtttatctcctgaacataattataattttgatattaacacaataggtcagactggattttgtagcttttattctggaagtcagtttgtcccagctgatcagaatttgcctcagaagttcctaagtgatgctgttcaggatctttttccaggacaagctatagaaaaaaatgagtttttaagtcatgacaaccagaaatgtgatgaagacaagcatcataccacagactcagcctcatggattagatctggtactttaagtcctgaaatttttgagaagtcaaccatagatagcaatgagaatcgtcgccacaaccagtggaaaaatagctttcatcctctaacaactcggtctaactcaataatggattctttctgtgttcagcaggcagaagactgtctaagtgaaaaatctagattgaataggagttcagtaagcaaagaagtgtttcttagcctcccacagccaaacaattcagactggattcaaggtcacaccagaaaagaaatgggacagtctcttgactcagccaatacctcttttactgcaatactctcctcccctgatggtgaacttgtagacgtggcctgtgaagatttagaactgtatgtttcaagaaacaatgatatgttgacaccaactcctgatagttcaccaagatctactagctctccttcacaatctaaaaatggcagcttcacccctcgaactgctaacattctgaaaccacttatgtcccccccaagtagggaagaaattatggcaactttgttggatcatgacctgtctgagactatttaccaggaaccattttgcagtaatccttctgatgtaccagaaaagcccagggagattggtggacggctcctcatggtagaaactcgacttgcaaatgatctggctgagtttgagggagacttttccttggaaggacttcgtctttggaaaacagcattctcagcaatgactcagaatccaaggccagggtcaccccttcgcagtggccaaggagttgtcaataaagggtcaagtaatagccctaagatggttgaagataaaaaaattgtgattatgccttgcaaatgtgccccaagtcgacaactggttcaagtgtggcttcaagccaaagaagaatacgaacgttccaagaaactgcctaaaaccaagccaactggagttgtaaaatctgctgagaactttagctcttcagttaacccagatgacaaacctgtagtgcctccaaaaatggatgtaagtccatgtatactccccactacagcacataccaaggaggatgttgataattctcagattgctttacaagcaccaaccacgggatgtagtcaaactgcaagtgaaagtcagatgctgccaccagttgcctctgcaagtgatcccgaaaaagatgaagatgatgatgataactattacattagttatagctcccctgattctccagtaattcccccttggcaacaaccaatatccccagattccaaagcattaaatggagatgatagaccctcatcaccagtagaggagctgccttcattggcttttgagaacttcttaaagccaataaaagatggtatacaaaaaagcccctgcagtgagcctcaagagcctctagtgatatctccaattaatactagggcaagaactgggaaatgtgaatcactttgctttcatagtacaccaatcatacagagaaaacttctggaaaggcttcctgaagcacctggccttagcccattatcaacagaaccaaaaacacagaagttgagtaataagaaaggaagtaatactgacactcttagaagagtactgttaacacaagcaaagaatcaatttgcagcagtaaataccccacagaaagaaacttctcagattgatggaccatctttaaacaatacttacggtttcaaagtcagcatacaaaacttacaggaggcaaaagctttacatgagatacaaaatcttaccctaatcagtgtggagttgcatgctcgaactagacgagacttagaaccggatcctgaatttgacccaatctgtgctctgttctactgcatctcatctgacactccactgccagatacagaaaaaacagaactcacaggtgtaatagtgattgataaagacaagacagttttcagtcaagatatcagatatcagactccattacttattagatctggaattacaggactcgaagtcacctatgctgctgatgagaaggcactttttcatgaaattgcaaatataataaagaggtatgatcctgatattctgctaggatatgagattcagatgcattcctggggttacctcttacaaagggctgccgctttaagtattgacttatgtcggatgatctctcgggtgccagatgacaaaattgagaacagatttgcagctgaaagagatgagtatggatcatatacaatgagtgagataaatattgttggccgaattacactaaatctttggagaatcatgagaaatgaggtggctctaactaactacacctttgaaaatgtgagctttcatgttcttcatcagcgttttcccctctttacctttcgagtcttgtcagactggtttgataacaagacagatctatacagatggaaaatggttgatcattatgttagccgtgtccgtggaaatctccaaatgttagaacagctggacctgattgggaaaaccagtgagatggctagactttttggcattcagtttttacatgtactgacaaggggttcacagtaccgtgtggaatcaatgatgttgcgtattgctaaaccaatgaactatattcctgtgacacctagtgttcagcaaagatcccagatgagagccccacagtgtgttcctctaattatggagcctgaatcccgcttctatagcaactctgttctcgttttggatttccaatcactttatccttctattgtgattgcatataactactgcttttccacctgccttggccatgtggagaacttgggaaagtatgatgagttcaaatttggctgtacctctctgagagtacctccagatttactttaccaagttaggcatgatatcacagtgtcccccaatggagtagcttttgtcaagccttcagtaagaaaaggtgtactaccaagaatgcttgaagaaattttgaagactagatttatggtgaagcagtcaatgaaggcttacaagcaagacagagccctgtcacgaatgcttgatgcgcgtcagttgggacttaagctgatagcaaatgtcacatttggctatacatctgctaatttttctgggagaatgccatgcattgaggttggcgatagtattgttcacaaagccagagagaccttggaacgagctattaaactggtgaatgataccaagaaatggggggctagggttgtatatggcgatactgacagtatgtttgtgctactgaaaggagccactaaggagcagtcttttaagattggtcaggaaattgccgaagctgtaactgctaccaatcctaaaccagtgaaattgaagtttgaaaaggtatatttgccctgtgttttacaaacaaaaaagaggtatgtgggttacatgtatgaaacactggatcagaaggacccagtatttgatgcaaaaggaatagaaacagtcagaagagattcctgccctgctgtttctaagatacttgagcgttctctaaagctgctatttgaaacgagagatataagtctaattaaacagtatgttcagcgacaatgtatgaagcttctggaaggaaaggccagcatacaagactttatctttgccaaggaatacagaggaagtttttcttataaaccaggagcttgtgtgccagcccttgaacttacaaggaaaatgctgacttatgaccggcgctctgagcctcaggttggggagcgagtgccatacgtcatcatttatgggacccccggagtaccacttatccagcttgtaaggcgcccagtggaagtcctgcaggacccaactctgagactgaatgctacttactatattaccaagcaaatccttccacccttggcaagaatcttctcacttattggtattgatgtcttcagctggtatcatgaattaccaaggatccataaagctaccagctcctcgcgaagtgaacctgaagggcggaaaggcactatttcacaatattttactaccttacactgtcctgtgtgtgatgacctaactcagcatggcatctgtagtaaatgtcggagccaacctcagcatgttgcagtcatcctcaaccaagaaatccgggagttggaacgtcaacaggagcaacttgtaaagatatgcaagaactgtacaggttgctttgatcgacacatcccatgtgtttctctgaactgcccagtacttttcaaactctcccgagtaaatagagaattgtccaaggcaccatatctccggcagttattagaccagttttaaattgtcaatatcacagtattacaggtgctatttttttcagtgcttaccactaaactgttgtgcatggtgctttttaactttcatcgagtcaaggatgttcactgtctgttatctgaagactatgaagacttctatgctaaccgaattaaaatgtacttgttgatctctgaatagctcacttcttacaatgtacaaattcctcattctgtcaccttttaaacattgttttataatgcaggtgttggatttgctccagtatgtgtaccatcttgtaaattcatttgagtagatcatgtttacttcccagtggaaggagcactgaaaacctcttaaagaaaaagcatttgtgtgttttccttgaactgtctgtatcaagacgtgttacttcgagatatccattcactttataattttgactgcaaaatattttgtaaatacacttttttacttttcaaacgagcaaaataatgtgcaatgatttttatacaaatgattttcaagttgtttggtatatttcctctaggttttgcttgactcaaagtagatcgttattttgatcaaactgtgcaaacagtagtaccacgtgtagcattttgaaacattatttttttttaaaaaatgctgtcttgctttagctattaatggggcattgtgaggaactgtgcaaagacatttttgttacaaacctgtgggcctgttgcaatactttaaaaataaaaaattttattccatttgcttgttttgtatagacatttctattgcttctaaatatacttaaaatattttctttccttatgtactgtacagttaatcttatttgccatcatcttgaacacaaaatgtgtatttagaatatttgtataactgtgtaaaataaaaaaggaattatgtggtcagtgcattgttttttaaactggaaatcattttgttttaaaagttaa

SEQ ID NO: 26143 - DNA, 10701 bp, Homo sapiens
  source 1..10701: mol_type = unassigned DNA
catcatcatggcaacaagagctgcagcctgggaccgaggagcccgtgtgattcccggcggtggcggcagtggcggcagcaccagcaccgacgaaagctcgagggcttctctcctgcggccccttgccgggtgctcctgaggaggcggcggcagcagcgcctacaccgccccgcccgccgctcctcgaggtgcctctgtgtgaggggagggggccgtgccgagaaggggagggggcgccgccgccgctgcggagggagccgccgccgctgctgctgccgctgccgggtcgccagtgaagggaggcagtggcggcggcggcgaacatgttttcagtaaggatagtgactgcagactactacatggccagcccgctgcaggggctggatacctgccaatcccccctcacccaggcccctgtcaagaaggtgccggtggtgcgagtcttcggagcgaccccggcaggtcagaagacatgtcttcatctacatggcatctttccttacctctatgtgccatacgatggttatggacagcagccagaaagctatctttctcagatggcattcagtatcgacagagcacttaatgtggctttaggcaatccatcttccactgctcagcatgtgttcaaagtgtcattagtatcaggaatgcctttttatggttatcatgagaaggaaagacactttatgaagatctatctttacaatcctacaatggtgaaaaggatatgtgaacttttgcaaagcggagccataatgaataaattttaccagcctcatgaagcgcatattccctacctcctacagctcttcattgactacaatctttatggcatgaatttaataaatctggctgctgtcaagttccgaaaagcaagaaggaaaagtaatacattgcatgcaactggatcctgcaagaatcatttatcaggaaattctcttgctgatactttatttcggtgggaacaagatgaaataccaagctctttaatattggaaggtgttgaaccacagagtacatgtgaattagaagtggatgctgtagctgctgatatcttaaatcgtctggacattgaagctcaaattggtggaaaccctggtctacaggccatatgggaagatgaaaagcaacggcgaagaaacagaaatgaaacttctcaaatgagccaacctgagtcacaagatcacaggtttgtgccagcaacagaaagtgaaaaaaaatttcagaagagacttcaggaaattctcaaacagaatgatttctctgtaacattatcaggatctgtggactacagcgatggatcccaggagttctctgctgagttaacattgcactctgaggttctgtctcctgaaatgcttcagtgtacaccagccaatatggtagaagttcacaaagacaaagagtcaagcaaaggtcacactagacacaaagtggaagaagctcttattaatgaagaagcaattttgaaccttatggaaaatagtcagacttttcagcctttgacccaaagactgagtgagtcacctgttttcatggacagtagtcctgatgaggctctggtacatcttcttgctggtttggaaagtgatggatatcggggggaaagaaataggatgccatcaccatgtcgctcctttggaaataataaatatccacaaaatagtgatgatgaagaaaatgaaccacagattgaaaaagaggaaatggagcttagtttggtgatgtcccagagatgggacagcaatattgaagaacattgtgccaaaaagagatcactgtgcagaaatacccacagaagttcaactgaagatgatgactcatcttcaggagaagaaatggaatggagtgataacagtttgcttctagccagtctttctatacctcagttagatggaactgcagatgaaaatagtgacaatccattgaacaatgaaaattctagaacccactcttctgtaattgcaacaagcaagctttcagttaaaccctccatctttcacaaagatgctgctacattagaaccctcatcttctgctaagattacctttcagtgtaaacacacaagtgccctttcttcccatgttttgaacaaggaagatttaattgaagacctttcacagacaaacaaaaatacagaaaaaggtctagataactcagtcacttcttttacaaacgaaagcacttattctatgaaataccctggatctttaagcagtactgttcattcagaaaattctcataaagagaatagtaagaaagagatcctcccagtatcttcctgtgaaagtagtatttttgattatgaagaagatattccatctgttacaagacaagtaccaagtagaaaatatacaaacattagaaaaatcgaaaaggattccccttttatacatatgcaccgtcaccctaacgagaatacattgggcaaaaattctttcaacttttctgacttaaatcattcaaaaaataaagtatcctctgaaggaaatgaaaaaggaaacagcacagctctgagtagtttattcccttcatcatttactgaaaattgtgaattactgtcatgctcaggggagaatagaactatggtgcattctcttaatagcactgctgatgaaagtggactaaataaacttaaaattaggtatgaagaatttcaagaacataaaacagaaaagccaagcctcagccagcaagcagcacactatatgttttttcccagtgttgttctttctaactgtcttactagaccacagaaactatctcctgtcacatataaattacaacctggcaataaaccatcccggttaaaattgaataaaaggaaacttgcaggtcatcaggagacttctaccaaaagtagtgagactggatccacaaaagataattttatacaaaataatccttgtaatagtaatcctgagaaggataatgcattggctagtgatttaactaaaaccactcgtggagcttttgaaaataaaacacccacagatggttttatagactgtcactttggagatggaacgttagaaactgagcagtcctttggactatatggaaataaatacacacttagagccaaacgcaaggtaaattatgagactgaagacagtgagtcaagttttgtaactcacaactcaaaaattagtctacctcatcccatggaaattggtgaaagtttagatggaactctcaaatcccgaaaacgaagaaaaatgtctaaaaagctgccccctgtcatcataaagtatattattattaatagatttagagggagaaaaaatatgcttgtgaagctaggaaaaatagactctaaagaaaaacaagtaatattaacagaagaaaaaatggaactatataaaaagcttgcacctttgaaggacttttggccaaaagttcccgactcccctgcaaccaaatatcccatttatccactaacaccaaagaaaagtcacagaagaaagtcaaaacataaatctgctaagaaaaaaactggtaaacaacaaaggacaaataatgaaaatattaaaagaactttgtctttcaggaaaaaacggtcacatgctattctttctcctccctcaccatcttacaatgctgaaaccgaagattgtgacctgaattatagtgatgttatgtctaaactaggttttctttctgagagaagcacaagtcccataaattcttctccacctcgctgctggtctcccacagatccaagagctgaagaaatcatggctgctgcagaaaaagaggcaatgctttttaagggtcctaatgtatataagaagactgttaattctcgtataggaaaaactagtcgcgcaagagcacagattaagaaatcaaaagcaaagcttgctaatccctctatagttactaagaaaaggaacaaacgaaatcagacaaataaactagtagatgatggaaaaaagaaaccaagagcaaaacaaaaaacaaatgagaaaggtacatcgagaaagcatacaacacttaaggatgaaaaaataaaatctcagtctggtgctgaggttaagtttgtactgaaacaccagaatgtgtctgaatttgcaagtagttctggaggctctcaactactttttaaacagaaagatatgccactaatgggctctgctgtagatcatcccctttctgcttccctacccactggaattaatgcacaacagaagttatctggctgcttttcttctttcttagaaagcaagaagtctgtagatttgcagacattccccagttcacgagatgatttgcatccatcagttgtttgtaattctataggacctggagtctcaaaaattaatgttcaaaggcctcataatcaaagtgctatgtttactctaaaggaatcaacgttaattcaaaaaaatatatttgacctttccaatcatttatctcaggtagcacagaatacacagatatcttctggtatgtcctcaaagatagaagataatgcaaataatatacaaagaaactatttgtcatcaatcggaaagttaagtgaatatcgcaattccctagaatcaaagctggaccaagcatatacccctaattttttgcattgcaaagacagtcagcagcagattgtgtgcatagcggaacagtcaaagcacagtgaaacttgttctccgggaaatacagcttcagaggaaagccaaatgcctaataattgctttgtaacttccttgagaagtccaatcaaacaaatagcatgggagcaaaagcaaaggggctttattttagatatgtcaaattttaaacctgaaagagtaaaaccgaggtcgttatcagaagcaatttcacaaaccaaagcactttctcagtgtaaaaatcgaaatgtgtcaacaccttcagcatttggtgaaggacagtctggactggcagttctaaaagaattgttacaaaaaagacagcagaaagcacaaaatgcaaatactacacaagacccattatccaataaacatcaaccaaataaaaatatttctggttcccttgagcataacaaagcaaataaacggacacgatcggtaacgtccccaagaaaacctcgaactcccagaagtacaaaacaaaaagaaaaaatccccaaacttctcaaagtagactctttaaatttacaaaactctagccagttggataactctgtatcagatgatagtcccatctttttttcagatccaggctttgaaagttgttactcacttgaagatagtttatctcctgaacataattataattttgatattaacacaataggtcagactggattttgtagcttttattctggaagtcagtttgtcccagctgatcagaatttgcctcagaagttcctaagtgatgctgttcaggatctttttccaggacaagctatagaaaaaaatgagtttttaagtcatgacaaccagaaatgtgatgaagacaagcatcataccacagactcagcctcatggattagatctggtactttaagtcctgaaatttttgagaagtcaaccatagatagcaatgagaatcgtcgccacaaccagtggaaaaatagctttcatcctctaacaactcggtctaactcaataatggattctttctgtgttcagcaggcagaagactgtctaagtgaaaaatctagattgaataggagttcagtaagcaaagaagtgtttcttagcctcccacagccaaacaattcagactggattcaaggtcacaccagaaaagaaatgggacagtctcttgactcagccaatacctcttttactgcaatactctcctcccctgatggtgaacttgtagacgtggcctgtgaagatttagaactgtatgtttcaagaaacaatgatatgttgacaccaactcctgatagttcaccaagatctactagctctccttcacaatctaaaaatggcagcttcacccctcgaactgctaacattctgaaaccacttatgtcccccccaagtagggaagaaattatggcaactttgttggatcatgacctgtctgagactatttaccaggaaccattttgcagtaatccttctgatgtaccagaaaagcccagggagattggtggacggctcctcatggtagaaactcgacttgcaaatgatctggctgagtttgagggagacttttccttggaaggacttcgtctttggaaaacagcattctcagcaatgactcagaatccaaggccagggtcaccccttcgcagtggccaaggagttgtcaataaagggtcaagtaatagccctaagatggttgaagataaaaaaattgtgattatgccttgcaaatgtgccccaagtcgacaactggttcaagtgtggcttcaagccaaagaagaatacgaacgttccaagaaactgcctaaaaccaagccaactggagttgtaaaatctgctgagaactttagctcttcagttaacccagatgacaaacctgtagtgcctccaaaaatggatgtaagtccatgtatactccccactacagcacataccaaggaggatgttgataattctcagattgctttacaagcaccaaccacgggatgtagtcaaactgcaagtgaaagtcagatgctgccaccagttgcctctgcaagtgatcccgaaaaagatgaagatgatgatgataactattacattagttatagctcccctgattctccagtaattcccccttggcaacaaccaatatccccagattccaaagcattaaatggagatgatagaccctcatcaccagtagaggagctgccttcattggcttttgagaacttcttaaagccaataaaagatggtatacaaaaaagcccctgcagtgagcctcaagagcctctagtgatatctccaattaatactagggcaagaactgggaaatgtgaatcactttgctttcatagtacaccaatcatacagagaaaacttctggaaaggcttcctgaagcacctggccttagcccattatcaacagaaccaaaaacacagaagttgagtaataagaaaggaagtaatactgacactcttagaagagtactgttaacacaagcaaagaatcaatttgcagcagtaaataccccacagaaagaaacttctcagattgatggaccatctttaaacaatacttacggtttcaaagtcagcatacaaaacttacaggaggcaaaagctttacatgagatacaaaatcttaccctaatcagtgtggagttgcatgctcgaactagacgagacttagaaccggatcctgaatttgacccaatctgtgctctgttctactgcatctcatctgacactccactgccagatacagaaaaaacagaactcacaggtgtaatagtgattgataaagacaagacagttttcagtcaagatatcagatatcagactccattacttattagatctggaattacaggactcgaagtcacctatgctgctgatgagaaggcactttttcatgaaattgcaaatataataaagaggtatgatcctgatattctgctaggatatgagattcagatgcattcctggggttacctcttacaaagggctgccgctttaagtattgacttatgtcggatgatctctcgggtgccagatgacaaaattgagaacagatttgcagctgaaagagatgagtatggatcatatacaatgagtgagataaatattgttggccgaattacactaaatctttggagaatcatgagaaatgaggtggctctaactaactacacctttgaaaatgtgagctttcatgttcttcatcagcgttttcccctctttacctttcgagtcttgtcagactggtttgataacaagacagatctatacagatggaaaatggttgatcattatgttagccgtgtccgtggaaatctccaaatgttagaacagctggacctgattgggaaaaccagtgagatggctagactttttggcattcagtttttacatgtactgacaaggggttcacagtaccgtgtggaatcaatgatgttgcgtattgctaaaccaatgaactatattcctgtgacacctagtgttcagcaaagatcccagatgagagccccacagtgtgttcctctaattatggagcctgaatcccgcttctatagcaactctgttctcgttttggatttccaatcactttatccttctattgtgattgcatataactactgcttttccacctgccttggccatgtggagaacttgggaaagtatgatgagttcaaatttggctgtacctctctgagagtacctccagatttactttaccaagttaggcatgatatcacagtgtcccccaatggagtagcttttgtcaagccttcagtaagaaaaggtgtactaccaagaatgcttgaagaaattttgaagactagatttatggtgaagcagtcaatgaaggcttacaagcaagacagagccctgtcacgaatgcttgatgcgcgtcagttgggacttaagctgatagcaaatgtcacatttggctatacatctgctaatttttctgggagaatgccatgcattgaggttggcgatagtattgttcacaaagccagagagaccttggaacgagctattaaactggtgaatgataccaagaaatggggggctagggttgtatatggcgatactgacagtatgtttgtgctactgaaaggagccactaaggagcagtcttttaagattggtcaggaaattgccgaagctgtaactgctaccaatcctaaaccagtgaaattgaagtttgaaaaggtatatttgccctgtgttttacaaacaaaaaagaggtatgtgggttacatgtatgaaacactggatcagaaggacccagtatttgatgcaaaaggaatagaaacagtcagaagagattcctgccctgctgtttctaagatacttgagcgttctctaaagctgctatttgaaacgagagatataagtctaattaaacagtatgttcagcgacaatgtatgaagcttctggaaggaaaggccagcatacaagactttatctttgccaaggaatacagaggaagtttttcttataaaccaggagcttgtgtgccagcccttgaacttacaaggaaaatgctgacttatgaccggcgctctgagcctcaggttggggagcgagtgccatacgtcatcatttatgggacccccggagtaccacttatccagcttgtaaggcgcccagtggaagtcctgcaggacccaactctgagactgaatgctacttactatattaccaagcaaatccttccacccttggcaagaatcttctcacttattggtattgatgtcttcagctggtatcatgaattaccaaggatccataaagctaccagctcctcgcgaagtgaacctgaagggcggaaaggcactatttcacaatattttactaccttacactgtcctgtgtgtgatgacctaactcagcatggcatctgtagtaaatgtcggagccaacctcagcatgttgcagtcatcctcaaccaagaaatccgggagttggaacgtcaacaggagcaacttgtaaagatatgcaagaactgtacaggttgctttgatcgacacatcccatgtgtttctctgaactgcccagtacttttcaaactctcccgagtaaatagagaattgtccaaggcaccatatctccggcagttattagaccagttttaaattgtcaatatcacagtattacaggtgctatttttttcagtgcttaccactaaactgttgtgcatggtgctttttaactttcatcgagtcaaggatgttcactgtctgttatctgaagactatgaagacttctatgctaaccgaattaaaatgtacttgttgatctctgaatagctcacttcttacaatgtacaaattcctcattctgtcaccttttaaacattgttttataatgcaggtgttggatttgctccagtatgtgtaccatcttgtaaattcatttgagtagatcatgtttacttcccagtggaaggagcactgaaaacctcttaaagaaaaagcatttgtgtgttttccttgaactgtctgtatcaagacgtgttacttcgagatatccattcactttataattttgactgcaaaatattttgtaaatacacttttttacttttcaaacgagcaaaataatgtgcaatgatttttatacaaatgattttcaagttgtttggtatatttcctctaggttttgcttgactcaaagtagatcgttattttgatcaaactgtgcaaacagtagtaccacgtgtagcattttgaaacattatttttttttaaaaaatgctgtcttgctttagctattaatggggcattgtgaggaactgtgcaaagacatttttgttacaaacctgtgggcctgttgcaatactttaaaaataaaaaattttattccatttgcttgttttgtatagacatttctattgcttctaaatatacttaaaatattttctttccttatgtactgtacagttaatcttatttgccatcatcttgaacacaaaatgtgtatttagaatatttgtataactgtgtaaaataaaaaaggaattatgtggtcagtgcattgttttttaaactggaaatcattttgttttaaaagttaataatggaaaccatattaaaattgaataaaatataaaataatata

SEQ ID NO: 26144 - DNA, 10461 bp, Homo sapiens
  source 1..10461: mol_type = unassigned DNA
tggttgcgtccgtgacatcatcatcatggcaacaagagctgccgggtcgccagtgaagggaggcagtggcggcggcggcgaacatgttttcagtaaggatagtgactgcagactactacatggccagcccgctgcaggggctggatacctgccaatcccccctcacccaggcccctgtcaagaaggtgccggtggtgcgagtcttcggagcgaccccggcaggtcagaagacatgtcttcatctacatggcatctttccttacctctatgtgccatacgatggttatggacagcagccagaaagctatctttctcagatggcattcagtatcgacagagcacttaatgtggctttaggcaatccatcttccactgctcagcatgtgttcaaagtgtcattagtatcaggaatgcctttttatggttatcatgagaaggaaagacactttatgaagatctatctttacaatcctacaatggtgaaaaggatatgtgaacttttgcaaagcggagccataatgaataaattttaccagcctcatgaagcgcatattccctacctcctacagctcttcattgactacaatctttatggcatgaatttaataaatctggctgctgtcaagttccgaaaagcaagaaggaaaagtaatacattgcatgcaactggatcctgcaagaatcatttatcaggaaattctcttgctgatactttatttcggtgggaacaagatgaaataccaagctctttaatattggaaggtgttgaaccacagagtacatgtgaattagaagtggatgctgtagctgctgatatcttaaatcgtctggacattgaagctcaaattggtggaaaccctggtctacaggccatatgggaagatgaaaagcaacggcgaagaaacagaaatgaaacttctcaaatgagccaacctgagtcacaagatcacaggtttgtgccagcaacagaaagtgaaaaaaaatttcagaagagacttcaggaaattctcaaacagaatgatttctctgtaacattatcaggatctgtggactacagcgatggatcccaggagttctctgctgagttaacattgcactctgaggttctgtctcctgaaatgcttcagtgtacaccagccaatatggtagaagttcacaaagacaaagagtcaagcaaaggtcacactagacacaaagtggaagaagctcttattaatgaagaagcaattttgaaccttatggaaaatagtcagacttttcagcctttgacccaaagactgagtgagtcacctgttttcatggacagtagtcctgatgaggctctggtacatcttcttgctggtttggaaagtgatggatatcggggggaaagaaataggatgccatcaccatgtcgctcctttggaaataataaatatccacaaaatagtgatgatgaagaaaatgaaccacagattgaaaaagaggaaatggagcttagtttggtgatgtcccagagatgggacagcaatattgaagaacattgtgccaaaaagagatcactgtgcagaaatacccacagaagttcaactgaagatgatgactcatcttcaggagaagaaatggaatggagtgataacagtttgcttctagccagtctttctatacctcagttagatggaactgcagatgaaaatagtgacaatccattgaacaatgaaaattctagaacccactcttctgtaattgcaacaagcaagctttcagttaaaccctccatctttcacaaagatgctgctacattagaaccctcatcttctgctaagattacctttcagtgtaaacacacaagtgccctttcttcccatgttttgaacaaggaagatttaattgaagacctttcacagacaaacaaaaatacagaaaaaggtctagataactcagtcacttcttttacaaacgaaagcacttattctatgaaataccctggatctttaagcagtactgttcattcagaaaattctcataaagagaatagtaagaaagagatcctcccagtatcttcctgtgaaagtagtatttttgattatgaagaagatattccatctgttacaagacaagtaccaagtagaaaatatacaaacattagaaaaatcgaaaaggattccccttttatacatatgcaccgtcaccctaacgagaatacattgggcaaaaattctttcaacttttctgacttaaatcattcaaaaaataaagtatcctctgaaggaaatgaaaaaggaaacagcacagctctgagtagtttattcccttcatcatttactgaaaattgtgaattactgtcatgctcaggggagaatagaactatggtgcattctcttaatagcactgctgatgaaagtggactaaataaacttaaaattaggtatgaagaatttcaagaacataaaacagaaaagccaagcctcagccagcaagcagcacactatatgttttttcccagtgttgttctttctaactgtcttactagaccacagaaactatctcctgtcacatataaattacaacctggcaataaaccatcccggttaaaattgaataaaaggaaacttgcaggtcatcaggagacttctaccaaaagtagtgagactggatccacaaaagataattttatacaaaataatccttgtaatagtaatcctgagaaggataatgcattggctagtgatttaactaaaaccactcgtggagcttttgaaaataaaacacccacagatggttttatagactgtcactttggagatggaacgttagaaactgagcagtcctttggactatatggaaataaatacacacttagagccaaacgcaaggtaaattatgagactgaagacagtgagtcaagttttgtaactcacaactcaaaaattagtctacctcatcccatggaaattggtgaaagtttagatggaactctcaaatcccgaaaacgaagaaaaatgtctaaaaagctgccccctgtcatcataaagtatattattattaatagatttagagggagaaaaaatatgcttgtgaagctaggaaaaatagactctaaagaaaaacaagtaatattaacagaagaaaaaatggaactatataaaaagcttgcacctttgaaggacttttggccaaaagttcccgactcccctgcaaccaaatatcccatttatccactaacaccaaagaaaagtcacagaagaaagtcaaaacataaatctgctaagaaaaaaactggtaaacaacaaaggacaaataatgaaaatattaaaagaactttgtctttcaggaaaaaacggtcacatgctattctttctcctccctcaccatcttacaatgctgaaaccgaagattgtgacctgaattatagtgatgttatgtctaaactaggttttctttctgagagaagcacaagtcccataaattcttctccacctcgctgctggtctcccacagatccaagagctgaagaaatcatggctgctgcagaaaaagaggcaatgctttttaagggtcctaatgtatataagaagactgttaattctcgtataggaaaaactagtcgcgcaagagcacagattaagaaatcaaaagcaaagcttgctaatccctctatagttactaagaaaaggaacaaacgaaatcagacaaataaactagtagatgatggaaaaaagaaaccaagagcaaaacaaaaaacaaatgagaaaggtacatcgagaaagcatacaacacttaaggatgaaaaaataaaatctcagtctggtgctgaggttaagtttgtactgaaacaccagaatgtgtctgaatttgcaagtagttctggaggctctcaactactttttaaacagaaagatatgccactaatgggctctgctgtagatcatcccctttctgcttccctacccactggaattaatgcacaacagaagttatctggctgcttttcttctttcttagaaagcaagaagtctgtagatttgcagacattccccagttcacgagatgatttgcatccatcagttgtttgtaattctataggacctggagtctcaaaaattaatgttcaaaggcctcataatcaaagtgctatgtttactctaaaggaatcaacgttaattcaaaaaaatatatttgacctttccaatcatttatctcaggtagcacagaatacacagatatcttctggtatgtcctcaaagatagaagataatgcaaataatatacaaagaaactatttgtcatcaatcggaaagttaagtgaatatcgcaattccctagaatcaaagctggaccaagcatatacccctaattttttgcattgcaaagacagtcagcagcagattgtgtgcatagcggaacagtcaaagcacagtgaaacttgttctccgggaaatacagcttcagaggaaagccaaatgcctaataattgctttgtaacttccttgagaagtccaatcaaacaaatagcatgggagcaaaagcaaaggggctttattttagatatgtcaaattttaaacctgaaagagtaaaaccgaggtcgttatcagaagcaatttcacaaaccaaagcactttctcagtgtaaaaatcgaaatgtgtcaacaccttcagcatttggtgaaggacagtctggactggcagttctaaaagaattgttacaaaaaagacagcagaaagcacaaaatgcaaatactacacaagacccattatccaataaacatcaaccaaataaaaatatttctggttcccttgagcataacaaagcaaataaacggacacgatcggtaacgtccccaagaaaacctcgaactcccagaagtacaaaacaaaaagaaaaaatccccaaacttctcaaagtagactctttaaatttacaaaactctagccagttggataactctgtatcagatgatagtcccatctttttttcagatccaggctttgaaagttgttactcacttgaagatagtttatctcctgaacataattataattttgatattaacacaataggtcagactggattttgtagcttttattctggaagtcagtttgtcccagctgatcagaatttgcctcagaagttcctaagtgatgctgttcaggatctttttccaggacaagctatagaaaaaaatgagtttttaagtcatgacaaccagaaatgtgatgaagacaagcatcataccacagactcagcctcatggattagatctggtactttaagtcctgaaatttttgagaagtcaaccatagatagcaatgagaatcgtcgccacaaccagtggaaaaatagctttcatcctctaacaactcggtctaactcaataatggattctttctgtgttcagcaggcagaagactgtctaagtgaaaaatctagattgaataggagttcagtaagcaaagaagtgtttcttagcctcccacagccaaacaattcagactggattcaaggtcacaccagaaaagaaatgggacagtctcttgactcagccaatacctcttttactgcaatactctcctcccctgatggtgaacttgtagacgtggcctgtgaagatttagaactgtatgtttcaagaaacaatgatatgttgacaccaactcctgatagttcaccaagatctactagctctccttcacaatctaaaaatggcagcttcacccctcgaactgctaacattctgaaaccacttatgtcccccccaagtagggaagaaattatggcaactttgttggatcatgacctgtctgagactatttaccaggaaccattttgcagtaatccttctgatgtaccagaaaagcccagggagattggtggacggctcctcatggtagaaactcgacttgcaaatgatctggctgagtttgagggagacttttccttggaaggacttcgtctttggaaaacagcattctcagcaatgactcagaatccaaggccagggtcaccccttcgcagtggccaaggagttgtcaataaagggtcaagtaatagccctaagatggttgaagataaaaaaattgtgattatgccttgcaaatgtgccccaagtcgacaactggttcaagtgtggcttcaagccaaagaagaatacgaacgttccaagaaactgcctaaaaccaagccaactggagttgtaaaatctgctgagaactttagctcttcagttaacccagatgacaaacctgtagtgcctccaaaaatggatgtaagtccatgtatactccccactacagcacataccaaggaggatgttgataattctcagattgctttacaagcaccaaccacgggatgtagtcaaactgcaagtgaaagtcagatgctgccaccagttgcctctgcaagtgatcccgaaaaagatgaagatgatgatgataactattacattagttatagctcccctgattctccagtaattcccccttggcaacaaccaatatccccagattccaaagcattaaatggagatgatagaccctcatcaccagtagaggagctgccttcattggcttttgagaacttcttaaagccaataaaagatggtatacaaaaaagcccctgcagtgagcctcaagagcctctagtgatatctccaattaatactagggcaagaactgggaaatgtgaatcactttgctttcatagtacaccaatcatacagagaaaacttctggaaaggcttcctgaagcacctggccttagcccattatcaacagaaccaaaaacacagaagttgagtaataagaaaggaagtaatactgacactcttagaagagtactgttaacacaagcaaagaatcaatttgcagcagtaaataccccacagaaagaaacttctcagattgatggaccatctttaaacaatacttacggtttcaaagtcagcatacaaaacttacaggaggcaaaagctttacatgagatacaaaatcttaccctaatcagtgtggagttgcatgctcgaactagacgagacttagaaccggatcctgaatttgacccaatctgtgctctgttctactgcatctcatctgacactccactgccagatacagaaaaaacagaactcacaggtgtaatagtgattgataaagacaagacagttttcagtcaagatatcagatatcagactccattacttattagatctggaattacaggactcgaagtcacctatgctgctgatgagaaggcactttttcatgaaattgcaaatataataaagaggtatgatcctgatattctgctaggatatgagattcagatgcattcctggggttacctcttacaaagggctgccgctttaagtattgacttatgtcggatgatctctcgggtgccagatgacaaaattgagaacagatttgcagctgaaagagatgagtatggatcatatacaatgagtgagataaatattgttggccgaattacactaaatctttggagaatcatgagaaatgaggtggctctaactaactacacctttgaaaatgtgagctttcatgttcttcatcagcgttttcccctctttacctttcgagtcttgtcagactggtttgataacaagacagatctatacagatggaaaatggttgatcattatgttagccgtgtccgtggaaatctccaaatgttagaacagctggacctgattgggaaaaccagtgagatggctagactttttggcattcagtttttacatgtactgacaaggggttcacagtaccgtgtggaatcaatgatgttgcgtattgctaaaccaatgaactatattcctgtgacacctagtgttcagcaaagatcccagatgagagccccacagtgtgttcctctaattatggagcctgaatcccgcttctatagcaactctgttctcgttttggatttccaatcactttatccttctattgtgattgcatataactactgcttttccacctgccttggccatgtggagaacttgggaaagtatgatgagttcaaatttggctgtacctctctgagagtacctccagatttactttaccaagttaggcatgatatcacagtgtcccccaatggagtagcttttgtcaagccttcagtaagaaaaggtgtactaccaagaatgcttgaagaaattttgaagactagatttatggtgaagcagtcaatgaaggcttacaagcaagacagagccctgtcacgaatgcttgatgcgcgtcagttgggacttaagctgatagcaaatgtcacatttggctatacatctgctaatttttctgggagaatgccatgcattgaggttggcgatagtattgttcacaaagccagagagaccttggaacgagctattaaactggtgaatgataccaagaaatggggggctagggttgtatatggcgatactgacagtatgtttgtgctactgaaaggagccactaaggagcagtcttttaagattggtcaggaaattgccgaagctgtaactgctaccaatcctaaaccagtgaaattgaagtttgaaaaggtatatttgccctgtgttttacaaacaaaaaagaggtatgtgggttacatgtatgaaacactggatcagaaggacccagtatttgatgcaaaaggaatagaaacagtcagaagagattcctgccctgctgtttctaagatacttgagcgttctctaaagctgctatttgaaacgagagatataagtctaattaaacagtatgttcagcgacaatgtatgaagcttctggaaggaaaggccagcatacaagactttatctttgccaaggaatacagaggaagtttttcttataaaccaggagcttgtgtgccagcccttgaacttacaaggaaaatgctgacttatgaccggcgctctgagcctcaggttggggagcgagtgccatacgtcatcatttatgggacccccggagtaccacttatccagcttgtaaggcgcccagtggaagtcctgcaggacccaactctgagactgaatgctacttactatattaccaagcaaatccttccacccttggcaagaatcttctcacttattggtattgatgtcttcagctggtatcatgaattaccaaggatccataaagctaccagctcctcgcgaagtgaacctgaagggcggaaaggcactatttcacaatattttactaccttacactgtcctgtgtgtgatgacctaactcagcatggcatctgtagtaaatgtcggagccaacctcagcatgttgcagtcatcctcaaccaagaaatccgggagttggaacgtcaacaggagcaacttgtaaagatatgcaagaactgtacaggttgctttgatcgacacatcccatgtgtttctctgaactgcccagtacttttcaaactctcccgagtaaatagagaattgtccaaggcaccatatctccggcagttattagaccagttttaaattgtcaatatcacagtattacaggtgctatttttttcagtgcttaccactaaactgttgtgcatggtgctttttaactttcatcgagtcaaggatgttcactgtctgttatctgaagactatgaagacttctatgctaaccgaattaaaatgtacttgttgatctctgaatagctcacttcttacaatgtacaaattcctcattctgtcaccttttaaacattgttttataatgcaggtgttggatttgctccagtatgtgtaccatcttgtaaattcatttgagtagatcatgtttacttcccagtggaaggagcactgaaaacctcttaaagaaaaagcatttgtgtgttttccttgaactgtctgtatcaagacgtgttacttcgagatatccattcactttataattttgactgcaaaatattttgtaaatacacttttttacttttcaaacgagcaaaataatgtgcaatgatttttatacaaatgattttcaagttgtttggtatatttcctctaggttttgcttgactcaaagtagatcgttattttgatcaaactgtgcaaacagtagtaccacgtgtagcattttgaaacattatttttttttaaaaaatgctgtcttgctttagctattaatggggcattgtgaggaactgtgcaaagacatttttgttacaaacctgtgggcctgttgcaatactttaaaaataaaaaattttattccatttgcttgttttgtatagacatttctattgcttctaaatatacttaaaatattttctttccttatgtactgtacagttaatcttatttgccatcatcttgaacacaaaatgtgtatttagaatatttgtataactgtgtaaaataaaaaaggaattatgtggtcagtgcattgttttttaaactggaaatcattttgttttaaaagttaataatggaaaccatattaaaattgaataaaatataaaataatata

SEQ ID NO: 26145 - DNA, 10917 bp, Homo sapiens
  source 1..10917: mol_type = unassigned DNA
cgagatctgcgcctcgcctccctcctcacgcgggcggattttcttaccttgtgaaaaaccgtctcagcggctgcccccgcctcctctgctggatgtgaaatggcggtcggcgagtggttgcgtccgtgacatcatcatcatggcaacaagagctgcagcctgggaccgaggagcccgtgtgattcccggcggtggcggcagtggcggcagcaccagcaccgacgaaagctcgagggcttctctcctgcggccccttgccgggtgctcctgaggaggcggcggcagcagcgcctacaccgccccgcccgccgctcctcgaggtgcctctgtgtgaggggagggggccgtgccgagaaggggagggggcgccgccgccgctgcggagggagccgccgccgctgctgctgccgctgccgggtcgccagtgaagggaggcagtggcggcggcggcgaacatgttttcagtaaggatagtgactgcagactactacatggccagcccgctgcaggggctggatacctgccaatcccccctcacccaggcccctgtcaagaaggtgccggtggtgcgagtcttcggagcgaccccggcagaataaaacccaagacaagccacataaaagcaacctaaaaattaaactgtcatcatattatttgttttaaaactatggaataatatatctgaggaagatttctctcaaaattgtttttctcaatttcaagtcagaagacatgtcttcatctacatggcatctttccttacctctatgtgccatacgatggttatggacagcagccagaaagctatctttctcagatggcattcagtatcgacagagcacttaatgtggctttaggcaatccatcttccactgctcagcatgtgttcaaagtgtcattagtatcaggaatgcctttttatggttatcatgagaaggaaagacactttatgaagatctatctttacaatcctacaatggtgaaaaggatatgtgaacttttgcaaagcggagccataatgaataaattttaccagcctcatgaagcgcatattccctacctcctacagctcttcattgactacaatctttatggcatgaatttaataaatctggctgctgtcaagttccgaaaagcaagaaggaaaagtaatacattgcatgcaactggatcctgcaagaatcatttatcaggaaattctcttgctgatactttatttcggtgggaacaagatgaaataccaagctctttaatattggaaggtgttgaaccacagagtacatgtgaattagaagtggatgctgtagctgctgatatcttaaatcgtctggacattgaagctcaaattggtggaaaccctggtctacaggccatatgggaagatgaaaagcaacggcgaagaaacagaaatgaaacttctcaaatgagccaacctgagtcacaagatcacaggtttgtgccagcaacagaaagtgaaaaaaaatttcagaagagacttcaggaaattctcaaacagaatgatttctctgtaacattatcaggatctgtggactacagcgatggatcccaggagttctctgctgagttaacattgcactctgaggttctgtctcctgaaatgcttcagtgtacaccagccaatatggtagaagttcacaaagacaaagagtcaagcaaaggtcacactagacacaaagtggaagaagctcttattaatgaagaagcaattttgaaccttatggaaaatagtcagacttttcagcctttgacccaaagactgagtgagtcacctgttttcatggacagtagtcctgatgaggctctggtacatcttcttgctggtttggaaagtgatggatatcggggggaaagaaataggatgccatcaccatgtcgctcctttggaaataataaatatccacaaaatagtgatgatgaagaaaatgaaccacagattgaaaaagaggaaatggagcttagtttggtgatgtcccagagatgggacagcaatattgaagaacattgtgccaaaaagagatcactgtgcagaaatacccacagaagttcaactgaagatgatgactcatcttcaggagaagaaatggaatggagtgataacagtttgcttctagccagtctttctatacctcagttagatggaactgcagatgaaaatagtgacaatccattgaacaatgaaaattctagaacccactcttctgtaattgcaacaagcaagctttcagttaaaccctccatctttcacaaagatgctgctacattagaaccctcatcttctgctaagattacctttcagtgtaaacacacaagtgccctttcttcccatgttttgaacaaggaagatttaattgaagacctttcacagacaaacaaaaatacagaaaaaggtctagataactcagtcacttcttttacaaacgaaagcacttattctatgaaataccctggatctttaagcagtactgttcattcagaaaattctcataaagagaatagtaagaaagagatcctcccagtatcttcctgtgaaagtagtatttttgattatgaagaagatattccatctgttacaagacaagtaccaagtagaaaatatacaaacattagaaaaatcgaaaaggattccccttttatacatatgcaccgtcaccctaacgagaatacattgggcaaaaattctttcaacttttctgacttaaatcattcaaaaaataaagtatcctctgaaggaaatgaaaaaggaaacagcacagctctgagtagtttattcccttcatcatttactgaaaattgtgaattactgtcatgctcaggggagaatagaactatggtgcattctcttaatagcactgctgatgaaagtggactaaataaacttaaaattaggtatgaagaatttcaagaacataaaacagaaaagccaagcctcagccagcaagcagcacactatatgttttttcccagtgttgttctttctaactgtcttactagaccacagaaactatctcctgtcacatataaattacaacctggcaataaaccatcccggttaaaattgaataaaaggaaacttgcaggtcatcaggagacttctaccaaaagtagtgagactggatccacaaaagataattttatacaaaataatccttgtaatagtaatcctgagaaggataatgcattggctagtgatttaactaaaaccactcgtggagcttttgaaaataaaacacccacagatggttttatagactgtcactttggagatggaacgttagaaactgagcagtcctttggactatatggaaataaatacacacttagagccaaacgcaaggtaaattatgagactgaagacagtgagtcaagttttgtaactcacaactcaaaaattagtctacctcatcccatggaaattggtgaaagtttagatggaactctcaaatcccgaaaacgaagaaaaatgtctaaaaagctgccccctgtcatcataaagtatattattattaatagatttagagggagaaaaaatatgcttgtgaagctaggaaaaatagactctaaagaaaaacaagtaatattaacagaagaaaaaatggaactatataaaaagcttgcacctttgaaggacttttggccaaaagttcccgactcccctgcaaccaaatatcccatttatccactaacaccaaagaaaagtcacagaagaaagtcaaaacataaatctgctaagaaaaaaactggtaaacaacaaaggacaaataatgaaaatattaaaagaactttgtctttcaggaaaaaacggtcacatgctattctttctcctccctcaccatcttacaatgctgaaaccgaagattgtgacctgaattatagtgatgttatgtctaaactaggttttctttctgagagaagcacaagtcccataaattcttctccacctcgctgctggtctcccacagatccaagagctgaagaaatcatggctgctgcagaaaaagaggcaatgctttttaagggtcctaatgtatataagaagactgttaattctcgtataggaaaaactagtcgcgcaagagcacagattaagaaatcaaaagcaaagcttgctaatccctctatagttactaagaaaaggaacaaacgaaatcagacaaataaactagtagatgatggaaaaaagaaaccaagagcaaaacaaaaaacaaatgagaaaggtacatcgagaaagcatacaacacttaaggatgaaaaaataaaatctcagtctggtgctgaggttaagtttgtactgaaacaccagaatgtgtctgaatttgcaagtagttctggaggctctcaactactttttaaacagaaagatatgccactaatgggctctgctgtagatcatcccctttctgcttccctacccactggaattaatgcacaacagaagttatctggctgcttttcttctttcttagaaagcaagaagtctgtagatttgcagacattccccagttcacgagatgatttgcatccatcagttgtttgtaattctataggacctggagtctcaaaaattaatgttcaaaggcctcataatcaaagtgctatgtttactctaaaggaatcaacgttaattcaaaaaaatatatttgacctttccaatcatttatctcaggtagcacagaatacacagatatcttctggtatgtcctcaaagatagaagataatgcaaataatatacaaagaaactatttgtcatcaatcggaaagttaagtgaatatcgcaattccctagaatcaaagctggaccaagcatatacccctaattttttgcattgcaaagacagtcagcagcagattgtgtgcatagcggaacagtcaaagcacagtgaaacttgttctccgggaaatacagcttcagaggaaagccaaatgcctaataattgctttgtaacttccttgagaagtccaatcaaacaaatagcatgggagcaaaagcaaaggggctttattttagatatgtcaaattttaaacctgaaagagtaaaaccgaggtcgttatcagaagcaatttcacaaaccaaagcactttctcagtgtaaaaatcgaaatgtgtcaacaccttcagcatttggtgaaggacagtctggactggcagttctaaaagaattgttacaaaaaagacagcagaaagcacaaaatgcaaatactacacaagacccattatccaataaacatcaaccaaataaaaatatttctggttcccttgagcataacaaagcaaataaacggacacgatcggtaacgtccccaagaaaacctcgaactcccagaagtacaaaacaaaaagaaaaaatccccaaacttctcaaagtagactctttaaatttacaaaactctagccagttggataactctgtatcagatgatagtcccatctttttttcagatccaggctttgaaagttgttactcacttgaagatagtttatctcctgaacataattataattttgatattaacacaataggtcagactggattttgtagcttttattctggaagtcagtttgtcccagctgatcagaatttgcctcagaagttcctaagtgatgctgttcaggatctttttccaggacaagctatagaaaaaaatgagtttttaagtcatgacaaccagaaatgtgatgaagacaagcatcataccacagactcagcctcatggattagatctggtactttaagtcctgaaatttttgagaagtcaaccatagatagcaatgagaatcgtcgccacaaccagtggaaaaatagctttcatcctctaacaactcggtctaactcaataatggattctttctgtgttcagcaggcagaagactgtctaagtgaaaaatctagattgaataggagttcagtaagcaaagaagtgtttcttagcctcccacagccaaacaattcagactggattcaaggtcacaccagaaaagaaatgggacagtctcttgactcagccaatacctcttttactgcaatactctcctcccctgatggtgaacttgtagacgtggcctgtgaagatttagaactgtatgtttcaagaaacaatgatatgttgacaccaactcctgatagttcaccaagatctactagctctccttcacaatctaaaaatggcagcttcacccctcgaactgctaacattctgaaaccacttatgtcccccccaagtagggaagaaattatggcaactttgttggatcatgacctgtctgagactatttaccaggaaccattttgcagtaatccttctgatgtaccagaaaagcccagggagattggtggacggctcctcatggtagaaactcgacttgcaaatgatctggctgagtttgagggagacttttccttggaaggacttcgtctttggaaaacagcattctcagcaatgactcagaatccaaggccagggtcaccccttcgcagtggccaaggagttgtcaataaagggtcaagtaatagccctaagatggttgaagataaaaaaattgtgattatgccttgcaaatgtgccccaagtcgacaactggttcaagtgtggcttcaagccaaagaagaatacgaacgttccaagaaactgcctaaaaccaagccaactggagttgtaaaatctgctgagaactttagctcttcagttaacccagatgacaaacctgtagtgcctccaaaaatggatgtaagtccatgtatactccccactacagcacataccaaggaggatgttgataattctcagattgctttacaagcaccaaccacgggatgtagtcaaactgcaagtgaaagtcagatgctgccaccagttgcctctgcaagtgatcccgaaaaagatgaagatgatgatgataactattacattagttatagctcccctgattctccagtaattcccccttggcaacaaccaatatccccagattccaaagcattaaatggagatgatagaccctcatcaccagtagaggagctgccttcattggcttttgagaacttcttaaagccaataaaagatggtatacaaaaaagcccctgcagtgagcctcaagagcctctagtgatatctccaattaatactagggcaagaactgggaaatgtgaatcactttgctttcatagtacaccaatcatacagagaaaacttctggaaaggcttcctgaagcacctggccttagcccattatcaacagaaccaaaaacacagaagttgagtaataagaaaggaagtaatactgacactcttagaagagtactgttaacacaagcaaagaatcaatttgcagcagtaaataccccacagaaagaaacttctcagattgatggaccatctttaaacaatacttacggtttcaaagtcagcatacaaaacttacaggaggcaaaagctttacatgagatacaaaatcttaccctaatcagtgtggagttgcatgctcgaactagacgagacttagaaccggatcctgaatttgacccaatctgtgctctgttctactgcatctcatctgacactccactgccagatacagaaaaaacagaactcacaggtgtaatagtgattgataaagacaagacagttttcagtcaagatatcagatatcagactccattacttattagatctggaattacaggactcgaagtcacctatgctgctgatgagaaggcactttttcatgaaattgcaaatataataaagaggtatgatcctgatattctgctaggatatgagattcagatgcattcctggggttacctcttacaaagggctgccgctttaagtattgacttatgtcggatgatctctcgggtgccagatgacaaaattgagaacagatttgcagctgaaagagatgagtatggatcatatacaatgagtgagataaatattgttggccgaattacactaaatctttggagaatcatgagaaatgaggtggctctaactaactacacctttgaaaatgtgagctttcatgttcttcatcagcgttttcccctctttacctttcgagtcttgtcagactggtttgataacaagacagatctatacagatggaaaatggttgatcattatgttagccgtgtccgtggaaatctccaaatgttagaacagctggacctgattgggaaaaccagtgagatggctagactttttggcattcagtttttacatgtactgacaaggggttcacagtaccgtgtggaatcaatgatgttgcgtattgctaaaccaatgaactatattcctgtgacacctagtgttcagcaaagatcccagatgagagccccacagtgtgttcctctaattatggagcctgaatcccgcttctatagcaactctgttctcgttttggatttccaatcactttatccttctattgtgattgcatataactactgcttttccacctgccttggccatgtggagaacttgggaaagtatgatgagttcaaatttggctgtacctctctgagagtacctccagatttactttaccaagttaggcatgatatcacagtgtcccccaatggagtagcttttgtcaagccttcagtaagaaaaggtgtactaccaagaatgcttgaagaaattttgaagactagatttatggtgaagcagtcaatgaaggcttacaagcaagacagagccctgtcacgaatgcttgatgcgcgtcagttgggacttaagctgatagcaaatgtcacatttggctatacatctgctaatttttctgggagaatgccatgcattgaggttggcgatagtattgttcacaaagccagagagaccttggaacgagctattaaactggtgaatgataccaagaaatggggggctagggttgtatatggcgatactgacagtatgtttgtgctactgaaaggagccactaaggagcagtcttttaagattggtcaggaaattgccgaagctgtaactgctaccaatcctaaaccagtgaaattgaagtttgaaaaggtatatttgccctgtgttttacaaacaaaaaagaggtatgtgggttacatgtatgaaacactggatcagaaggacccagtatttgatgcaaaaggaatagaaacagtcagaagagattcctgccctgctgtttctaagatacttgagcgttctctaaagctgctatttgaaacgagagatataagtctaattaaacagtatgttcagcgacaatgtatgaagcttctggaaggaaaggccagcatacaagactttatctttgccaaggaatacagaggaagtttttcttataaaccaggagcttgtgtgccagcccttgaacttacaaggaaaatgctgacttatgaccggcgctctgagcctcaggttggggagcgagtgccatacgtcatcatttatgggacccccggagtaccacttatccagcttgtaaggcgcccagtggaagtcctgcaggacccaactctgagactgaatgctacttactatattaccaagcaaatccttccacccttggcaagaatcttctcacttattggtattgatgtcttcagctggtatcatgaattaccaaggatccataaagctaccagctcctcgcgaagtgaacctgaagggcggaaaggcactatttcacaatattttactaccttacactgtcctgtgtgtgatgacctaactcagcatggcatctgtagtaaatgtcggagccaacctcagcatgttgcagtcatcctcaaccaagaaatccgggagttggaacgtcaacaggagcaacttgtaaagatatgcaagaactgtacaggttgctttgatcgacacatcccatgtgtttctctgaactgcccagtacttttcaaactctcccgagtaaatagagaattgtccaaggcaccatatctccggcagttattagaccagttttaaattgtcaatatcacagtattacaggtgctatttttttcagtgcttaccactaaactgttgtgcatggtgctttttaactttcatcgagtcaaggatgttcactgtctgttatctgaagactatgaagacttctatgctaaccgaattaaaatgtacttgttgatctctgaatagctcacttcttacaatgtacaaattcctcattctgtcaccttttaaacattgttttataatgcaggtgttggatttgctccagtatgtgtaccatcttgtaaattcatttgagtagatcatgtttacttcccagtggaaggagcactgaaaacctcttaaagaaaaagcatttgtgtgttttccttgaactgtctgtatcaagacgtgttacttcgagatatccattcactttataattttgactgcaaaatattttgtaaatacacttttttacttttcaaacgagcaaaataatgtgcaatgatttttatacaaatgattttcaagttgtttggtatatttcctctaggttttgcttgactcaaagtagatcgttattttgatcaaactgtgcaaacagtagtaccacgtgtagcattttgaaacattatttttttttaaaaaatgctgtcttgctttagctattaatggggcattgtgaggaactgtgcaaagacatttttgttacaaacctgtgggcctgttgcaatactttaaaaataaaaaattttattccatttgcttgttttgtatagacatttctattgcttctaaatatacttaaaatattttctttccttatgtactgtacagttaatcttatttgccatcatcttgaacacaaaatgtgtatttagaatatttgtataactgtgtaaaataaaaaaggaattatgtggtcagtgcattgttttttaaactggaaatcattttgttttaaaagttaa

SEQ ID NO: 26146 - DNA, 8393 bp, Homo sapiens
  source 1..8393: mol_type = unassigned DNA
catcatcatggcaacaagagctgcagcctgggaccgaggagcccgtgtgattcccggcggtggcggcagtggcggcagcaccagcaccgacgaaagctcgagggcttctctcctgcggccccttgccgggtgctcctgaggaggcggcggcagcagcgcctacaccgccccgcccgccgctcctcgaggtgcctctgtgtgaggggagggggccgtgccgagaaggggagggggcgccgccgccgctgcggagggagccgccgccgctgctgctgccgctgccgggtcgccagtgaagggaggcagtggcggcggcggcgaacatgttttcagtaaggatagtgactgcagactactacatggccagcccgctgcaggggctggatacctgccaatcccccctcacccaggcccctgtcaagaaggtgccggtggtgcgagtcttcggagcgaccccggcaggtcagaagacatgtcttcatctacatggcatctttccttacctctatgtgccatacgatggttatggacagcagccagaaagctatctttctcagatggcattcagtatcgacagagcacttaatgtggctttaggcaatccatcttccactgctcagcatgtgttcaaagtgtcattagtatcaggaatgcctttttatggttatcatgagaaggaaagacactttatgaagatctatctttacaatcctacaatggtgaaaaggatatgtgaacttttgcaaagcggagccataatgaataaattttaccagcctcatgaagcgcatattccctacctcctacagctcttcattgactacaatctttatggcatgaatttaataaatctggctgctgtcaagttccgaaaagcaagaaggaaaagtaatacattgcatgcaactggatcctgcaagaatcatttatcaggaaattctcttgctgatactttatttcggtgggaacaagatgaaataccaagctctttaatattggaaggtgttgaaccacagagtacatgtgaattagaagtggatgctgtagctgctgatatcttaaatcgtctggacattgaagctcaaattggtggaaaccctggtctacaggccatatgggaagatgaaaagcaacggcgaagaaacagaaatgaaacttctcaaatgagccaacctgagtcacaagatcacaggtttgtgccagcaacagaaagtgaaaaaaaatttcagaagagacttcaggaaattctcaaacagaatgatttctctgtaacattatcaggatctgtggactacagcgatggatcccaggagttctctgctgagttaacattgcactctgaggttctgtctcctgaaatgcttcagtgtacaccagccaatatggtagaagttcacaaagacaaagagtcaagcaaaggtcacactagacacaaagtggaagaagctcttattaatgaagaagcaattttgaaccttatggaaaatagtcagacttttcagcctttgacccaaagactgagtgagtcacctgttttcatggacagtagtcctgatgaggctctggtacatcttcttgctggtttggaaagtgatggatatcggggggaaagaaataggatgccatcaccatgtcgctcctttggaaataataaatatccacaaaatagtgatgatgaagaaaatgaaccacagattgaaaaagaggaaatggagcttagtttggtgatgtcccagagatgggacagcaatattgaagaacattgtgccaaaaagagatcactgtgcagaaatacccacagaagttcaactgaagatgatgactcatcttcaggagaagaaatggaatggagtgataacagtttgcttctagccagtctttctatacctcagttagatggaactgcagatgaaaatagtgacaatccattgaacaatgaaaattctagaacccactcttctgtaattgcaacaagcaagctttcagttaaaccctccatctttcacaaagatgctgctacattagaaccctcatcttctgctaagattacctttcagtgtaaacacacaagtgccctttcttcccatgttttgaacaaggaagatttaattgaagacctttcacagacaaacaaaaatacagaaaaaggtctagataactcagtcacttcttttacaaacgaaagcacttattctatgaaataccctggatctttaagcagtactgttcattcagaaaattctcataaagagaatagtaagaaagagatcctcccagtatcttcctgtgaaagtagtatttttgattatgaagaagatattccatctgttacaagacaagtaccaagtagaaaatatacaaacattagaaaaatcgaaaaggattccccttttatacatatgcaccgtcaccctaacgagaatacattgggcaaaaattctttcaacttttctgacttaaatcattcaaaaaataaagtatcctctgaaggaaatgaaaaaggaaacagcacagctctgagtagtttattcccttcatcatttactgaaaattgtgaattactgtcatgctcaggggagaatagaactatggtgcattctcttaatagcactgctgatgaaagtggactaaataaacttaaaattaggtatgaagaatttcaagaacataaaacagaaaagccaagcctcagccagcaagcagcacactatatgttttttcccagtgttgttctttctaactgtcttactagaccacagaaactatctcctgtcacatataaattacaacctggcaataaaccatcccggttaaaattgaataaaaggaaacttgcaggtcatcaggagacttctaccaaaagtagtgagactggatccacaaaagataattttatacaaaataatccttgtaatagtaatcctgagaaggataatgcattggctagtgatttaactaaaaccactcgtggagcttttgaaaataaaacacccacagatggttttatagactgtcactttggagatggaacgttagaaactgagcagtcctttggactatatggaaataaatacacacttagagccaaacgcaaggtaaattatgagactgaagacagtgagtcaagttttgtaactcacaactcaaaaattagtctacctcatcccatggaaattggtgaaagtttagatggaactctcaaatcccgaaaacgaagaaaaatgtctaaaaagctgccccctgtcatcataaagtatattattattaatagatttagagggagaaaaaatatgcttgtgaagctaggaaaaatagactctaaagaaaaacaagtaatattaacagaagaaaaaatggaactatataaaaagcttgcacctttgaaggacttttggccaaaagttcccgactcccctgcaaccaaatatcccatttatccactaacaccaaagaaaagtcacagaagaaagtcaaaacataaatctgctaagaaaaaaactggtaaacaacaaaggacaaataatgaaaatattaaaagaactttgtctttcaggaaaaaacggtcacatgctattctttctcctccctcaccatcttacaatgctgaaaccgaagattgtgacctgaattatagtgatgttatgtctaaactaggttttctttctgagagaagcacaagtcccataaattcttctccacctcgctgctggtctcccacagatccaagagctgaagaaatcatggctgctgcagaaaaagaggcaatgctttttaagggtcctaatgtatataagaagactgttaattctcgtataggaaaaactagtcgcgcaagagcacagattaagaaatcaaaagcaaagcttgctaatccctctatagttactaagaaaaggaacaaacgaaatcagacaaataaactagtagatgatggaaaaaagaaaccaagagcaaaacaaaaaacaaatgagaaaggtacatcgagaaagcatacaacacttaaggatgaaaaaataaaatctcagtctggtgctgaggttaagtttgtactgaaacaccagaatgtgtctgaatttgcaagtagttctggaggctctcaactactttttaaacagaaagatatgccactaatgggctctgctgtagatcatcccctttctgcttccctacccactggaattaatgcacaacagaagttatctggctgcttttcttctttcttagaaagcaagaagtctgtagatttgcagacattccccagttcacgagatgatttgcatccatcagttgtttgtaattctataggacctggagtctcaaaaattaatgttcaaaggcctcataatcaaagtgctatgtttactctaaaggaatcaacgttaattcaaaaaaatatatttgacctttccaatcatttatctcaggtagcacagaatacacagatatcttctggtatgtcctcaaagatagaagataatgcaaataatatacaaagaaactatttgtcatcaatcggaaagttaagtgaatatcgcaattccctagaatcaaagctggaccaagcatatacccctaattttttgcattgcaaagacagtcagcagcagattgtgtgcatagcggaacagtcaaagcacagtgaaacttgttctccgggaaatacagcttcagaggaaagccaaatgcctaataattgctttgtaacttccttgagaagtccaatcaaacaaatagcatgggagcaaaagcaaaggggctttattttagatatgtcaaattttaaacctgaaagagtaaaaccgaggtcgttatcagaagcaatttcacaaaccaaagcactttctcagtgtaaaaatcgaaatgtgtcaacaccttcagcatttggtgaaggacagtctggactggcagttctaaaagaattgttacaaaaaagacagcagaaagcacaaaatgcaaatactacacaagacccattatccaataaacatcaaccaaataaaaatatttctggttcccttgagcataacaaagcaaataaacggacacgatcggtaacgtccccaagaaaacctcgaactcccagaagtacaaaacaaaaagaaaaaatccccaaacttctcaaagtagactctttaaatttacaaaactctagccagttggataactctgtatcagatgatagtcccatctttttttcagatccaggctttgaaagttgttactcacttgaagatagtttatctcctgaacataattataattttgatattaacacaataggtcagactggattttgtagcttttattctggaagtcagtttgtcccagctgatcagaatttgcctcagaagttcctaagtgatgctgttcaggatctttttccaggacaagctatagaaaaaaatgagtttttaagtcatgacaaccagaaatgtgatgaagacaagcatcataccacagactcagcctcatggattagatctggtactttaagtcctgaaatttttgagaagtcaaccatagatagcaatgagaatcgtcgccacaaccagtggaaaaatagctttcatcctctaacaactcggtctaactcaataatggattctttctgtgttcagcaggcagaagactgtctaagtgaaaaatctagattgaataggagttcagtaagcaaagaagtgtttcttagcctcccacagccaaacaattcagactggattcaaggtcacaccagaaaagaaatgggacagtctcttgactcagccaatacctcttttactgcaatactctcctcccctgatggtgaacttgtagacgtggcctgtgaagatttagaactgtatgtttcaagaaacaatgatatgttgacaccaactcctgatagttcaccaagatctactagctctccttcacaatctaaaaatggcagcttcacccctcgaactgctaacattctgaaaccacttatgtcccccccaagtagggaagaaattatggcaactttgttggatcatgacctgtctgagactatttaccaggaaccattttgcagtaatccttctgatgtaccagaaaagcccagggagattggtggacggctcctcatggtagaaactcgacttgcaaatgatctggctgagtttgagggagacttttccttggaaggacttcgtctttggaaaacagcattctcagcaatgactcagaatccaaggccagggtcaccccttcgcagtggccaaggagttgtcaataaagggtcaagtaatagccctaagatggttgaagataaaaaaattgtgattatgccttgcaaatgtgccccaagtcgacaactggttcaagtgtggcttcaagccaaagaagaatacgaacgttccaagaaactgcctaaaaccaagccaactggagttgtaaaatctgctgagaactttagctcttcagttaacccagatgacaaacctgtagtgcctccaaaaatggatgtaagtccatgtatactccccactacagcacataccaaggaggatgttgataattctcagattgctttacaagcaccaaccacgggatgtagtcaaactgcaagtgaaagtcagatgctgccaccagttgcctctgcaagtgatcccgaaaaagatgaagatgatgatgataactattacattagttatagctcccctgattctccagtaattcccccttggcaacaaccaatatccccagattccaaagcattaaatggagatgatagaccctcatcaccagtagaggagctgccttcattggcttttgagaacttcttaaagccaataaaagatggtatacaaaaaagcccctgcagtgagcctcaagagcctctagtgatatctccaattaatactagggcaagaactgggaaatgtgaatcactttgctttcatagtacaccaatcatacagagaaaacttctggaaaggcttcctgaagcacctggccttagcccattatcaacagaaccaaaaacacagaagttgagtaataagaaaggaagtaatactgacactcttagaagagtactgttaacacaagcaaagaatcaatttgcagcagtaaataccccacagaaagaaacttctcagattgatggaccatctttaaacaatacttacggtttcaaagtcagcatacaaaacttacaggaggcaaaagctttacatgagatacaaaatcttaccctaatcagtgtggagttgcatgctcgaactagacgagacttagaaccggatcctgaatttgacccaatctgtgctctgttctactgcatctcatctgacactccactgccagatacagaaaaaacagaactcacaggtgtaatagtgattgataaagacaagacagttttcagtcaagatatcagatatcagactccattacttattagatctggaattacaggactcgaagtcacctatgctgctgatgagaaggcactttttcatgaaattgcaaatataataaagaggtatgatcctgatattctgctaggatatgagattcagatgcattcctggggttacctcttacaaagggctgccgctttaagtattgacttatgtcggatgatctctcgggtgccagatgacaaaattgagaacagatttgcagctgaaagagatgagtatggatcatatacaatgagtgagataaatattgttggccgaattacactaaatctttggagaatcatgagaaatgaggtggctctaactaactacacctttgaaaatgtgagctttcatgttcttcatcagcgttttcccctctttacctttcgagtcttgtcagactggtttgataacaagacagatctatacagatggaaaatggttgatcattatgttagccgtgtccgtggaaatctccaaatgttagaacagctggacctgattgggaaaaccagtgagatggctagactttttggcattcagtttttacatgtactgacaaggggttcacagtaccgtgtggaatcaatgatgttgcgtattgctaaaccaatgaactatattcctgtgacacctagtgttcagcaaagatcccagatgagagccccacagtgtgttcctctaattatggagcctgaatcccgcttctatagcaactctgttctcgttttggatttccaatcactttatccttctattgtgattgcatataactactgcttttccacctgccttggccatgtggagaacttgggaaagtatgatgagttcaaatttggctgtacctctctgagagtacctccagatttactttaccaagttaggcatgatatcacagtgtcccccaatggagtagcttttgtcaagattgctaataaatgtaggccggaggggatggcttag

SEQ ID NO: 26147 - DNA, 4581 bp, Homo sapiens
  source 1..4581: mol_type = unassigned DNA
ggtccgtgaggcgcgggcggcggcgaccgcggcgccagtgagggggccctggggcccgggcggctccgggccggggccccgccgcgggacggaccatgctacgctccactggcttcttccgggccattgactgcccctattggtctggggcgcccggggggccctgccggcggccctactgccacttccggcaccgcggggcccggggctccggcgcgcccggtgacggcggagaggcgccccccgcagcagggctgggttacgacccctacaaccctgagctgcccaagccccccgcgcagagggagaatggcaccctgggcctgggggaggagccgcgcccggatgtgctggagttggagctggtcaaccaggccatcgaggccgtgcgcagtgaggtggagctggagcagcggcgctaccgggagctgctggagacgacccgtgagcaccgctccgccgaggcccccgccctggcgccccgcggccccaacgccagccccactgtgggcccggacgaggatgccttcccactggccttcgactacagccccggcagccacggcctattaagccctgatgccggctaccagcccaccccactggccgcccctgccgagccgggcagcaagtactcgctggcgtccctggacaggggtcagggcagaggtggagggggtggcggtgccctggaatacgtccccaaggctgtgagccagccccggcggcacagccgccccgttcccagtggcaagtacgtggtggacaactccaggccacccacagacctggagtatgaccctctctccaactactcggcccggcacctcagcagggccagctcccgggatgagcgggccgccaagcggccccggggctcccgcggcagtgagccctacacacctgctcccaagaagctctgtgacccctttggcagttgcgatgcaaggttctcagactcagaagatgaggccgccacggtcccaggtaacgagcccaccacggccagcacccccaaagccagggccgaccctgagatcaaggccaccgggcagccaccctccaaagagggcctggaggccgaggggggcggcctgcgggagaccaaggagacggccgtgcagtgcgacgtgggggacctccagccgcccccagccaagcccgcctccccagcccaggtccagtcctcacaggatgggggctgccccaaggagggaaaacccaagaagaaaaaaaccggggccccacctgcccccagctgcaaagacggggcccaggggaaggacaagaccaaggacaagggccgagggcggcctgtggagaagccccgtgcggacaagaagggcccgcaggccagcagcccccggcgcaaggcagagcggccggaagggaccaagaagaagccatcttcggccactcctgtggccacctcagggaaagggaggcctgaccggccagcgcggcggccgagccccacaagcggggactcccgaccggcggccggcagaggcccaccccgccccctccagctgcccgacaggaagagcaccaaggccccgtcggggaagctagtggagcggaaagcccgctcactagacgagggcgcctcccaggacgcccccaagctgaagaagcgggccctgagccacgccgacctctttggggacgagagtgaggacgaggccgcagggccaggggtgccgagcgtgtggccctctgccctccccagcctcagctcggactcagactccgactcagactccagcctgggcttcccggaggcgcaggggccgcccaagcggctcaaggcctccccgcccccctcccccgccccatcctcctcctcctcctcctcctcctccacctccagcgcgggggcggatgtggactactcggccctggagaaggaggtggactttgactccgaccccatggaggagtgcctgcggatcttcaacgagtccaccagcgtcaagacggaggacagaggccggctggcccggcagccccccaaggaagagaagagtgaggagaaggggctttcgggtctgaccactctgttccccgggcagaagaggaggatctcccacctttccaagcaaggccaggaggtggagcccccgaggaggggtcccgcggtgcccccggcccggcccccgacggcgcaggaggtgtgctacctgcgggcccagcaggcgcagagggcatcggcgagcttgctgcaggcccccgccaggctggcagagaagtcgccctccgtccacatttccgcccctggcgagaagaggaggatcgcccacatccccaacccccgcctggctgcagcccccacaggtgccaagaggacccttgcggccagcggcagccagtcctccaacggccctgagccaggtggccagcagctgaaaacacgcacattgtcggggatggcgtccaagactaccaccaccatcatccctaagcgaatcgcccacagtccatccttacagagtttaaagaaacccattatccccaaagagtttgggggcaaagtccccaccgtcatccgccagcgctatctcaacctgttcatcgaggagtgtctcaagttctgtacctccaaccaggaggccatagagaaggcactgaacgaggagaaggtggcctatgaccgcagccccagcaagaacatctacctgaatgtggccgtgaacaccctcaagaagctcaggggcctggcccccagcgctgtgcccggcctcagcaaaaccagtggccgcagggttgtgtcccacgaggtggtgttggggggcaggttggccgccaagaccagcttctcgctcagccgtccaagcagcccccgggtggaggacctgaaaggggctgccctgtacagccgcctcagggagtacctgctcacccaggaccagctcaaggagaacggctaccccttcccgcacccagagcggcccgggggcgcaatcatcttcacagctgaggagaagaggcccaaggactcttcctgcaggacctgctgccgctgtggcaccgagtacctcgtgtcctcttcaggccgctgcatccgggacgaggagtgttattaccactggggacggctgcgccggaaccgggtggccggaggctgggagacccagtacatgtgctgctcggctgccgccggctctgtcggctgccaagtcgcaaagcaacacgtgcaggatggccggaaggagcgccttgagggcttcgtgaagacctttgagaaagagctctcaggagacacccacccggggatctacgccctggactgcgagatgtcctacaccacatatggcctggagctgacgcgcgtcacggtggtcgacacggacgtgcacgtggtttatgacaccttcgtgaagcctgacaacgagatcgtggactacaacaccaggttttcgggggtgacggaggctgaccttgccgacacaagtgtcacgctgcgtgacgtccaggccgttctgctgagcatgttcagcgctgacaccatcctcatcggacacagcctggagagcgacctcctggccctgaaggtcatccacagcaccgtggtggacacgtctgtgctcttcccccaccgcctgggcctcccctacaagcggtccctgcggaacctcatggccgactacctcagacagatcatccaggacaatgtggatgggcacagctccagcgaggacgccggcgcctgcatgcacctggtgatctggaaggttcgagaagacgccaagaccaagcgatgacgcctgcccgcctcccacccgcctctcctgccgtcccgctggtccttagccccatgcctcttccaaaacagtgcaataaatctccggtaacccgtccacctggccgaggcagcccagagcagcgggatgagctggcggccagagaacgcccagcccagcccacccccgctcacgtcctgccgcacccctccgccggtccccaccctctgccccccagccctctggcgtctctagaaactgctgctgatggagaccaggacagagcccgcccccacccggcccgcagcccctcctgcccctcctgccaggccctccctcccgggtggtggccggcacctctgctcctcacgtgggtcgcggggcgggcttgtcccaggtttgtttgagacagtctttttttattttgtattgttatttttattatttttaatttaaacctgatgacttgcacagcatctttcccaccgggaagagcgggcctgctgccttccctcctgcggggtgggggtgggacagaccccagtgggggccagggccacactcagcgcagtgtgggctggacccgcctctgtgctccaggggctggccggtcttcgggggcgccggcttccaccactcgccgccccacccctgcactccgtgacctctgagaacccagctggcccctcgttagccccagggtctgccgtctagagggagcccaccggcctccggacactgtcttcccgctagagccccgtcctcctctgcggggctctccggacccccttccccctcacctccaggcagggacagaataaatgtttgtatggattttaga

SEQ ID NO: 26148 - DNA, 4348 bp, Homo sapiens
  source 1..4348: mol_type = unassigned DNA
atgctgccttccagcaccaggctgggttacgacccctacaaccctgagctgcccaagccccccgcgcagagggagaatggcaccctgggcctgggggaggagccgcgcccggatgtgctggagttggagctggtcaaccaggccatcgaggccgtgcgcagtgaggtggagctggagcagcggcgctaccgggagctgctggagacgacccgtgagcaccgctccgccgaggcccccgccctggcgccccgcggccccaacgccagccccactgtgggcccggacgaggatgccttcccactggccttcgactacagccccggcagccacggcctattaagccctgatgccggctaccagcccaccccactggccgcccctgccgagccgggcagcaagtactcgctggcgtccctggacaggggtcagggcagaggtggagggggtggcggtgccctggaatacgtccccaaggctgtgagccagccccggcggcacagccgccccgttcccagtggcaagtacgtggtggacaactccaggccacccacagacctggagtatgaccctctctccaactactcggcccggcacctcagcagggccagctcccgggatgagcgggccgccaagcggccccggggctcccgcggcagtgagccctacacacctgctcccaagaagctctgtgacccctttggcagttgcgatgcaaggttctcagactcagaagatgaggccgccacggtcccaggtaacgagcccaccacggccagcacccccaaagccagggccgaccctgagatcaaggccaccgggcagccaccctccaaagagggcctggaggccgaggggggcggcctgcgggagaccaaggagacggccgtgcagtgcgacgtgggggacctccagccgcccccagccaagcccgcctccccagcccaggtccagtcctcacaggatgggggctgccccaaggagggaaaacccaagaagaaaaaaaccggggccccacctgcccccagctgcaaagacggggcccaggggaaggacaagaccaaggacaagggccgagggcggcctgtggagaagccccgtgcggacaagaagggcccgcaggccagcagcccccggcgcaaggcagagcggccggaagggaccaagaagaagccatcttcggccactcctgtggccacctcagggaaagggaggcctgaccggccagcgcggcggccgagccccacaagcggggactcccgaccggcggccggcagaggcccaccccgccccctccagctgcccgacaggaagagcaccaaggccccgtcggggaagctagtggagcggaaagcccgctcactagacgagggcgcctcccaggacgcccccaagctgaagaagcgggccctgagccacgccgacctctttggggacgagagtgaggacgaggccgcagggccaggggtgccgagcgtgtggccctctgccctccccagcctcagctcggactcagactccgactcagactccagcctgggcttcccggaggcgcaggggccgcccaagcggctcaaggcctccccgcccccctcccccgccccatcctcctcctcctcctcctcctcctccacctccagcgcgggggcggatgtggactactcggccctggagaaggaggtggactttgactccgaccccatggaggagtgcctgcggatcttcaacgagtccaccagcgtcaagacggaggacagaggccggctggcccggcagccccccaaggaagagaagagtgaggagaaggggctttcgggtctgaccactctgttccccgggcagaagaggaggatctcccacctttccaagcaaggccaggaggtggagcccccgaggaggggtcccgcggtgcccccggcccggcccccgacggcgcaggaggtgtgctacctgcgggcccagcaggcgcagagggcatcggcgagcttgctgcaggcccccgccaggctggcagagaagtcgccctccgtccacatttccgcccctggcgagaagaggaggatcgcccacatccccaacccccgcctggctgcagcccccacaggtgccaagaggacccttgcggccagcggcagccagtcctccaacggccctgagccaggtggccagcagctgaaaacacgcacattgtcggggatggcgtccaagactaccaccaccatcatccctaagcgaatcgcccacagtccatccttacagagtttaaagaaacccattatccccaaagagtttgggggcaaagtccccaccgtcatccgccagcgctatctcaacctgttcatcgaggagtgtctcaagttctgtacctccaaccaggaggccatagagaaggcactgaacgaggagaaggtggcctatgaccgcagccccagcaagaacatctacctgaatgtggccgtgaacaccctcaagaagctcaggggcctggcccccagcgctgtgcccggcctcagcaaaaccagtggccgcagggttgtgtcccacgaggtggtgttggggggcaggttggccgccaagaccagcttctcgctcagccgtccaagcagcccccgggtggaggacctgaaaggggctgccctgtacagccgcctcagggagtacctgctcacccaggaccagctcaaggagaacggctaccccttcccgcacccagagcggcccgggggcgcaatcatcttcacagctgaggagaagaggcccaaggactcttcctgcaggacctgctgccgctgtggcaccgagtacctcgtgtcctcttcaggccgctgcatccgggacgaggagtgttattaccactggggacggctgcgccggaaccgggtggccggaggctgggagacccagtacatgtgctgctcggctgccgccggctctgtcggctgccaagtcgcaaagcaacacgtgcaggatggccggaaggagcgccttgagggcttcgtgaagacctttgagaaagagctctcaggagacacccacccggggatctacgccctggactgcgagatgtcctacaccacatatggcctggagctgacgcgcgtcacggtggtcgacacggacgtgcacgtggtttatgacaccttcgtgaagcctgacaacgagatcgtggactacaacaccaggttttcgggggtgacggaggctgaccttgccgacacaagtgtcacgctgcgtgacgtccaggccgttctgctgagcatgttcagcgctgacaccatcctcatcggacacagcctggagagcgacctcctggccctgaaggtcatccacagcaccgtggtggacacgtctgtgctcttcccccaccgcctgggcctcccctacaagcggtccctgcggaacctcatggccgactacctcagacagatcatccaggacaatgtggatgggcacagctccagcgaggacgccggcgcctgcatgcacctggtgatctggaaggttcgagaagacgccaagaccaagcgatgacgcctgcccgcctcccacccgcctctcctgccgtcccgctggtccttagccccatgcctcttccaaaacagtgcaataaatctccggtaacccgtccacctggccgaggcagcccagagcagcgggatgagctggcggccagagaacgcccagcccagcccacccccgctcacgtcctgccgcacccctccgccggtccccaccctctgccccccagccctctggcgtctctagaaactgctgctgatggagaccaggacagagcccgcccccacccggcccgcagcccctcctgcccctcctgccaggccctccctcccgggtggtggccggcacctctgctcctcacgtgggtcgcggggcgggcttgtcccaggtttgtttgagacagtctttttttattttgtattgttatttttattatttttaatttaaacctgatgacttgcacagcatctttcccaccgggaagagcgggcctgctgccttccctcctgcggggtgggggtgggacagaccccagtgggggccagggccacactcagcgcagtgtgggctggacccgcctctgtgctccaggggctggccggtcttcgggggcgccggcttccaccactcgccgccccacccctgcactccgtgacctctgagaacccagctggcccctcgttagccccagggtctgccgtctagagggagcccaccggcctccggacactgtcttcccgctagagccccgtcctcctctgcggggctctccggacccccttccccctcacctccaggcagggacagaataaatgtttgtatggattttaga

SEQ ID NO: 26149 - DNA, 1801 bp, Homo sapiens
  source 1..1801: mol_type = unassigned DNA
aatgagcaggtgggggcacccgagacccttcggtcctctgtccgggagccagggcctttccctcagacatcgacgccttgggcttggggtcagaacacgtggcagaggcctggaccaccccaccggtgacgtgtcctcagcggcctccgcagcctgacctgtgtcctctgcctcgatggacttgcctgaaggcagctagagcctggtgctccgccacgtggtgatgggcagccactcgccctgtgcccacaccccctgtgccccgccagcccccacaggtgccaagaggacccttgcggccagcggcagccagtcctccaacggccctgagccaggtggccagcagctgaaaacacgcacattgtcggggatggcgtccaagactaccaccaccatcatccctaagcgaatcgcccacagtccatccttacagagtttaaagaaacccattatccccaaagagtttgggggcaaagtccccaccgtcatccgccagcgctatctcaacctgttcatcgaggagtgtctcaagttctgtacctccaaccaggaggccatagagaaggcactgaacgaggagaaggtggcctatgaccgcagccccagcaagaacatctacctgaatgtggccgtgaacaccctcaagaagctcaggggcctggcccccagcgctgtgcccggcctcagcaaaaccagtggccgcagggttgtgtcccacgaggtggtgttggggggcaggttggccgccaagaccagcttctcgctcagccgtccaagcagcccccgggtggaggacctgaaaggggctgccctgtacagccgcctcagggagtacctgctcacccaggaccagctcaaggagaacggctaccccttcccgcacccagagcggcccgggggcgcaatcatcttcacagctgaggagaagaggcccaaggactcttcctgcaggacctgctgccgctgtggcaccgagtacctcgtgtcctcttcaggccgctgcatccgggacgaggagtgttattaccactggggacggctgcgccggaaccgggtggccggaggctgggagacccagtacatgtgctgctcggctgccgccggctctgtcggctgccaagtcgcaaagcaacacgtgcaggatggccggaaggagcgccttgagggcttcgtgaagacctttgagaaagagctctcaggagacacccacccggggatctacgccctggactgcgagatgtcctacaccacatatggcctggagctgacgcgcgtcacggtggtcgacacggacgtgcacgtggtttatgacaccttcgtgaagcctgacaacgagatcgtggactacaacaccaggttttcgggggtgacggaggctgaccttgccgacacaagtgtcacgctgcgtgacgtccaggccgttctgctgagcatgttcagcgctgacaccatcctcatcggacacagcctggagagcgacctcctggccctgaaggtcatccacagcaccgtggtggacacgtctgtgctcttcccccaccgcctgggcctcccctacaagcggtccctgcggaacctcatggccgactacctcagacagatcatccaggacaatgtggatgggcacagctccagcgaggacgccggcgcctgcatgcacctggtgatctggaaggttcgagaagacgccaagaccaagcgatgacgcctgcccgcctcccacccgcctctcctgccgtcccgctggtccttagccccatgcctcttccaaaacagtgcaataaatctccggtaacccgtc

SEQ ID NO: 26150 - DNA, 1161 bp, Homo sapiens
  source 1..1161: mol_type = unassigned DNA
gttgagggcgagccggcgcaccgtacgctgggacgtgtggtttcagctcgtgcgcctccccgtgggtttgcgacgtttagcgactattgcgcctgcgccagcgccggctgcgagactggggccgtggctgctggtcccgggtgatgctaggcggctccctgggctccaggctgttgcggggtgtaggtgggagtcacggacggttcggggcccgaggtgtccgcgaaggtggcgcagccatggcggcaggggagagcatggctcagcggatggtctgggtggacctggagatgacaggattggacattgagaaggaccagattattgagatggcctgtctgataactgactctgatctcaacattttggctgaaggtcctaacctgattataaaacaaccagatgagttgctggacagcatgtcagattggtgtaaggagcatcacgggaagtctggccttaccaaggcagtgaaggagagtacaattacattgcagcaggcagagtatgaatttctgtcctttgtacgacagcagactcctccagggctctgtccacttgcaggaaattcagttcatgaagataagaagtttcttgacaaatacatgccccagttcatgaaacatcttcattatagaataattgatgtgagcactgttaaagaactgtgcagacgctggtatccagaagaatatgaatttgcaccaaagaaggctgcttctcatagggcacttgatgacattagtgaaagcatcaaagagcttcagttttaccgaaataacatcttcaagaaaaaaatagatgaaaagaagaggaaaattatagaaaatggggaaaatgagaagaccgtgagttgatgccagttatcatgctgccactacatcgttatctggaggcaacttctggtggtttttttttctcacgctgatggcttggcagagcaccttcggttaacttgcatctccagattgattactcaagcagacagcacacgaaatactatttttctcctaatatgctgtttccattatgacacagcagctcctttgtaagtaccaggtcatgtccatcccttggtacatatatgcatttgcttttaaaccatttcttttgtttaaataaataaataagtaaataaagctagttctattgaaatgcaaa

SEQ ID NO: 26151 - DNA, 1753 bp, Homo sapiens
  source 1..1753: mol_type = unassigned DNA
ggtgggtgtgtttcggcctggcctgggcaggcgcttgtgctgccagggcgccgggcccggggaggccggggtctcgggtggccgccggcccaggcgctggacggcagcaggatggggaaggcgaaggtccccgcctccaagcgcgccccgagcagccccgtggctaagccgggtcctgtcaagacgctcactcggaagaaaaacaagaagaaaaaaaggttttggaaaagcaaggcgcgggaagtaagcaagaagccagcaagcggccccggtgctgtggtgcgacctccaaaggcaccagaagacttttctcaaaactggaaggcgctgcaagaggttccaagatggacaggagggcgccagtacctcgcaccaaggccagtggaacagagcacaataagaaaggaaccaaggaaaggacaaatggtgatattgttccagaacgaggggacatcgagcataagaagcggaaagctaaggaggcagccccagccccacccaccgagagaagagcttgaagttgttcagaaggaagtggcagagatgctgaagggcagaattctagtggggcacgctctgcataatgacctaaaggtactatttcttgatcatccaaaaaagaagattcgggacacacagaaatataaacctttcaagagtcaagtaaagagtggaaggccgtctctgagactactttcagagaagatccttgggctccaggtccagcaggcggagcactgttcaattcaggatgcccaggcagcaatgaggctgtacgtcatggtgaagaaggagtgggagagcatggcccgagacaggcgccccctgctgactgctccagaccactgcagtgacgacgcctagcagtcctgccctgctgctgctgccgccccgctacagaggcaatgtgaccagtcacagggacagatcacatctccccagagtggcaactctggtgaaaccttttcagaatcatggcagaggggcgtggcgtggtgctactgagaaggtcctccttcctcttgactttgtggtctgaaacctggtcttactgtccatgtgtgtttgggcccggatggtcagggtggggagcagggacggccatgggcacgcctggccacgctttaccgactgctgaccccctgggccaggtgaggttggggcctgtgggccgccagtccatacggtgctgtcactgcccatcttcggtgacaccctggggtgaggtgctcagcaccttcctctcgaggagccacattttcctcctttgtgttaggggacataacaagctctgctgggcttgagggacccagaccaggtgtctgcagtcagctcctgagacacagctggccggcacaacaggtgttacatcaggggtttcctgtggccgtttgaactttgagcatttatctaaattaaattggcccagggttggctggtgggtcacccagcagaggcttctccccatagcacgaggatgtgttgcctgggcacggtgactgcggttattcctggaggtcggcagacatgccaaccttgggctatttgagctggagaagctatgtgatgctagccggtggctttctgggctaggccccagtttgaggctcccctgggaactagagccaggaacagccagtggcactgacaaggggacggagtccaaggcgttattgggccacctgacagctggacagaaaaggggcagacacaccgaggatgcgatttaaaataaatgcagatgtttacttgg

SEQ ID NO: 26152 - DNA, 2360 bp, Homo sapiens
  source 1..2360: mol_type = unassigned DNA
gcgcttccggggactggagcgtgcgtgctgaggtatgcgcaacgcgtgcggggtctcttccggagtcttttcctggacggggtccctgcggtgggtgtgtttcggcctggcctgggcaggcgcttgtgctgccagggcgccgggcccggggaggccggggtctcgggtggccgccggcccaggcgctggacggcagcaggatggggaaggcgaaggtccccgcctccaagcgcgccccgagcagccccgtggctaagccgggtcctgtcaagacgctcactcggaagaaaaacaagaagaaaaaaaggttttggaaaagcaaggcgcgggaagtaagcaagaagccagcaagcggccccggtgctgtggtgcgacctccaaaggcaccagaagacttttctcaaaactggaaggcgctgcaagagtggctgctgaaacaaaaatctcaggccccagaaaagcctcttgtcatctctcagatgggttccaaaaagaagcccaaaattatccagcaaaacaaaaaagagacctcgcctcaagtgaagggagaggagatgccggcaggaaaagaccaggaggccagcaggggctctgttccttcaggttccaagatggacaggagggcgccagtacctcgcaccaaggccagtggaacagagcacaataagaaaggaaccaaggaaaggacaaatggtgatattgttccagaacgaggggacatcgagcataagaagcggaaagctaaggaggcagccccagccccacccaccgaggaagacatctggtttgacgacgtggacccagcggatatcgaagctgccataggtccagaggcggccaagatagcgaggaaacagttgggtcagagcgagggcagcgtcagcctcagcctcgtgaaagagcaggccttcggcggcctgacaagagccttagccttggactgtgagatggtgggcgtgggccctaagggggaggagagcatggccgcccgtgtgtccatcgtgaaccagtatgggaagtgcgtttatgacaagtacgtcaaaccaactgagcccgtgacggactataggacagcggtcagtgggattcggcctgagaacctcaagcagggagaagagcttgaagttgttcagaaggaagtggcagagatgctgaagggcagaattctagtggggcacgctctgcataatgacctaaaggtactatttcttgatcatccaaaaaagaagattcgggacacacagaaatataaacctttcaagagtcaagtaaagagtggaaggccgtctctgagactactttcagagaagatccttgggctccaggtccagcaggcggagcactgttcaattcaggatgcccaggcagcaatgaggctgtacgtcatggtgaagaaggagtgggagagcatggcccgagacaggcgccccctgctgactgctccagaccactgcagtgacgacgcctagcagtcctgccctgctgctgctgccgccccgctacagaggcaatgtgaccagtcacagggacagatcacatctccccagagtggcaactctggtgaaaccttttcagaatcatggcagaggggcgtggcgtggtgctactgagaaggtcctccttcctcttgactttgtggtctgaaacctggtcttactgtccatgtgtgtttgggcccggatggtcagggtggggagcagggacggccatgggcacgcctggccacgctttaccgactgctgaccccctgggccaggtgaggttggggcctgtgggccgccagtccatacggtgctgtcactgcccatcttcggtgacaccctggggtgaggtgctcagcaccttcctctcgaggagccacattttcctcctttgtgttaggggacataacaagctctgctgggcttgagggacccagaccaggtgtctgcagtcagctcctgagacacagctggccggcacaacaggtgttacatcaggggtttcctgtggccgtttgaactttgagcatttatctaaattaaattggcccagggttggctggtgggtcacccagcagaggcttctccccatagcacgaggatgtgttgcctgggcacggtgactgcggttattcctggaggtcggcagacatgccaaccttgggctatttgagctggagaagctatgtgatgctagccggtggctttctgggctaggccccagtttgaggctcccctgggaactagagccaggaacagccagtggcactgacaaggggacggagtccaaggcgttattgggccacctgacagctggacagaaaaggggcagacacaccgaggatgcgatttaaaataaatgcagatgtttacttggaa

SEQ ID NO: 26153 - DNA, 860 bp, Homo sapiens
  source 1..860: mol_type = unassigned DNA
atactctgcacagtatctcagtgcagacattcctgtcttaacacacaggaccagtcaaattcccgtgggcagccccagggttctgtgggatttcttgaacaccaactcttcttccttctcccaagaaagaaaagcaaaataagtgaatggaagggatgtgtgctatagggaaactttggagtgttttctaattcatccaagaaagtcagcccttcagttctttacctatcacagaacagtggctgctgaaacaaaaatctcaggccccagaaaagcctcttgtcatctctcagatgggttccaaaaagaagcccaaaattatccagcaaaacaaaaaagagacctcgcctcaagtgaagggagaggagatgccggcaggaaaagaccaggaggccagcaggggctctgttccttcaggttccaagatggacaggagggcgccagtacctcgcaccaaggccagtggaacagagcacaataagaaaggaaccaaggaaaggacaaatggtgatattgttccagaacgaggggacatcgagcataagaagcggaaagctaaggaggcagccccagccccacccaccgaggaagacatctggtttgacgacgtggacccagcggatatcgaagctgccataggtccagaggcggccaagatagcgaggaaacagttgggtcagagcgagggcagcgtcagcctcagcctcgtgaaagagcaggccttcggcggcctgacaagagccttagccttggactgtgagatggtgggcgtgggccctaagggggaggagagcatggccgcccgtgtgtccatcgtgaaccagtatgggaagtgcgtttatgacaagtacgtcaaacca

SEQ ID NO: 26154 - DNA, 2026 bp, Homo sapiens
  source 1..2026: mol_type = unassigned DNA
cccgtggctaagccgggtcctgtcaagacgctcactcggaagaaaaacaagaagaaaaaaaggttttggaaaagcaaggcgcgggaagtaagcaagaagccagcaagcggccccggtgctgtggtgcgacctccaaaggcaccagaagacttttctcaaaactggaaggcgctgcaagagtggctgctgaaacaaaaatctcaggccccagaaaagcctcttgtcatctctcagatgggttccaaaaagaagcccaaaattatccagcaaaacaaaaaagagacctcgcctcaagtgaagggagaggagatgccggcaggaaaagaccaggaggccagcaggggctctgttccttcaggttccaagatggacaggagggcgccagtacctcgcaccaaggccagtggaacagagcacaataagaaaggaaccaaggaaaggacaaatggtgatattgttccagaacgaggggacatcgagcataagaagcggaaagctaaggaggcagccccagccccacccaccgaggaagacatctggtttgacgacgtggacccagcggatatcgaagctgccataggtccagaggcggccaagatagcgaggaaacagttgggtcagagcgagggcagcgtcagcctcagcctcgtgaaagagcaggccttcggcggcctgacaagagccttagccttggactgtgagatggtgggcgtgggccctaagggggaggagagcatggccgcccgtgtgtccatcgtgaaccagtatgggaagtgcgtttatgacaagtacgtcaaaccaactgagcccgtgacggactataggacagcggtcagtgggattcggcctgagaacctcaagcagggagaagagcttgaagttgttcagaaggaagtggcagagatgctgaagggcagaattctagtggggcacgctctgcataatgacctaaagagtggaaggccgtctctgagactactttcagagaagatccttgggctccaggtccagcaggattcaggatgcccaggcagcaatgaggctgtacgtcatggtgaagaaggagtgggagagcatggcccgagacaggcgccccctgctgactgctccagaccactgcagtgacgacgcctagcagtcctgccctgctgctgctgccgccccgctacagaggcaatgtgaccagtcacagggacagatcacatctccccagagtggcaactctggtgaaaccttttcagaatcatggcagaggggcgtggcgtggtgctactgagaaggtcctccttcctcttgactttgtggtctgaaacctggtcttactgtccatgtgtgtttgggcccggatggtcagggtggggagcagggacggccatgggcacgcctggccacgctttaccgactgctgaccccctgggccaggtgaggttggggcctgtgggccgccagtccatacggtgctgtcactgcccatcttcggtgacaccctggggtgaggtgctcagcaccttcctctcgaggagccacattttcctcctttgtgttaggggacataacaagctctgctgggcttgagggacccagaccaggtgtctgcagtcagctcctgagacacagctggccggcacaacaggtgttacatcaggggtttcctgtggccgtttgaactttgagcatttatctaaattaaattggcccagggttggctggtgggtcacccagcagaggcttctccccatagcacgaggatgtgttgcctgggcacggtgactgcggttattcctggaggtcggcagacatgccaaccttgggctatttgagctggagaagctatgtgatgctagccggtggctttctgggctaggccccagtttgaggctcccctgggaactagagccaggaacagccagtggcactgacaaggggacggagtccaaggcgttattgggccacctgacagctggacagaaaaggggcagacacaccgaggatgcgatttaaaataaatgcagatgtttacttggaa

SEQ ID NO: 26155 - DNA, 833 bp, Homo sapiens
  source 1..833: mol_type = unassigned DNA
ttttcctggacggggtccctgcggtgggtgtgtttcggcctggcctgggcaggcgcttgtgctgccagggcgccgggcccggggaggccggggtctcgggtggccgccggcccaggcgctggacggcagcaggatggggaaggcgaaggtccccgcctccaagcgcgccccgagcagccccgtggctaagccgggtcctgtcaagacgctcactcggaagaaaaacaagaagaaaaaaaggttttggaaaagcaaggcgcgggaagtaagcaagaagccagcaagcggccccggtgctgtggtgcgacctccaaaggcaccagaagacttttctcaaaactggaaggcgctgcaagaggttccaagatggacaggagggcgccagtacctcgcaccaaggccagtggaacagagcacaataagaaaggaaccaaggaaaggacaaatggtgatattgttccagaacgaggggacatcgagcataagaagcggaaagctaaggaggcagccccagccccacccaccgagagaagagcttgaagttgttcagaaggaagtggcagagatgctgaagggcagaattctagtggggcacgctctgcataatgacctaaaggtactatttcttgatcatccaaaaaagaagattcgggacacacagaaatataaacctttcaagagtcaagtaaagagtggaaggccgtctctgagactactttcagagaagatccttgggctccaggtccagcaggcggagcactgttcaattcaggatgcccaggcagcaatgaggctgtacgtcatggtgaagaaggagtgggagagcatggccc

SEQ ID NO: 26156 - DNA, 1828 bp, Homo sapiens
  source 1..1828: mol_type = unassigned DNA
gcggccgcatgagccgcgcgcgtggggcgctgtgccgggcctgcctcgcgctggccgcggccctggccgcgctgctgttactgccgctgccgctgccccgcgcgcccgccccggcccggacccccgccccggccccgcgcgcgcccccgtcccggcccgctgcccccagcctgcggcctgacgacgtcttcatcgccgtcaagaccacccggaagaaccacgggccgcgcctgcggctgctgctgcgcacctggatctcccgggcccgccagcagacgtttatcttcaccgacggggacgaccctgagctcgagctccagggcggcgaccgtgtcatcaacaccaactgctcggcggtgcgcactcgtcaggccctctgctgcaagatgtccgtggagtatgacaagttcattgagtccgggcgcaagtggttttgccacgtggatgatgacaattatgtgaacgccaggagcctcctgcacctgctctccagcttctcacccagccaggacgtctacctggggcggcccagcctggaccaccccattgaggccaccgagagggtccagggtggcagaactgtgaccacggtcaagttctggtttgctactggtggggccgggttctgcctcagcagaggccttgccctcaagatgagcccatgggccagcctgggcagcttcatgagcacagctgagcaggtgcggctgccggatgactgcacagttggctacatcgtggaggggctcctgggcgcccgcctgctgcacagccccctcttccactctcacctggagaacctgcagaggctgccgcccgacaccctgctccagcaggttaccttgagccatgggggtcctgagaacccacataacgtggtgaacgtggctggaggcttcagcctgcatcaagaccccacacggtttaagtctatccattgtcttctgtacccagacacggactggtgtcccaggcagaaacagggcgccccgacctctcggtgacaccaaccaccccgacccagggctgcctggctctgtcccaggcgcggggaaccagagccccctatgggctcagtgggctccctcaggtgccacggccacaccagtgagatgcaggcacctggcagaccctctggctagcctgcagccccccctctcccagcccctggtgggctgcggtgatgggtgttttgggagaacgaagacagccaggctgatggccagggccgcagtgcccctccccccgacccagccccaaggttgatcccacgggaacaggcttccaccccagcacttgcgcacctgggagggagctgccatccgggctccattacctgttgctgaaggcgggtgctaggctggctgggtgtcaaggagcaggctccaggccaaggtcctggcccagccacggccattgcaagggctcagcctggcaggctttgtgggggacgccgccctctctgccgcaggctgggtgcacggccgggcaccacagtgggactcaggcccgggaaggtcatgttctcgaccagagctttgctcccagtccaggcgcctcattcggaggcctcttgactgggaccacagagatgttttctccgctctgacttgtggctcaggactactttctgggtcgtgctcctgccccactgtgcctgggcccataaacaacaggagccttttgttccgctgacctgcccatcccagcagacccacctccccgcctggtgccttccatggagggaaatgggacaggggccgtcatctcccctctgcctcctgctttgctgttgccgagcacgagtaaagcttttgttcttacttca

SEQ ID NO: 26157 - DNA, 1214 bp, Homo sapiens
  source 1..1214: mol_type = unassigned DNA
gttcttaaaggggccgccgcccacccacggctccggccaggttctccgctcgcagcgccgggggtcccggcggccgcatgagccgcgcgcccccgtcccggcccgctgcccccagcctgcggcctgacgacgtcttcatcgccgtcaagaccacccggaagaaccacgggccgcgcctgcggctgctgctgcgcacctggatctcccgggcccgccagcagacgtttatcttcaccgacggggacgaccctgagctcgagctccagggcggcgaccgtgtcatcaacaccaactgctcggcggtgcgcactcgtcaggccctctgctgcaagatgtccgtggagtatgacaagttcattgagtccgggcgcaagtggttttgccacgtggatgatgacaattatgtgaacgccaggagcctcctgcacctgctctccagcttctcacccagccaggacgtctacctggggcggcccagcctggaccaccccattgaggccaccgagagggtccagggtggcagaactgtgaccacggtcaagttctggtttgctactggtggggccgggttctgcctcagcagaggccttgccctcaagatgagcccatgggccagcctgggcagcttcatgagcacagctgagcaggtgcggctgccggatgactgcacagttggctacatcgtggaggggctcctgggcgcccgcctgctgcacagccccctcttccactctcacctggagaacctgcagaggctgccgcccgacaccctgctccagcaggttaccttgagccatgggggtcctgagaacccacataacgtggtgaacgtggctggaggcttcagcctgcatcaagaccccacacggtttaagtctatccattgtcttctgtacccagacacggactggtgtcccaggcagaaacagggcgccccgacctctcggtgacaccaaccaccccgacccagggctgcctggctctgtcccaggcgcggggaaccagagccccctatgggctcagtgggctccctcaggtgccacggccacaccagtgagatgcaggcacctggcagaccctctggctagcctgcagccccccctctcccagcccctggtgggctgcggtgatgggtgttttgggagaacgaagacagccaggctgatggccagggccgcagtgcccctccccccgacccagccccaaggttgatc

SEQ ID NO: 26158 - DNA, 5108 bp, Homo sapiens
  source 1..5108: mol_type = unassigned DNA
cttatcgcgactaaacggagtggcggcggcatttcctggtgtctgagcctggcgcggaggctatgggcagccaggaggtgctgggccacgcggcccggctggcctcctccggtctcctcctgcaggtgttgtttcggttgatcacctttgtcttgaatgcatttattcttcgcttcctgtcaaaggaaatcgttggcgtagtaaatgtaagactaacgctgctttactcaaccaccctcttcctggccagagaggccttccgcagagcatgtctcagtgggggcacccagcgagactggagccagaccctcaacctgctgtggctaacagtccccctgggtgtgttttggtccttattcctgggctggatctggttgcagctgcttgaagtgcctgatcctaatgttgtccctcactatgcaactggagtggtgctgtttggtctctcggcagtggtggagcttctaggagagcccttttgggtcttggcacaagcacatatgtttgtgaagctcaaggtgattgcagagagcctgtcggtaattcttaagagcgttctgacagcttttctcgtgctgtggttgcctcactggggattgtacattttctctttggcccagcttttctataccacagttctggtgctctgctatgttatttatttcacaaagttactgggttccccagaatcaaccaagcttcaaactcttcctgtctccagaataacagatctgttacccaatattacaagaaatggagcgtttataaactggaaagaggctaaactgacttggagttttttcaaacagtctttcttgaaacagattttgacagaaggcgagcgatatgtgatgacatttttgaatgtattgaactttggtgatcagggtgtgtatgatatagtgaataatcttggctcccttgtggccagattaattttccagccaatagaggaaagtttttatatattttttgctaaggtgctggagaggggaaaggatgccacacttcagaagcaggaggacgttgctgtggctgctgcagtcttggagtccctgctcaagctggccctgctggccggcctgaccatcactgtttttggctttgcctattctcagctggctctggatatctacggagggaccatgcttagctcaggatccggtcctgttttgctgcgttcctactgtctctatgttctcctgcttgccatcaatggagtgacagagtgtttcacatttgctgccatgagcaaagaggaggtcgacaggtacaattttgtgatgctggccctgtcctcctcattcctggtgttatcctatctcttgacccgttggtgtggcagcgtgggcttcatcttggccaactgctttaacatgggcattcggatcacgcagagcctttgcttcatccaccgctactaccgaaggagcccccacaggcccctggctggcctgcacctatcgccagtcctgctcgggacatttgccctcagtggtggggttactgctgtttcggaggtattcctctgctgtgagcagggctggccagccagactggcacacattgctgtgggggccttctgtctgggagcaactctcgggacagcattcctcacagagaccaagctgatccatttcctcaggactcagttaggtgtgcccagacgcactgacaaaatgacatgacttcagggaagcctggacacccgaggcacctggaccagctatgggtagttctgtgggtggaacacattctgtgtaagagccccactgagggctctgcagcggagtgacagcaaccccagagatgaggcaccagagagtgccactgcatgagacacctgtgaccattcgaagtctgaaatgcggggggggagtttcatttttaagtgaagaccaaaagccctttaaaaataatagttttttatcattttatagtaatcagcattttctcttttactaatatactcattccttttgcgtatgattggcctttggagctacatgctccaacaaactatatcttaattgttaactgttaataattatctggcccagaaaaagagatgcagtgattttacccttcacaggaatattgaacttcttctgtaaaagagagagagaaacctctctctctcatgcaccacatggaaacagagtgtggccctgaagttgtggctttctttgtgtcaaaactgtggtctgagtttttagagaaggaaaaatgctactcagtgagaaatccaagaaatgaaaccaggaaggttttcagatcacatttcccagagtgagttcgggagaatcttgcctgtcgtgatcacactgttccccgccgccccaggtcagcacatacttgacccagagtgggctctcaggatttgttgattgaagggtgggtgaaagctggctggagactcctggcctggccacctgcaagaggcggactttgaagaaaactgtgatccagttgagccactttgtccctgaggggaatgctgctttgcagctttctgtaacttctcacatgggaattgcactggtgacagataaggtttaacagatgtacttttttatcctcagaataagacaaggcaaactctatatggctagtattactgagtcaggtccctcccgttgacccattaattccagcattgatcaatacaaccaaattccagccccaggacaagagtggcaggcatgggggcctggtactccaggctacagtgtgagcccaggtgttctgcaccttgcagcctgcacactgcaggtgaaatcatgagcagtgttctggagtgtgaagtgtttttatttttttgttaatgtattaattccttttagatattaacccccctcagaactatatgcacaaactataacttggatgttaataatcctgtcactcagtgccccaaaccttctgtgtctacacctagagagagggccagtaagggcaactcctatcatgcattaaaatgcatgtatttaaatctgcttgcccagagccagtacccaggggctaaggattaagacctgtcagtacaccaagactggggcccagtcacctggcaggtttttatctactcagagggagaatgctttgcactaagtgggagaaaagcagctaaatgcaaggtgtcctgagcaattagaggacctccaaagcatggcctcagtcatgccttcatcgggcaaggtcaggccagctcagaaaaatggatggtcccatagggtcaagtggagcacacacggaaggcagtcctccttccctcccatgtcctttctctgtccctggcatccacagaaagggaccttcagtcctcatgagctgcttctctgcagctgctgatcaccctcccggaaccctgcacctatcccgtgcccacctgaccccagactcaagcatgatcctcattctacctgcctcggaatcacctggattgcaagtcagaacatggcttcccaggacccactccaggccttcagggtctgtgtctcccaggaggagggctctgagattggcttttctggcaagcccacgtggctttgatgccaccaaggttggcatgccccattgtcttccttcgtgacaggcccaggaccatcatgctcatgctcacagtgcctgttctctgctccaggaacagagctgctgctctacaagcagccttgtgactccggggtctctgggagcaggactccccaggcttgtgctctctcagcttgagagaggctctatgtctgaaggcagtgctcactctctcatccctcccctgctgttcgcccagtgctgctgtcagggccagctcctcttgaaagacagccagccgcaaaggcagcccagggcttcttccggtgtcctgcttccctgtatctagggagagttgtacatgtggctgcgtgttttcccaggactagccctgccgcctgggctgtcagcactttggcagcaggtcctctgtggttctctgcctctggtgcctccctaaagctcagctggacctgaccaggcctctggcatttcccctgctggaccccctagagccacagctgtgcctcagggagcttgcatacatgtgggccagcctgcctcactttacccaagtggatttggggagcagaaatcatacttttggctttcaataccacttatagtgaggctacttctccatggaaacaagtctctgaggcacaacctttatgaaaggaaggagcattcgttggtgagaagaacagtatcgctgacttcctgtgctcctctggccacaggtaactgttggtcacttcagatttggcttggggtctctcagtgaggagctgctgctgtgctgtttaatgcttacctgatggcaacttctggctctggaaccgctactctgccctgttcccagccacttcccaacctgattcaagcagggcccctccttcctcctgtctttatttatttatttattgagacagagtctcactctgtcgcccaggctggagtgcagtagcgcgatctcggctcactgcgagctctgcctcctgggttcaagcgattctcttgcctcagcctcctgagtagctggggctacaggcgcctgccaccacacccggctaatttttgtatttttagtagagacagggtttcaccatattggccaggctggtcttgaactcctgaccttgtgatccgcccgcctcagcctcccaaagtgctgggattacaggcgtgagccaccgctcctggcctattcttttcttttcagagacaaggtctcactctctcctctcgcccaggctggagtgcagtggtgtcatcatagctcattgcagcctcaaactcctgggctcaagcaatcctcccacctcagcctcctgagtagctgggatcacaggtgtgtgctacctcacccagctaatttctaatttttttttgtagagactggatctcactgttgccttgaactcctgggctcaagtgatcctcctgcctcagcctcccaaagtgctgggattccagaccagccattttttttccttaatcatgcattcctgttgctagtttcacatcagtcccctggtttaataagaaataaaatattttcttcacacttttgaaaa

SEQ ID NO: 26159 - DNA, 1800 bp, Homo sapiens
  source 1..1800: mol_type = unassigned DNA
actaaacggagtggcggcggcatttcctggtgtctgagcctggcgcggaggctatgggcagccaggaggtgctgggccacgcggcccggctggcctcctccggtctcctcctgcaggtgttgtttcggttgatcacctttgtcttgaatgcatttattcttcgcttcctgtcaaaggaaatcgttggcgtagtaaatgtaagagtccccctgggtgtgttttggtccttattcctgggctggatctggttgcagctgcttgaagtgcctgatcctaatgttgtccctcactatgcaactggagtggtgctgtttggtctctcggcagtggtggagcttctaggagagcccttttgggtcttggcacaagcacatatgtttgtgaagctcaaggtgattgcagagagcctgtcggtaattcttaagagcgttctgacagcttttctcgtgctgtggttgcctcactggggattgtacattttctctttggcccagcttttctataccacagttctggtgctctgctatgttatttatttcacaaagttactgggttccccagaatcaaccaagcttcaaactcttcctgtctccagaataacagatctgttacccaatattacaagaaatggagcgtttataaactggaaagaggctaaactgacttggagttttttcaaacagtctttcttgaaacagattttgacagaaggcgagcgatatgtgatgacatttttgaatgtattgaactttggtgatcagggtgtgtatgatatagtgaataatcttggctcccttgtggccagattaattttccagccaatagaggaaagtttttatatattttttgctaaggtgctggagaggggaaaggatgccacacttcagaagcaggaggacgttgctgtggctgctgcagtcttggagtccctgctcaagctggccctgctggccggcctgaccatcactgtttttggctttgcctattctcagctggctctggatatctacggagggaccatgcttagctcaggatccggtcctgttttgctgcgttcctactgtctctatgttctcctgcttgccatcaatggagtgacagagtgtttcacatttgctgccatgagcaaagaggaggtcgacaggtacaattttgtgatgctggccctgtcctcctcattcctggtgttatcctatctcttgacccgttggtgtggcagcgtgggcttcatcttggccaactgctttaacatgggcattcggatcacgcagagcctttgcttcatccaccgctactaccgaaggagcccccacaggcccctggctggcctgcacctatcgccagtcctgctcgggacatttgccctcagtggtggggttactgctgtttcggaggtattcctctgctgtgagcagggctggccagccagactggcacacattgctgtgggggccttctgtctgggagcaactctcgggacagcattcctcacagagaccaagctgatccatttcctcaggactcagttaggtgtgcccagacgcactgacaaaatgacatgacttcagggaagcctggacacccgaggcacctggaccagctatgggtagttctgtgggtggaacacattctgtgtaagagccccactgagggctctgcagcggagtgacagcaaccccagagatgaggcaccagagagtgccactgcatgagacacctgtgaccattcgaagtctgaaatgcggggggggagtttcatttttaagtgaagaccaaaagccctttaaaaataatagtttt

SEQ ID NO: 26160 - DNA, 4463 bp, Homo sapiens
  source 1..4463: mol_type = unassigned DNA
tccgccgccggaggagcaggtggctgccgtgcgggtctgggccccaggcttcctgtgtgcgcgctcgtcctctgctgtttcccgccggagctcgttgggcctccccggcccgcccggcccatggcccagacccccgacggcatctcctgtgagctccgaggcgagatcaccaggttcctgtggcccaaagaggtggagctgctgctgaaaacctggctacccggggagggtgctgtgcaaaaccatgtcctggcactgctacgatggagagcctacctgctgcacaccacctgcctcccgctgagggtggactgcacgttcagctacctggaggtccaggccatggcgctgcaggagacaccccctcaggtcacctttgagctggagtccctgcgtgagctggtcctggagtttcctggtgtggccgccctggaacagctggcccagcacgtggctgcagccatcaagaaggtcttccctcgctcgacccttgggaagctattccggaggcccacaccagcctccatgctggctcggctggagagaagcagcccctcggagtccactgacccctgcagcccctgtggtggcttcttggagacatacgaggctctgtgtgactacaatggcttccctttccgagaggagattcagtgggacgtggacaccatttaccatcgccagggctgccgccatttcagcctgggagacttcagccacctcggcagtcgggacctggccttgagtgtggctgccctgtcctacaacctgtggttccggtgcctctcctgtgtggacatgaagctgagccttgaggtctcagaacagattctgcacatgatgagtcagtcatcacacctggaggagctggtgctggagacctgcagcctgaggggagactttgtccgacgactggcccaggcgctggcgggacactcaagctctgggctgcgggagctcagcctcgcggggaacctgctggatgaccgaggcatgactgcactcagcagacacctcgagcgttgtccaggagccctgaggagactcagcctggcccagacagggttgacaccgcgaggaatgagggctctgggccgggcactggccaccaatgccgccttcgactccaccctgacccacctggacctttctgggaatcctggggcgctgggggcctccgaggacagtgggggcctctatagcttcctgagccgtcctaacgtactgtcgttcctgaatctcgcaggcaccgacactgccctggacactgtgagggggtgctccgtggggggatggatgaccggcagggcggactggagggcgggacggggagggctcggtccccccgcgggtgtagccaacagcctccccccgcagctcttcgcagcggtatcccgaggctgctgcaccagccttacccacctcgacgcttcgaggaacgtcttctcccgcacgaagtcccgcgccgcgccggccgcgctgcagctcttcctcagccgcgcgcggacgctgcggcacctgggcctggcgggctgcaagctgccgcccgacgcgctcagagcccttttggatggcctcgcgctcaacacgcacctccgcgacctgcacctggacctcagcgcttgcgagctgcgctcggccggcgcccaggtgatacaagacttagtgtgcgacgcaggcgctgtgagctccctggatctggcggataacggcttcggctcagacatggtgactctggtgctggccatcgggagaagccggtccctgagacatgtggcgcttggaaggaacttcaacgtccggtgcaaggagaccctggacgacgtcctgcaccggattgtccagctcatgcaggacgacgattgtcctcttcagtctctgtcggtggctgagtctcggctgaagctgggtgccagcgtcctactccgggccctagccaccaatcctaacctgaccgcgctggatatcagcggcaacgccatgggggacgcgggcgccaagttgctggccaaggcgctgcgggtcaactcgaggctccggtctgtggtctgggaccggaaccacacatctgctttgggtctgctggacgtggcgcaggcgctggagcagaaccacagcctgaaggccatgcctctgccactgaacgacgtggcccaggcgcagcgcagccgcccggaactgacagcacgtgcagtccatcagatccaagcctgtctcttgaggaacaaccgcgcagaccctgcctcttctgaccacacgacccgccttcagccacttggtctggtctcagacccctcagagcaggaagtgaatgaattgtgtcagtcggtgcaggagcatgtggagctgctgggctgtggggctgggccccagggtgaagccgctgtgcgccaggccgaggatgccatccaaaatgccaacttctctctcagcattctccccattctatatgaagctggaagctccccaagccatcactggcagcttgggcagaagctggagggccttctgagacaggtgggcgaggtctgccgccaggacatccaggacttcactcaggccacactggacacagcaaggagcctctgcccacagatgctgcagggatccagctggagggagcagctagagggggtcctggcaggctcgaggggcctcccggagctgctcccagagcagctgctgcaagatgccttcactaggctcagggacatgcggctatcaatcacggggaccttggcagagagcattgtggctcaggctttggcaggcctgagtgcagcccgggatcagctggtggagagtctggctcagcaggcaacagtgacaatgccccctgccctaccagcaccggatggaggtgagcccagcctccttgagcctggggaattggaaggtcttttcttccccgaggagaaggaagaggagaaggagaaggatgacagtcctccacagaaatggcctgagctcagccacggtcttcacctggtccccttcattcacagtgctgctgaggaagcggagccggagcccgagctggcggctccgggagaagatgcagagccgcaggcggggccgtccgcgcgcggctctccgagccctgccgcccctgggcccccggccggcccgctgccccgcatggacctgccactggcggggcagcccctgcgccatccgacccgggcccggccgcggccgcgccgccagcaccaccaccgcccgccgccggggggcccccaggtacccccagccttgccgcaggaagggaatgggctcagtgcccgcgtggacgagggcgtggaggaattcttctccaaaaggctgatccagcaggatcgcctctgggcccccgaggaggacccggccactgaggggggcgccactcctgtcccccgtacactgcgaaagaagctgggcaccctctttgccttcaagaagcctcgttcaacgcggggtccacggactgatctagagaccagccctggggcagctccccgaacccgaaaaactacatttggcgacctactgcggccgccaacccgtcccagccgtggtgaggagcttggtggggctgagggggacaccagcagccctgaccctgccggcaggagccgacctcgctacacaagagatagcaaggcctactcgatgatactgctgcctgccgaggaggaggcaacgctgggtgccagacccgacaagcggcggcccctggagcggggagaaacagaactggctccatcctttgaacagcgggtacaagtaatgctgcagaggataggcgtcagccgaggcagcgggggtgccgaaggcaagaggaagcaaagcaaagatggcgagatcaagaaagctggctcagatggtgacattatggacagttccacggaggcccctcccatctcgatcaagtcccgcacccactctgtgtctgctgacccttcctgcagacctggcccagggagccaggggcctgagtctgccacctggaagacactggggcagcagttgaatgcggagctcaggagccgtggttggggccaacaggatggtccaggccctccctcccctggtcaaagcccaagtccctgcagaaccagcccctccccagacagcctgggcctcccagaggacccttgcttgggccccagaaatgaagatggccagctgaggccgaggcctctctcggcagggcggcgagcagtgtctgtgcatgaggaccagctccaggcccctgctgaacggcccctgaggctgcagcgctcccccgtcctcaaacgcaggccaaaactcgaggcacctccatccccaagcctaggatctggccttggaaccgagcctctgcccccacagcccacagagccctccagccctgagcggagcccaccctccccagccacagaccaaagaggcggcggccccaatccctgatcctctcctctcctgccgcatgagattattttatt

SEQ ID NO: 26161 - DNA, 4378 bp, Homo sapiens
  source 1..4378: mol_type = unassigned DNA
tccgccgccggaggagcaggtggctgccgtgcgggtctgggccccaggcttcctgtgtgcgcgctcgtcctctgctgtttcccgccggagctcgttgggcctccccggcccgcccggcccatggcccagacccccgacggcatctcctgtgagctccgaggcgagatcaccaggttcctgtggcccaaagaggtggagctgctgctgaaaacctggctacccggggagggtgctgtgcaaaaccatgtcctggcactgctacgatggagagcctacctgctgcacaccacctgcctcccgctgagggtggactgcacgttcagctacctggaggtccaggccatggcgctgcaggagacaccccctcaggtcacctttgagctggagtccctgcgtgagctggtcctggagtttcctggtgtggccgccctggaacagctggcccagcacgtggctgcagccatcaagaaggtcttccctcgctcgacccttgggaagctattccggaggcccacaccagcctccatgctggctcggctggagagaagcagcccctcggagtccactgacccctgcagcccctgtggtggcttcttggagacatacgaggctctgtgtgactacaatggcttccctttccgagaggagattcagtgggacgtggacaccatttaccatcgccagggctgccgccatttcagcctgggagacttcagccacctcggcagtcgggacctggccttgagtgtggctgccctgtcctacaacctgtggttccggtgcctctcctgtgtggacatgaagctgagccttgaggtctcagaacagattctgcacatgatgagtcagtcatcacacctggaggagctggtgctggagacctgcagcctgaggggagactttgtccgacgactggcccaggcgctggcgggacactcaagctctgggctgcgggagctcagcctcgcggggaacctgctggatgaccgaggcatgactgcactcagcagacacctcgagcgttgtccaggagccctgaggagactcagcctggcccagacagggttgacaccgcgaggaatgagggctctgggccgggcactggccaccaatgccgccttcgactccaccctgacccacctggacctttctgggaatcctggggcgctgggggcctccgaggacagtgggggcctctatagcttcctgagccgtcctaacgtactgtcgttcctgaatctcgcaggcaccgacactgccctggacactgtgagggggtgctccgtggggggatggatgaccggcagggcggactggagggcgggacggggagggctcggtccccccgcgggtgtagccaacagcctccccccgcagctcttcgcagcggtatcccgaggctgctgcaccagccttacccacctcgacgcttcgaggaacgtcttctcccgcacgaagtcccgcgccgcgccggccgcgctgcagctcttcctcagccgcgcgcggacgctgcggcacctgggcctggcgggctgcaagctgccgcccgacgcgctcagagcccttttggatggcctcgcgctcaacacgcacctccgcgacctgcacctggacctcagcgcttgcgagctgcgctcggccggcgcccaggtgatacaagacttagtgtgcgacgcaggcgctgtgagctccctggatctggcggataacggcttcggctcagacatggtgactctggtgctggccatcgggagaagccggtccctgagacatgtggcgcttggaaggaacttcaacgtccggtgcaaggagaccctggacgacgtcctgcaccggattgtccagctcatgcaggacgacgattgtcctcttcagtctctgtcggtggctgagtctcggctgaagctgggtgccagcgtcctactccgggccctagccaccaatcctaacctgaccgcgctggatatcagcggcaacgccatgggggacgcgggcgccaagttgctggccaaggcgctgcgggtcaactcgaggctccggtctgtggtctgggaccggaaccacacatctgctttgggtctgctggacgtggcgcaggcgctggagcagaaccacagcctgaaggccatgcctctgccactgaacgacgtggcccaggcgcagcgcagccgcccggaactgacagcacgtgcagtccatcagatccaagcctgtctcttgaggaacaaccgcgcagaccctgcctcttctgaccacacgacccgccttcagccacttggtctggtctcagacccctcagagcaggaagtgaatgaattgtgtcagtcggtgcaggagcatgtggagctgctgggctgtggggctgggccccagggtgaagccgctgtgcgccaggccgaggatgccatccaaaatgccaacttctctctcagcattctccccattctatatgaagctggaagctccccaagccatcactggcagcttgggcagaagctggagggccttctgagacaggtgggcgaggtctgccgccaggacatccaggacttcactcaggccacactggacacagcaaggagcctctgcccacagatgctgcagggatccagctggagggagcagctagagggggtcctggcaggctcgaggggcctcccggagctgctcccagagcagctgctgcaagatgccttcactaggctcagggacatgcggctatcaatcacggggaccttggcagagagcattgtggctcaggctttggcaggcctgagtgcagcccgggatcagctggtggagagtctggctcagcaggcaacagtgacaatgccccctgccctaccagcaccggatggaggtgagcccagcctccttgagcctggggaattggaaggtcttttcttccccgaggagaaggaagaggagaaggagaaggatgacagtcctccacagaaatggcctgagctcagccacggtcttcacctggtccccttcattcacagtgctgctgaggaagcggagccggagcccgagctggcggctccgggagaagatgcagagccgcaggcggggccgtccgcgcgcggctctccgagccctgccgcccctgggcccccggccggcccgctgccccgcatggacctgccactggcggggcagcccctgcgccatccgacccgggcccggccgcggccgcgccgccagcaccaccaccgcccgccgccggggggcccccaggtacccccagccttgccgcaggaagggaatgggctcagtgcccgcgtggacgagggcgtggaggaattcttctccaaaaggctgatccagcaggatcgcctctgggcccccgaggaggacccggccactgaggggggcgccactcctgtcccccgtacactgcgaaagaagctgggcaccctctttgccttcaagaagcctcgttcaacgcggggtccacggactgatctagagaccagccctggggcagctccccgaacccgaaaaactacatttggcgacctactgcggccgccaacccgtcccagccgtggtgaggagcttggtggggctgagggggacaccagcagccctgaccctgccggcaggagccgacctcgctacacaagagatagcaaggcctactcgatgatactgctgcctgccgaggaggaggcaacgctgggtgccagacccgacaagcggcggcccctggagcggggagaaacagaactggctccatcctttgaacagcgggtacaagtaatgctgcagaggataggcgtcagccgaggcagcgggggtgccgaaggcaagaggaagcaaagcaaagatggcgagatcaagaaagctggctcagatggtgacattatggacagttccacggaggcccctcccatctcgatcaagtcccgcacccactctgtgtctgctgacccttcctgcagacctggcccagggagccaggggcctgagtctgccacctggaagacactggggcagcagttgaatgcggagctcaggagccgtggttggggccaacaggatggtccaggccctccctcccctggtcaaagcccaagtccctgcagaacccctccccagacagcctgggcctcccagaggacccttgcttgggccccagaaatgaagaacggcccctgaggctgcagcgctcccccgtcctcaaacgcaggccaaaactcgaggcacctccatccccaagcctaggatctggccttggaaccgagcctctgcccccacagcccacagagccctccagccctgagcggagcccaccctccccagccacagaccaaagaggcggcggccccaatccctgatcctctcctctcctgccgcatgagattattttatt

SEQ ID NO: 26162 - DNA, 4119 bp, Homo sapiens
  source 1..4119: mol_type = unassigned DNA
atggcccagacccccgacggcatctcctgtgagctccgaggcgagatcaccaggttcctgtggcccaaagaggtggagctgctgctgaaaacctggctacccggggagggtgctgtgcaaaaccatgtcctggcactgctacgatggagagcctacctgctgcacaccacctgcctcccgctgagggtggactgcacgttcagctacctggaggtccaggccatggcgctgcaggagacaccccctcaggtcacctttgagctggagtccctgcgtgagctggtcctggagtttcctggtgtggccgccctggaacagctggcccagcacgtggctgcagccatcaagaaggtcttccctcgctcgacccttgggaagctattccggaggcccacaccagcctccatgctggctcggctggagagaagcagcccctcggagtccactgacccctgcagcccctgtggtggcttcttggagacatacgaggctctgtgtgactacaatggcttccctttccgagaggagattcagtgggacgtggacaccatttaccatcgccagggctgccgccatttcagcctgggagacttcagccacctcggcagtcgggacctggccttgagtgtggctgccctgtcctacaacctgtggttccggtgcctctcctgtgtggacatgaagctgagccttgaggtctcagaacagattctgcacatgatgagtcagtcatcacacctggaggagctggtgctggagacctgcagcctgaggggagactttgtccgacgactggcccaggcgctggcgggacactcaagctctgggctgcgggagctcagcctcgcggggaacctgctggatgaccgaggcatgactgcactcagcagacacctcgagcgttgtccaggagccctgaggagactcagcctggcccagacagggttgacaccgcgaggaatgagggctctgggccgggcactggccaccaatgccgccttcgactccaccctgacccacctggacctttctgggaatcctggggcgctgggggcctccgaggacagtgggggcctctatagcttcctgagccgtcctaacgtactgtcgttcctgaatctcgcaggcaccgacactgccctggacactctcttcgcagcggtatcccgaggctgctgcaccagccttacccacctcgacgcttcgaggaacgtcttctcccgcacgaagtcccgcgccgcgccggccgcgctgcagctcttcctcagccgcgcgcggacgctgcggcacctgggcctggcgggctgcaagctgccgcccgacgcgctcagagcccttttggatggcctcgcgctcaacacgcacctccgcgacctgcacctggacctcagcgcttgcgagctgcgctcggccggcgcccaggtgatacaagacttagtgtgcgacgcaggcgctgtgagctccctggatctggcggataacggcttcggctcagacatggtgactctggtgctggccatcgggagaagccggtccctgagacatgtggcgcttggaaggaacttcaacgtccggtgcaaggagaccctggacgacgtcctgcaccggattgtccagctcatgcaggacgacgattgtcctcttcagtctctgtcggtggctgagtctcggctgaagctgggtgccagcgtcctactccgggccctagccaccaatcctaacctgaccgcgctggatatcagcggcaacgccatgggggacgcgggcgccaagttgctggccaaggcgctgcgggtcaactcgaggctccggtctgtggtctgggaccggaaccacacatctgctttgggtctgctggacgtggcgcaggcgctggagcagaaccacagcctgaaggccatgcctctgccactgaacgacgtggcccaggcgcagcgcagccgcccggaactgacagcacgtgcagtccatcagatccaagcctgtctcttgaggaacaaccgcgcagaccctgcctcttctgaccacacgacccgccttcagccacttggtctggtctcagacccctcagagcaggaagtgaatgaattgtgtcagtcggtgcaggagcatgtggagctgctgggctgtggggctgggccccagggtgaagccgctgtgcgccaggccgaggatgccatccaaaatgccaacttctctctcagcattctccccattctatatgaagctggaagctccccaagccatcactggcagcttgggcagaagctggagggccttctgagacaggtgggcgaggtctgccgccaggacatccaggacttcactcaggccacactggacacagcaaggagcctctgcccacagatgctgcagggatccagctggagggagcagctagagggggtcctggcaggctcgaggggcctcccggagctgctcccagagcagctgctgcaagatgccttcactaggctcagggacatgcggctatcaatcacggggaccttggcagagagcattgtggctcaggctttggcaggcctgagtgcagcccgggatcagctggtggagagtctggctcagcaggcaacagtgacaatgccccctgccctaccagcaccggatggaggtgagcccagcctccttgagcctggggaattggaaggtcttttcttccccgaggagaaggaagaggagaaggagaaggatgacagtcctccacagaaatggcctgagctcagccacggtcttcacctggtccccttcattcacagtgctgctgaggaagcggagccggagcccgagctggcggctccgggagaagatgcagagccgcaggcggggccgtccgcgcgcggctctccgagccctgccgcccctgggcccccggccggcccgctgccccgcatggacctgccactggcggggcagcccctgcgccatccgacccgggcccggccgcggccgcgccgccagcaccaccaccgcccgccgccggggggcccccaggtacccccagccttgccgcaggaagggaatgggctcagtgcccgcgtggacgagggcgtggaggaattcttctccaaaaggctgatccagcaggatcgcctctgggcccccgaggaggacccggccactgaggggggcgccactcctgtcccccgtacactgcgaaagaagctgggcaccctctttgccttcaagaagcctcgttcaacgcggggtccacggactgatctagagaccagccctggggcagctccccgaacccgaaaaactacatttggcgacctactgcggccgccaacccgtcccagccgtggtgaggagcttggtggggctgagggggacaccagcagccctgaccctgccggcaggagccgacctcgctacacaagagatagcaaggcctactcgatgatactgctgcctgccgaggaggaggcaacgctgggtgccagacccgacaagcggcggcccctggagcggggagaaacagaactggctccatcctttgaacagcgggtacaagtaatgctgcagaggataggcgtcagccgaggcagcgggggtgccgaaggcaagaggaagcaaagcaaagatggcgagatcaagaaagctggctcagatggtgacattatggacagttccacggaggcccctcccatctcgatcaagtcccgcacccactctgtgtctgctgacccttcctgcagacctggcccagggagccaggggcctgagtctgccacctggaagacactggggcagcagttgaatgcggagctcaggagccgtggttggggccaacaggatggtccaggccctccctcccctggtcaaagcccaagtccctgcagaaccagcccctccccagacagcctgggcctcccagaggacccttgcttgggccccagaaatgaagaacggcccctgaggctgcagcgctcccccgtcctcaaacgcaggccaaaactcgaggcacctccatccccaagcctaggatctggccttggaaccgagcctctgcccccacagcccacagagccctccagccctgagcggagcccaccctccccagccacagaccaaagaggcggcggccccaatccctga

SEQ ID NO: 26163 - DNA, 3038 bp, Homo sapiens
  source 1..3038: mol_type = unassigned DNA
cgcccgcggccgaggtggacggagcctcccggctcgctgctcccgccggcggagcgaggctgccctttcttcgcagcgtgatttattttcttctttttttctgaactcttcttccagggagaggctagtggtaacaggccgagctggatggatgggtatggggagaggggcaggacgttcagccctgggattctggccgaccctcgccttccttctctgcagcttccccgcagccacctccccgtgcaagatcctcaagtgcaactctgagttctggagcgccacgtcgggcagccacgccccagcctcagacgacacccccgagttctgtgcagccttgcgcagctacgccctgtgcacgcggcggacggcccgcacctgccggggtgacctggcctaccactcggccgtccatggcatagaggacctcatgagccagcacaactgctccaaggatggccccacctcgcagccacgcctgcgcacgctcccaccggccggagacagccaggagcgctcggacagccccgagatctgccattacgagaagagctttcacaagcactcggccacccccaactacacgcactgtggcctcttcggggacccacacctcaggactttcaccgaccgcttccagacctgcaaggtgcagggcgcctggccgctcatcgacaataattacctgaacgtgcaggtcaccaacacgcctgtgctgcccggctcagcggccactgccaccagcaagctcaccatcatcttcaagaacttccaggagtgtgtggaccagaaggtgtaccaggctgagatggacgagctcccggccgccttcgtggatggctctaagaacggtggggacaagcacggggccaacagcctgaagatcactgagaaggtgtcaggccagcacgtggagatccaggccaagtacatcggcaccaccatcgtggtgcgccaggtgggccgctacctgacctttgccgtccgcatgccagaggaagtggtcaatgctgtggaggactgggacagccagggtctctacctctgcctgcggggctgccccctcaaccagcagatcgacttccaggccttccacaccaatgctgagggcaccggtgcccgcaggctggcagccgccagccctgcacccacagcccccgagaccttcccatacgagacagccgtggccaagtgcaaggagaagctgccggtggaggacctgtactaccaggcctgcgtcttcgacctcctcaccacgggcgacgtgaacttcacactggccgcctactacgcgttggaggatgtcaagatgctccactccaacaaagacaaactgcacctgtatgataggactcgggacctgccaggcagggcggctgcggggctgcccctggccccccggcccctcctgggcgccctcgtcccgctcctggccctgctccctgtgttctgctagacgcgtagatgtggagggaggcgcgggctccgtcctctcggcttccccatgtgtgggctgggaccgcccacggggtgcagatctcctggcgtgtccaccatggccccgcagaacgccagggaccgcctgctgccaagggctcaggcacggacccctccccttctagtgcacgtgacaaggttgtggtgactggtgccatgatgtttgacagtagagctgtgtgagagggagagcagctcccctcgccccgcccctgcagtgtgaatgtgtgaaacatcccctcaggctgaagccccccacccccaccagagacacactgggaaccgtcagagtcagctccttccccctcgcaatgcactgaaaggcccggccgactgctgctcgccgatccgtggggccccctgtgcccgccacacgcacgcacacactcttacacgagagcacactcgatccccctaggccagcggggacaccccagccacacagggaggcatccttggggcttggccccaggcagggcaaccccggggcgctgcttggcaccttagcagactgctggaaccttttggccagtaggtcgtgcccgcctggtgccttctggcctgtggcctccctgcccatgttcacctggctgctgtgggtaccagtgcaggtcccggttttcaggcacctgctcagctgcccgtctctggcctgggcccctgccccttccaccctgtgcttagaaagtcgaagtgcttggttctaaatgtctaaacagagaagagatccttgacttctgttcctctctctcctgcagatgcaagagctcctgggcaggggtgcctgggccccagggtgtggcaggagacccagtggatggggccagctggcctgccctgatcctctgcttcctcctcacaaccccaagagcccccagcccggtccatccacgtctggagtctggggagaggagcagggtcttaggactctcagctctgagcatccctggcagggtcttcaacctctaatctcttcccttaagccctgtggccacacagccaggagagacttgccgctggctcccgcctcatttcagcccagggtgctcatccaggggcccagaacagtcccacctgtgctgctgtgcccacagcacaaagccaggcttcactcccaaaagtgcagccaggccctggagggtgatcctgccagcagccctacagctccacaccctacccacccatcggcagcccctctgctgttccccagggacctctcatacactggccaggaggctgcagaacgtgtgtctccccctccctccaagaggtcctgctccctctgccagaaccgtgtgtgggcgggtgggagggcgctcggggcccggcccctccctctccctgctggttttagttggtccctatgttggaagtaaaaagtgaagcactttattttggttgtgtttgctcacgttctgcttggaagtggggacccctcactgcgtccacgtgtctgcgacctgtgtggagtgtcaccgcgtgtacatactgtaaattatttattaatggctaaatgcaagtaaagtttggtttttttgtta

SEQ ID NO: 26164 - DNA, 3216 bp, Homo sapiens
  source 1..3216: mol_type = unassigned DNA
agttgtctcccgagcgctggctgcgccgcccgagccgctgggccggggaagcactggccgttcgctcccgggccggctccgccaggcgctcgcaggcatgcagcccgggagcaggaggcgctccccgggccgctgctgagccggccggggcggcggggaccagcgccagcggagcccctcccaccttgccccggggcagacgagcggcgccccgacaccccctcttctcccgcagccccgccagcgccaccccccgcgggccgcaggggctcatgcagccgccaagggagaggctagtggtaacaggccgagctggatggatgggtatggggagaggggcaggacgttcagccctgggattctggccgaccctcgccttccttctctgcagcttccccgcagccacctccccgtgcaagatcctcaagtgcaactctgagttctggagcgccacgtcgggcagccacgccccagcctcagacgacacccccgagttctgtgcagccttgcgcagctacgccctgtgcacgcggcggacggcccgcacctgccggggtgacctggcctaccactcggccgtccatggcatagaggacctcatgagccagcacaactgctccaaggatggccccacctcgcagccacgcctgcgcacgctcccaccggccggagacagccaggagcgctcggacagccccgagatctgccattacgagaagagctttcacaagcactcggccacccccaactacacgcactgtggcctcttcggggacccacacctcaggactttcaccgaccgcttccagacctgcaaggtgcagggcgcctggccgctcatcgacaataattacctgaacgtgcaggtcaccaacacgcctgtgctgcccggctcagcggccactgccaccagcaagctcaccatcatcttcaagaacttccaggagtgtgtggaccagaaggtgtaccaggctgagatggacgagctcccggccgccttcgtggatggctctaagaacggtggggacaagcacggggccaacagcctgaagatcactgagaaggtgtcaggccagcacgtggagatccaggccaagtacatcggcaccaccatcgtggtgcgccaggtgggccgctacctgacctttgccgtccgcatgccagaggaagtggtcaatgctgtggaggactgggacagccagggtctctacctctgcctgcggggctgccccctcaaccagcagatcgacttccaggccttccacaccaatgctgagggcaccggtgcccgcaggctggcagccgccagccctgcacccacagcccccgagaccttcccatacgagacagccgtggccaagtgcaaggagaagctgccggtggaggacctgtactaccaggcctgcgtcttcgacctcctcaccacgggcgacgtgaacttcacactggccgcctactacgcgttggaggatgtcaagatgctccactccaacaaagacaaactgcacctgtatgataggactcgggacctgccaggcagggcggctgcggggctgcccctggccccccggcccctcctgggcgccctcgtcccgctcctggccctgctccctgtgttctgctagacgcgtagatgtggagggaggcgcgggctccgtcctctcggcttccccatgtgtgggctgggaccgcccacggggtgcagatctcctggcgtgtccaccatggccccgcagaacgccagggaccgcctgctgccaagggctcaggcacggacccctccccttctagtgcacgtgacaaggttgtggtgactggtgccatgatgtttgacagtagagctgtgtgagagggagagcagctcccctcgccccgcccctgcagtgtgaatgtgtgaaacatcccctcaggctgaagccccccacccccaccagagacacactgggaaccgtcagagtcagctccttccccctcgcaatgcactgaaaggcccggccgactgctgctcgccgatccgtggggccccctgtgcccgccacacgcacgcacacactcttacacgagagcacactcgatccccctaggccagcggggacaccccagccacacagggaggcatccttggggcttggccccaggcagggcaaccccggggcgctgcttggcaccttagcagactgctggaaccttttggccagtaggtcgtgcccgcctggtgccttctggcctgtggcctccctgcccatgttcacctggctgctgtgggtaccagtgcaggtcccggttttcaggcacctgctcagctgcccgtctctggcctgggcccctgccccttccaccctgtgcttagaaagtcgaagtgcttggttctaaatgtctaaacagagaagagatccttgacttctgttcctctctctcctgcagatgcaagagctcctgggcaggggtgcctgggccccagggtgtggcaggagacccagtggatggggccagctggcctgccctgatcctctgcttcctcctcacaaccccaagagcccccagcccggtccatccacgtctggagtctggggagaggagcagggtcttaggactctcagctctgagcatccctggcagggtcttcaacctctaatctcttcccttaagccctgtggccacacagccaggagagacttgccgctggctcccgcctcatttcagcccagggtgctcatccaggggcccagaacagtcccacctgtgctgctgtgcccacagcacaaagccaggcttcactcccaaaagtgcagccaggccctggagggtgatcctgccagcagccctacagctccacaccctacccacccatcggcagcccctctgctgttccccagggacctctcatacactggccaggaggctgcagaacgtgtgtctccccctccctccaagaggtcctgctccctctgccagaaccgtgtgtgggcgggtgggagggcgctcggggcccggcccctccctctccctgctggttttagttggtccctatgttggaagtaaaaagtgaagcactttattttggttgtgtttgctcacgttctgcttggaagtggggacccctcactgcgtccacgtgtctgcgacctgtgtggagtgtcaccgcgtgtacatactgtaaattatttattaatggctaaatgcaagtaaagtttggtttttttgttattttctttt

SEQ ID NO: 26165 - DNA, 3078 bp, Homo sapiens
  source 1..3078: mol_type = unassigned DNA
gtagctgagatgcagagagccatcctgcccagacctagacaactcggaagtgggtttttcagcctcctgcaccggtgtcgcgtctgagtgcgactgatgagccagggggcgtcggtggaagcttggggtcggcagtctggttggaaaggagaggctagtggtaacaggccgagctggatggatgggtatggggagaggggcaggacgttcagccctgggattctggccgaccctcgccttccttctctgcagcttccccgcagccacctccccgtgcaagatcctcaagtgcaactctgagttctggagcgccacgtcgggcagccacgccccagcctcagacgacacccccgagttctgtgcagccttgcgcagctacgccctgtgcacgcggcggacggcccgcacctgccggggtgacctggcctaccactcggccgtccatggcatagaggacctcatgagccagcacaactgctccaaggatggccccacctcgcagccacgcctgcgcacgctcccaccggccggagacagccaggagcgctcggacagccccgagatctgccattacgagaagagctttcacaagcactcggccacccccaactacacgcactgtggcctcttcggggacccacacctcaggactttcaccgaccgcttccagacctgcaaggtgcagggcgcctggccgctcatcgacaataattacctgaacgtgcaggtcaccaacacgcctgtgctgcccggctcagcggccactgccaccagcaagctcaccatcatcttcaagaacttccaggagtgtgtggaccagaaggtgtaccaggctgagatggacgagctcccggccgccttcgtggatggctctaagaacggtggggacaagcacggggccaacagcctgaagatcactgagaaggtgtcaggccagcacgtggagatccaggccaagtacatcggcaccaccatcgtggtgcgccaggtgggccgctacctgacctttgccgtccgcatgccagaggaagtggtcaatgctgtggaggactgggacagccagggtctctacctctgcctgcggggctgccccctcaaccagcagatcgacttccaggccttccacaccaatgctgagggcaccggtgcccgcaggctggcagccgccagccctgcacccacagcccccgagaccttcccatacgagacagccgtggccaagtgcaaggagaagctgccggtggaggacctgtactaccaggcctgcgtcttcgacctcctcaccacgggcgacgtgaacttcacactggccgcctactacgcgttggaggatgtcaagatgctccactccaacaaagacaaactgcacctgtatgataggactcgggacctgccaggcagggcggctgcggggctgcccctggccccccggcccctcctgggcgccctcgtcccgctcctggccctgctccctgtgttctgctagacgcgtagatgtggagggaggcgcgggctccgtcctctcggcttccccatgtgtgggctgggaccgcccacggggtgcagatctcctggcgtgtccaccatggccccgcagaacgccagggaccgcctgctgccaagggctcaggcacggacccctccccttctagtgcacgtgacaaggttgtggtgactggtgccatgatgtttgacagtagagctgtgtgagagggagagcagctcccctcgccccgcccctgcagtgtgaatgtgtgaaacatcccctcaggctgaagccccccacccccaccagagacacactgggaaccgtcagagtcagctccttccccctcgcaatgcactgaaaggcccggccgactgctgctcgccgatccgtggggccccctgtgcccgccacacgcacgcacacactcttacacgagagcacactcgatccccctaggccagcggggacaccccagccacacagggaggcatccttggggcttggccccaggcagggcaaccccggggcgctgcttggcaccttagcagactgctggaaccttttggccagtaggtcgtgcccgcctggtgccttctggcctgtggcctccctgcccatgttcacctggctgctgtgggtaccagtgcaggtcccggttttcaggcacctgctcagctgcccgtctctggcctgggcccctgccccttccaccctgtgcttagaaagtcgaagtgcttggttctaaatgtctaaacagagaagagatccttgacttctgttcctctctctcctgcagatgcaagagctcctgggcaggggtgcctgggccccagggtgtggcaggagacccagtggatggggccagctggcctgccctgatcctctgcttcctcctcacaaccccaagagcccccagcccggtccatccacgtctggagtctggggagaggagcagggtcttaggactctcagctctgagcatccctggcagggtcttcaacctctaatctcttcccttaagccctgtggccacacagccaggagagacttgccgctggctcccgcctcatttcagcccagggtgctcatccaggggcccagaacagtcccacctgtgctgctgtgcccacagcacaaagccaggcttcactcccaaaagtgcagccaggccctggagggtgatcctgccagcagccctacagctccacaccctacccacccatcggcagcccctctgctgttccccagggacctctcatacactggccaggaggctgcagaacgtgtgtctccccctccctccaagaggtcctgctccctctgccagaaccgtgtgtgggcgggtgggagggcgctcggggcccggcccctccctctccctgctggttttagttggtccctatgttggaagtaaaaagtgaagcactttattttggttgtgtttgctcacgttctgcttggaagtggggacccctcactgcgtccacgtgtctgcgacctgtgtggagtgtcaccgcgtgtacatactgtaaattatttattaatggctaaatgcaagtaaagtttggtttttttgttattttctttta

SEQ ID NO: 26166 - DNA, 3172 bp, Homo sapiens
  source 1..3172: mol_type = unassigned DNA
agacctagacaactcggaagtgggtttttcagcctcctgcaccggtgtcgcgtctgagtgcgactgatgagccagggggcgtcggtggaagcttgggggagaggctagtggtaacaggccgagctggatggatgggtatggggagaggggcaggacgttcagccctgggattctggccgaccctcgccttccttctctgcagcttccccgcagctattaaaagaagcccaggaagtttctgcgcagcgttggagatgaggagactgtggaatttgatgtcgtggaaggagagaagggtgcagaagccgctaatgtaactgggcccggggaggtgcccgtgaagggcagctgttatgcccccaacctacccacctccccgtgcaagatcctcaagtgcaactctgagttctggagcgccacgtcgggcagccacgccccagcctcagacgacacccccgagttctgtgcagccttgcgcagctacgccctgtgcacgcggcggacggcccgcacctgccggggtgacctggcctaccactcggccgtccatggcatagaggacctcatgagccagcacaactgctccaaggatggccccacctcgcagccacgcctgcgcacgctcccaccggccggagacagccaggagcgctcggacagccccgagatctgccattacgagaagagctttcacaagcactcggccacccccaactacacgcactgtggcctcttcggggacccacacctcaggactttcaccgaccgcttccagacctgcaaggtgcagggcgcctggccgctcatcgacaataattacctgaacgtgcaggtcaccaacacgcctgtgctgcccggctcagcggccactgccaccagcaagctcaccatcatcttcaagaacttccaggagtgtgtggaccagaaggtgtaccaggctgagatggacgagctcccggccgccttcgtggatggctctaagaacggtggggacaagcacggggccaacagcctgaagatcactgagaaggtgtcaggccagcacgtggagatccaggccaagtacatcggcaccaccatcgtggtgcgccaggtgggccgctacctgacctttgccgtccgcatgccagaggaagtggtcaatgctgtggaggactgggacagccagggtctctacctctgcctgcggggctgccccctcaaccagcagatcgacttccaggccttccacaccaatgctgagggcaccggtgcccgcaggctggcagccgccagccctgcacccacagcccccgagaccttcccatacgagacagccgtggccaagtgcaaggagaagctgccggtggaggacctgtactaccaggcctgcgtcttcgacctcctcaccacgggcgacgtgaacttcacactggccgcctactacgcgttggaggatgtcaagatgctccactccaacaaagacaaactgcacctgtatgataggactcgggacctgccaggcagggcggctgcggggctgcccctggccccccggcccctcctgggcgccctcgtcccgctcctggccctgctccctgtgttctgctagacgcgtagatgtggagggaggcgcgggctccgtcctctcggcttccccatgtgtgggctgggaccgcccacggggtgcagatctcctggcgtgtccaccatggccccgcagaacgccagggaccgcctgctgccaagggctcaggcacggacccctccccttctagtgcacgtgacaaggttgtggtgactggtgccatgatgtttgacagtagagctgtgtgagagggagagcagctcccctcgccccgcccctgcagtgtgaatgtgtgaaacatcccctcaggctgaagccccccacccccaccagagacacactgggaaccgtcagagtcagctccttccccctcgcaatgcactgaaaggcccggccgactgctgctcgccgatccgtggggccccctgtgcccgccacacgcacgcacacactcttacacgagagcacactcgatccccctaggccagcggggacaccccagccacacagggaggcatccttggggcttggccccaggcagggcaaccccggggcgctgcttggcaccttagcagactgctggaaccttttggccagtaggtcgtgcccgcctggtgccttctggcctgtggcctccctgcccatgttcacctggctgctgtgggtaccagtgcaggtcccggttttcaggcacctgctcagctgcccgtctctggcctgggcccctgccccttccaccctgtgcttagaaagtcgaagtgcttggttctaaatgtctaaacagagaagagatccttgacttctgttcctctctctcctgcagatgcaagagctcctgggcaggggtgcctgggccccagggtgtggcaggagacccagtggatggggccagctggcctgccctgatcctctgcttcctcctcacaaccccaagagcccccagcccggtccatccacgtctggagtctggggagaggagcagggtcttaggactctcagctctgagcatccctggcagggtcttcaacctctaatctcttcccttaagccctgtggccacacagccaggagagacttgccgctggctcccgcctcatttcagcccagggtgctcatccaggggcccagaacagtcccacctgtgctgctgtgcccacagcacaaagccaggcttcactcccaaaagtgcagccaggccctggagggtgatcctgccagcagccctacagctccacaccctacccacccatcggcagcccctctgctgttccccagggacctctcatacactggccaggaggctgcagaacgtgtgtctccccctccctccaagaggtcctgctccctctgccagaaccgtgtgtgggcgggtgggagggcgctcggggcccggcccctccctctccctgctggttttagttggtccctatgttggaagtaaaaagtgaagcactttattttggttgtgtttgctcacgttctgcttggaagtggggacccctcactgcgtccacgtgtctgcgacctgtgtggagtgtcaccgcgtgtacatactgtaaattatttattaatggctaaatgcaagtaaagtttggtttttttgtt

SEQ ID NO: 26167 - DNA, 3174 bp, Homo sapiens
  source 1..3174: mol_type = unassigned DNA
ctcccgctcgacgcccggctgcggagctgcctggccatctcctgccctcggggatgtcggcgcagtgcaccgcgtgggctcgcgtcccggcggccctttgcctcggcgcgccggcgtacgggaaggtgcggaccttggattgagggccgaggatgcccattgccaagccgccccggctttcctaagtggacgggagggcacggcgacgattcagcgccggctcgcgccgcagctcaacccaggggagaggctagtggtaacaggccgagctggatggatgggtatggggagaggggcaggacgttcagccctgggattctggccgaccctcgccttccttctctgcagcttccccgcagccacctccccgtgcaagatcctcaagtgcaactctgagttctggagcgccacgtcgggcagccacgccccagcctcagacgacacccccgagttctgtgcagccttgcgcagctacgccctgtgcacgcggcggacggcccgcacctgccggggtgacctggcctaccactcggccgtccatggcatagaggacctcatgagccagcacaactgctccaaggatggccccacctcgcagccacgcctgcgcacgctcccaccggccggagacagccaggagcgctcggacagccccgagatctgccattacgagaagagctttcacaagcactcggccacccccaactacacgcactgtggcctcttcggggacccacacctcaggactttcaccgaccgcttccagacctgcaaggtgcagggcgcctggccgctcatcgacaataattacctgaacgtgcaggtcaccaacacgcctgtgctgcccggctcagcggccactgccaccagcaagctcaccatcatcttcaagaacttccaggagtgtgtggaccagaaggtgtaccaggctgagatggacgagctcccggccgccttcgtggatggctctaagaacggtggggacaagcacggggccaacagcctgaagatcactgagaaggtgtcaggccagcacgtggagatccaggccaagtacatcggcaccaccatcgtggtgcgccaggtgggccgctacctgacctttgccgtccgcatgccagaggaagtggtcaatgctgtggaggactgggacagccagggtctctacctctgcctgcggggctgccccctcaaccagcagatcgacttccaggccttccacaccaatgctgagggcaccggtgcccgcaggctggcagccgccagccctgcacccacagcccccgagaccttcccatacgagacagccgtggccaagtgcaaggagaagctgccggtggaggacctgtactaccaggcctgcgtcttcgacctcctcaccacgggcgacgtgaacttcacactggccgcctactacgcgttggaggatgtcaagatgctccactccaacaaagacaaactgcacctgtatgataggactcgggacctgccaggcagggcggctgcggggctgcccctggccccccggcccctcctgggcgccctcgtcccgctcctggccctgctccctgtgttctgctagacgcgtagatgtggagggaggcgcgggctccgtcctctcggcttccccatgtgtgggctgggaccgcccacggggtgcagatctcctggcgtgtccaccatggccccgcagaacgccagggaccgcctgctgccaagggctcaggcacggacccctccccttctagtgcacgtgacaaggttgtggtgactggtgccatgatgtttgacagtagagctgtgtgagagggagagcagctcccctcgccccgcccctgcagtgtgaatgtgtgaaacatcccctcaggctgaagccccccacccccaccagagacacactgggaaccgtcagagtcagctccttccccctcgcaatgcactgaaaggcccggccgactgctgctcgccgatccgtggggccccctgtgcccgccacacgcacgcacacactcttacacgagagcacactcgatccccctaggccagcggggacaccccagccacacagggaggcatccttggggcttggccccaggcagggcaaccccggggcgctgcttggcaccttagcagactgctggaaccttttggccagtaggtcgtgcccgcctggtgccttctggcctgtggcctccctgcccatgttcacctggctgctgtgggtaccagtgcaggtcccggttttcaggcacctgctcagctgcccgtctctggcctgggcccctgccccttccaccctgtgcttagaaagtcgaagtgcttggttctaaatgtctaaacagagaagagatccttgacttctgttcctctctctcctgcagatgcaagagctcctgggcaggggtgcctgggccccagggtgtggcaggagacccagtggatggggccagctggcctgccctgatcctctgcttcctcctcacaaccccaagagcccccagcccggtccatccacgtctggagtctggggagaggagcagggtcttaggactctcagctctgagcatccctggcagggtcttcaacctctaatctcttcccttaagccctgtggccacacagccaggagagacttgccgctggctcccgcctcatttcagcccagggtgctcatccaggggcccagaacagtcccacctgtgctgctgtgcccacagcacaaagccaggcttcactcccaaaagtgcagccaggccctggagggtgatcctgccagcagccctacagctccacaccctacccacccatcggcagcccctctgctgttccccagggacctctcatacactggccaggaggctgcagaacgtgtgtctccccctccctccaagaggtcctgctccctctgccagaaccgtgtgtgggcgggtgggagggcgctcggggcccggcccctccctctccctgctggttttagttggtccctatgttggaagtaaaaagtgaagcactttattttggttgtgtttgctcacgttctgcttggaagtggggacccctcactgcgtccacgtgtctgcgacctgtgtggagtgtcaccgcgtgtacatactgtaaattatttattaatggctaaatgcaagtaaagtttggtttttttgttattttctttta

SEQ ID NO: 26168 - DNA, 1664 bp, Homo sapiens
  source 1..1664: mol_type = unassigned DNA
aaggttaggcccgcaggccctcagcacgggggcgcagccggggcaagtcttcaggaagcagcgaggtgcttgaagggggtgctggaggcaggccaaacccagtcaggatgggtggcctggggccacgacgggcgggaacctcgagggagaggctagtggtaacaggccgagctggatggatgggtatggggagaggggcaggacgttcagccctgggattctggccgaccctcgccttccttctctgcagcttccccgcagccacctccccgtgcaagatcctcaagtgcaactctgagttctggagcgccacgtcgggcagccacgccccagcctcagacgacacccccgagttctgtgcagccttgcgcagctacgccctgtgcacgcggcggacggcccgcacctgccggggtgacctggcctaccactcggccgtccatggcatagaggacctcatgagccagcacaactgctccaaggatggccccacctcgcagccacgcctgcgcacgctcccaccggccggagacagccaggagcgctcggacagccccgagatctgccattacgagaagagctttcacaagcactcggccacccccaactacacgcactgtggcctcttcggggacccacacctcaggactttcaccgaccgcttccagacctgcaaggtgcagggcgcctggccgctcatcgacaataattacctgaacgtgcaggtcaccaacacgcctgtgctgcccggctcagcggccactgccaccagcaagctcaccatcatcttcaagaacttccaggagtgtgtggaccagaaggtgtaccaggctgagatggacgagctcccggccgccttcgtggatggctctaagaacggtggggacaagcacggggccaacagcctgaagatcactgagaaggtgtcaggccagcacgtggagatccaggccaagtacatcggcaccaccatcgtggtgcgccaggtgggccgctacctgacctttgccgtccgcatgccagaggaagtggtcaatgctgtggaggactgggacagccagggtctctacctctgcctgcggggctgccccctcaaccagcagatcgacttccaggccttccacaccaatgctgagggcaccggtgcccgcaggctggcagccgccagccctgcacccacagcccccgagaccttcccatacgagacagccgtggccaagtgcaaggagaagctgccggtggaggacctgtactaccaggcctgcgtcttcgacctcctcaccacgggcgacgtgaacttcacactggccgcctactacgcgttggaggatgtcaagatgctccactccaacaaagacaaactgcacctgtatgataggactcgggacctgccaggcagggcggctgcggggctgcccctggccccccggcccctcctgggcgccctcgtcccgctcctggccctgctccctgtgttctgctagacgcgtagatgtggagggaggcgcgggctccgtcctctcggcttccccatgtgtgggctgggaccgcccacggggtgcagatctcctggcgtgtccaccatggccccgcagaacgccagggaccgcctgctgccaagggctcaggcacggacccctccccttctagtgcacgtgacaagg

SEQ ID NO: 26169 - DNA, 4580 bp, Homo sapiens
  source 1..4580: mol_type = unassigned DNA
atttgaggctgactggggagaaagctgcctggaggaagctgctggggtgcggggggctgagggatttggctccccgccctctcccctagatggcggagaaatcgggctagctggaagggcgcagctcctctcccagagctcattctggagtcggagaactgggagagcggcccccgaggcggagcctccctcccgccccgagtcgcgctgccccccacctgggggagaggggcgggcgccgcgctgccttccctccgcgcctcggccgcgtggcttgcggcttattttcccagctggcaagcgtcgcgctgcagacaagggaatgcctgtggtcctgcgtgttccgaagttcaggggccccctgatcccgctgagccccctccaggagcgaaagggttaagaatgataaggaagaagaggaagcgaagcgcgccccccggcccatgccgcagccacgggcccagacccgccacggcgcccgcgccgccgccctcgccggagcccacgagacctgcatggacgggcatgggcttgagagcagcaccttccagcgccgccgctgccgccgccgaggttgagcagcgccgcagccccgggctctgccccccgccgctggagctgctgctgctgctgctgttcagcctcgggctgctccacgcaggtgactgccaacagccagcccaatgtcgaatccagaaatgcaccacggacttcgtgtccctgacttctcacctgaactctgccgttgacggctttgactctgagttttgcaaggccttgcgtgcctatgctggctgcacccagcgaacttcaaaagcctgccgtggcaacctggtataccattctgccgtgttgggtatcagtgacctcatgagccagaggaattgttccaaggatggacccacatcctctaccaaccccgaagtgacccatgatccttgcaactatcacagccacgctggagccagggaacacaggagaggggaccagaaccctcccagttaccttttttgtggcttgtttggagatcctcacctcagaactttcaaggataacttccaaacatgcaaagtagaaggggcctggccactcatagataataattatctttcagttcaagtgacaaacgtacctgtggtccctggatccagtgctactgctacaaataagatcactattatcttcaaagcccaccatgagtgtacagatcagaaagtctaccaagctgtgacagatgacctgccggccgcctttgtggatggcaccaccagtggtggggacagcgatgccaagagcctgcgtatcgtggaaagggagagtggccactatgtggagatgcacgcccgctatatagggaccacagtgtttgtgcggcaggtgggtcgctacctgacccttgccatccgtatgcctgaagacctggccatgtcctacgaggagagccaggacctgcagctgtgcgtgaacggctgccccctgagtgaacgcatcgatgacgggcagggccaggtgtctgccatcctgggacacagcctgcctcgcacctccttggtgcaggcctggcctggctacacactggagactgccaacactcaatgccatgagaagatgccagtgaaggacatctatttccagtcctgtgtcttcgacctgctcaccactggtgatgccaactttactgccgcagcccacagtgccttggaggatgtggaggccctgcacccaaggaaggaacgctggcacattttccccagcagtggcaatgggactccccgtggaggcagtgatttgtctgtcagtctaggactcacctgcttgatccttatcgtgtttttgtaggggttgtcttttgttttggttttttattttttgtctataacaaaattttaaaatatatattgtcataatatattgagtaaaagagtatatatgtatataccatgtatatgacaggatgtttgtcctgggacacccaccagattgtacatactgtgtttggctgttttcacatatgttggatgtagtgttctttgattgtatcaattttgttttgcagttctgtgaaatgttttataatgtccctgcccagggacctgttagaaagcactttattttttatatattaaatatttatgtgtgtgcttggttgatatgtatagtacatatacacagacatccatatgcagcgtttcctttgaaggtgaccagttgtttgtagctattcttggctgtaccttcctgccctttcccattgctactgatttgccacggtgtgcagcttttactcgccaccttccggtggagctgcctcgttcctttgaactatgccctcacccttctgccctcacttgatttgaaagggtcgttaactctcccttacaggtgctttgactcttaaacgctgatcttaagaagctctcttcatctaagagctgttactttttcagaagggggggtattattggtattctgattactctcaattctaattgttatatatttgagcccatacagtgtattaggttgaaccatagaaactgctattctcgtaggtcaaaagggtctagtgatggaagttttgtagataagtaccaggcatctcagtaactcctagactttttctcatcccatgccccgttttaaattgtcagttttccctctgactcttctgtgttaaaacatgaaactataaatttagtaattatcatgccttgctctttttaatctatatgactgatgcaagcccctcttcttaaccgtttcttggctttgagcccagaaacacagctctccctgtctccaactccagtaagccctcctcagcctcaccttacgaatccaaagaactggggtttgttaggttctttctctaatgtagaggcccagatcccatcacaaagtttttcattcttccttgtccaccatgatcttcatcacagtctttgatatgtctgcatgcaaagtggaacagagttgggcggcaatgacagaagagcttccttggcctgactcggtgtgcggccacttcggcactgcttaatccagatattcttgttaactaagcattgtgcttcccaggtggtctgaagtcaggtactctctctctcaacacctgtagttgaatatgatttggtcagttgctcgttgtaacttggagaaattcctataaagtaagatctccttgcctcttccatccattgttggcacccccttgcaaaaggaaaagaacagcaaaagtcaggagcagtaatctgagaaagttaactccaggataggtaggtttctattgttatagctagatgtaaatctttagttccaagaagtgatagagtttctgctttaataatttgttgataagtttacataaacagaaataaaagatactatctttaccgtagtagttcaggccaagattatgcttagttttagttctccaggtagttacttttgccatgtcctattgatcagtgacactgccagaggcccataccggcaagaggaagaggacgtcattttgtaaagtttaacttcttagcgaactgatgtgccacccagtcacagagtggagttgtgaattcatgtagaggtggcaaacctctaccttgtgttgatgagagaataatcttgggcagtctgggaaaataaggaaggcatctccttcttactcatggagattcaactatagagagttgaaacctaaacccgccttccttttatagaagctggactagagacggactgaccatcagctctgaactgtggctttttttgttcacctatgatgccatgtaccaaattcagaagctatcgttaataatttgttttataattgagtagtacaagcgaggaaaaaatacggaggataaccactatttttgtgcaaataatatgaaagtgaagtaaaagcaatagaagaaatttctataggatctgggtttagagtgtgtatcattaataaatatacctttgctcttttcagggaaaataacaaccacccttactgatagttgggaaaagaagattgggttattttgccatatcatttagctggaagtgacatttaaaagcaccctgcatcactagtaatagtgtattttgctattctgcccttgtaatcggtgtccctgtaaaacaatccccacagattactttcagaaatagatgtatttctctacgtaagggccaggtttattttctccttttttgagatttctagaaaaaatgctgcttgcacatgttggttcttgaaaccttagctagaagaatttcaggtcataccaacatgtggataggctatagctgttcagaggtctcctgggggagcttaaaacgggggaaacactggttttcacagatgctccacatggctgtctttaaaagactcaaaacttttttttgtcctctttgttatgcttggaagctcccccccccccaacagtgtgtcgagtctttgcaaagaaacctttagatgtggttcatagatatatgaatacgtatctgtgtaaaacagtgagtgtgcagtgtgtaaatactttaaattattatgctagaaaaataaagttacataccttgctgtggaa

SEQ ID NO: 26170 - DNA, 2052 bp, Homo sapiens
  source 1..2052: mol_type = unassigned DNA
gagattgatcgaccgcgggggctgccgcgcagagatatccgggccgccggtgggtggtcgctagggctgggccagcctcttggaggtccacgcccgccgagcccacgctggctggggccggggtgccggcgcgctcgggactcgtctcagcagtcgctcacggtctttgtgtcttctcttccgcccctttccctgcctgccgcctccggccgccacgatgcccctgcgccccgctgctgccgccgcggactggctgcgccggctgcgcgctgcttgctgcggcggtggtggcgccccatctgctacacgggcctgaagaaggaagaagaggaagcgaagcgcgccccccggcccatgccgcagccacgggcccagacccgccacggcgcccgcgccgccgccctcgccggagcccacgagacctgcatggacgggcatgggcttgagagcagcaccttccagcgccgccgctgccgccgccgaggttgagcagcgccgcagccccgggctctgccccccgccgctggagctgctgctgctgctgctgttcagcctcgggctgctccacgcaggtgactgccaacagccagcccaatgtcgaatccagaaatgcaccacggacttcgtgtccctgacttctcacctgaactctgccgttgacggctttgactctgagttttgcaaggccttgcgtgcctatgctggctgcacccagcgaacttcaaaagcctgccgtggcaacctggtataccattctgccgtgttgggtatcagtgacctcatgagccagaggaattgttccaaggatggacccacatcctctaccaaccccgaagtgacccatgatccttgcaactatcacagccacgctggagccagggaacacaggagaggggaccagaaccctcccagttaccttttttgtggcttgtttggagatcctcacctcagaactttcaaggataacttccaaacatgcaaagtagaaggggcctggccactcatagataataattatctttcagttcaagtgacaaacgtacctgtggtccctggatccagtgctactgctacaaataagatcactattatcttcaaagcccaccatgagtgtacagatcagaaagtctaccaagctgtgacagatgacctgccggccgcctttgtggatggcaccaccagtggtggggacagcgatgccaagagcctgcgtatcgtggaaagggagagtggccactatgtggagatgcacgcccgctatatagggaccacagtgtttgtgcggcaggtgggtcgctacctgacccttgccatccgtatgcctgaagacctggccatgtcctacgaggagagccaggacctgcagctgtgcgtgaacggctgccccctgagtgaacgcatcgatgacgggcagggccaggtgtctgccatcctgggacacagcctgcctcgcacctccttggtgcaggcctggcctggctacacactggagactgccaacactcaatgccatgagaagatgccagtgaaggacatctatttccagtcctgtgtcttcgacctgctcaccactggtgatgccaactttactgccgcagcccacagtgccttggaggatgtggaggccctgcacccaaggaaggaacgctggcacattttccccagcagtggcaatgggactccccgtggaggcagtgatttgtctgtcagtctaggactcacctgcttgatccttatcgtgtttttgtaggggttgtcttttgttttggttttttattttttgtctataacaaaattttaaaatatatattgtcataatatattgagtaaaagagtatatatgtatataccatgtatatgacaggatgtttgtcctgggacacccaccagattgtacatactgtgtttggctgttttcacatatgttggatgtagtgttctttgattgtatcaattttgttttgcagttctgtgaaatgttttataatgtccctgcccagggacctgttagaaagcactttattttttatatattaaatatttatgtgtgtg

SEQ ID NO: 26171 - DNA, 7018 bp, Homo sapiens
  source 1..7018: mol_type = unassigned DNA
agtcccgcctctaccgcccagcggacgccgccgccgccgccgccgccgcgtacctagccaggtccctgaggggcgggcagatgaggcctaggggtgccgatccctagtgtcgactatgcgagatctgattccggagctgccatgattgaagtggtagcagagctcagccggggtcctgtatttttggctggggaggcgctggagtgtgtagtgaccgtcaccaacccccttccgcccacggccacttctgcatccagtgaggccctggcctgggccagtgcccaaatccactgccagttccatgccagtgagagtcgagtagcactgcctcctcctgactctagtcagccagatgtccagcccgacagccagactgtctttctgccacaccgaggtgagaggggccagtgtatcctttctactccaccgaaaattctattctgtgacctgaggcttgatcctggagagtccaaatcatactcctacagtgaagtgctgcccatagagggaccaccctcctttcggggtcagtcagtcaagtacgtctacaaactgaccattggctgccagcgtgtcaactcccctatcactttactcagagtccctctgagggttcttgtgctgactggccttcaggatgtccggtttccccaggatgaggctgtagccccatccagtccattcttggaggaggatgaaggtgggaagaaagattcatggctagctgagctggctggggaacgcctaatggctgccacatcctgccgcagcctccatctatacaatatcagtgatggccgagggaaagttgggacgtttggcatcttcaaatctgtgtacagacttggcgaggacgtggtggggaccttaaacttaggggaaggaaccgtagcttgtttgcagttttcagtcagcttacagaccgaggagcgtgtacagcctgagtaccagcggcgacgtggggcagggggtgtcccctctgtgtcacatgtgactcacgcccggcaccaggaatcctgcctacatacaactagaaccagcttctccctcccaatccctctcagctccaccccaggcttctgtacagccattgtgtccttgaagtggagattgcattttgaatttgtaacgtcccgagaaccaggattggtactcctaccccctgtggaacagcccgaacctaccacctggacaggacctgagcaagtacctgtagacaccttcagctgggacctgcccatcaaggtgctgcctactagccccaccctggcctcatatgctgccccaggccccagcaccagcaccataaccatctgaaactggcccaccctggtgctagttccttccggatactgagaactcagcacctggactctaatgggacccactttttccacctggggtccaatgtcgtggacagtgagagtcgggctttcagctatagcattaatttatttgttcagaatacattggcagctgctagtggtttccctggaagtggcagcagcagtgagcagtcagcagatggatgatcagttgagtttagctggagtggggagcaggagccccaggaacaggggtgttggctgagccccattctgggtcaggccctccccctttgcagggcagccgagggtcagatttttgcaccaaggagaactggcaggttcctgcctcctgacgtacctcacacccagccgggaagtcgatgggatgctgggacctggggaaccaaggataggggaaggagtcagcacagtgaaaggctgcctttatccctgcccacatgttccctctctcacagttttccccccacagagcccctttcagtggccccttggtcctcctaactaagctgtcacctaccatatgtgggcctttttgttttataacaggagtattttctctccaggtccaccccaacctcccctgatttatagcctgaagccttatctttcacactagtgttggtcccttcaggtttggcccatcttgtattgctcttctgttcattcttacatcacagcaatctagtcactccctggtcatccctcagtcactcatatcagagtcattctctctggccatctttggtcactcacgtgtcacagcagcccacgccaacaggatgcagacaggtgcaatggaaacagtccttgcggagccaagactcacccagggtaaaatatttcccctcatagtgacagggggctagggaagaacgggaaatgttagtaggtgtaggagtgctgatgagaggcagaggctcttctggtctggggtggagacagtaagtacgcactatccccgtatttagtttgtctttcctgtttcacagctggaggaagcctgggtattttgacacgggatcatctgtaaggccccatcctccctgtgccctctctgctgctcctccattcctaacgcttcaccccactttaccttgagcttggaagtagcacttgctgtagactcctgggtgctggaggagtagagacatcaccaagcagatgatcccccagcctcctaggatccccttggcctgtccagcccagagcatccttagggccattgctgctgcacagccctctcagacccttcttggcctctgctcagctactctggtcttgactccttgactttgctttgcgttgctccttgagtcttagtttctgtctttctcccctgggctcctgtctcacactatctccctgccctctgctctcacaggctggggatgtttataaagtgaggaccctggccccctgctgagtagagctggaaaagttgtaactctgtttcctgaggtgagggcatgaaaacaagaggtctagctttaacaagctgtgagagctgattcatgccccggcacagctagagggagggaggtggccatggagggggcactggactgggcacttccccagcaaggaggcaggaggggcgagggcccccaggtggtccccagatctcttccctgacctggagagaaggaagcattccaccttccccctttctcccccactgccaccaccaggggtgtgtatgctgggatccctgcctggaccggagggaggcatttcctggggatggttaatcctgtgccccagccaaacccaggagctgcaatagggtgcgacggccagaagctccaggagagtgagcaggcacctggagtggagactgtgtttccctcagatcctagggcagggtttccctaatgtatccaagaaatagggctgcccctcagagatggtggggagggtctcttttcctcaggcattccagaggtgaactgtccattgcttatcaccttcaaacatacagcagatgtgggatcaccccacatctggggatggttctttcccctttcaaagaggagcatctctaagtgccctgatgggatgaatcactccaggttcacagaggtgtcctctctttcctcccatatataatggagtgaggtttttaggaatttatcatttggcatcctctgagtttcccacaggttctggaggagcccaggatggattattgagagcatgggctgtagagacagtcttcttggattcagatcctgactccacttagctatgtaacctggtcagattacttcacctctctgagcctgtttcctcatctataaattggggatagtaatgccaactcattgggctgttatgaggattactgagataatgcgtgcagtgctcttatcaccatctctggtgcgtaagcgtcaggaaatagcagttgctgtgattggggctaaagctctgaggcaaaatgggcgacattattttctttgaatgacattaagcagtttgtgcatagctgagggcttctattggggatggctgtctcctggcatagacctctgcacctttcacactcatactccttgtcagcagtccccaacctttttggtaccagggaccggttttgtggaaaacaatttttccaccagtggatggagggggatagcagcggggagatgattttgggatgaaactgtttcatctcagatcatcaggcattagattctcataaggagtgtgcaatctagatcccttgcatgcggagttcacagtggggtttgcactcctgtgagaatctaatgcctctgctgatctgccaggaggaggagctcaggcggtaatgctcactcgcctgccgcccacctcctgctttgtgctcccgcttcctaacaggccacagactggtactggcctgtggcctgggggatggagacccctaatccatgtcacctttcccacctctttcaaaaacaggtacctccaggaacattttggttttggcccttgtattgacttctgaatgtctagtttgagaaactgttcccaataagccttcttcccccagatctgcaccctcgcctctaccctaggacaagatgtccttttctcatcatcctgccaggctaactttaagtctcctgctttttctcacttggatttggatccatttcttcctatttccgctcatgtgaactctccagttctcctttctcaccactctcctgctagccatctctttggcactaaaggccctggtcaaattggatttctttcatttttccacacttcaaagacccatgttctaggtattctccatagggatagtctctttggcatttatttggtttttctacgttttcagtcccatttactccaagactcactccctgccacctagtgcatcagatacagctacttctggctgacttttcaagggggaccaccctacctgtcatctcttcactgttcagaaatgactgtgtcagtgcacctcaaactcccttgctgtccttttccaaggagacagctaaggtggatggagatgcagaatggacctcacgttcgccctagtcaggactgataccctttccgtttcagaggattgccaagaaaaaactcacagttgaggcagggtgctctgaggtcggctgcggtgtgggaggcacggcctgggcctgctctctgggctggagcaggtggattcgaaggcctgtctagcacgagggcccaaaggtcttgtcagtggccagtagctctgccgcctttcccagagagggggtccaggggacatcctggaaggctgggccctgggccaccttctgctcttgcaagctagagccagcccaatagggggcggatgtgagtggggagctggggcgcatgaaggtgggggtgatgccgaaggggaagggatcgccagtggggattggtgcgtgtgcggaaacggggacagaagtgaaggttcatcgcctataacgaagatgaggtaggcatataggggcttctggaaagctagaggctgggctgagccaggagtcctctcccagaagttggggggcggtgcagaggtgtgggtcgagcccgcatgcgtgcctgctggggagggggtgagtggtgaggaccaggcccgctgggtcctgggggcgcggtggctggcgcgcaggtcccggagggggcggctggcgcgcactacacgcttgggaacaaggaaaacatccgccggaggcccggccgggcggcgctccagcctcggggcaggtgcgcggagaggaagtgagagcattccggcccccccaccccaaccccggccgctggccctctggtgagtcacagccgacccccgccgccggagggagaggggagctgcgggccagagccccggagggtctggaggagccaggagggtttctgggagcagagggtcacttagtgggcttctgtcgtggtgtcgctacgggcgcgaaacggacactgaacacagtctgactgtatggaggcaggtggggagggatcccctgggagaacttggcgggccgagagcagaccccagggcaaggaggggcccccgagggggaaaccgggagtcgggcaggtggcgtaacccagaaagggaaggagagccggattgattggggtgagagaggaaggaagcacgccaagttaggcctgggagaactgagggacctgaggagggaggagggagaccaacacagggtgggaaggcggaaatggccaaaccccaggcatcaggtctgtccagaggctgacgtagacagtgaagggtgaagggtaggttttaggagtagggggagttatgattatttggttacattttgggattatttggtctcacaggtagaagggagcctgctggtctctgtgtaacggatggcttaaaagcaaggttgtctgcgtcttggattactgtctgccattcagcctttgccaaaaaatttggcactgatctgcacatttttatagtcatttaaaattgtatgactctgtcaaatgatttaagtaattttggtggatttttaaaaataaaaaaataaaaatagaaaagttgcacaatctaattcaatatttgacttaaaaccaaaagtgaggctctcagattggtaatatggtattcagcctttttcttgtttggcttttgtgccatttgcccctcactgacttgattgaattctttgtggctgatgcctcagtttttctggatcagtagtgctgcacttccacttttcctctccctcattttactgtctttatttttagccttttttctgtgtagccctctaacctgccctttatattttgaaccaaataaaacatttcttggaatgggagctttggactacagtatacagacaaacaactcacaattttagcatatgaggctactatcttctgtggatgtgtatgtaattatacagtttctgtatttatcctgtggctgatagaaaaagttaaagctgtttaattcaccatagtatttctacaacacagcaatttattagtctgacttctcttctaaaatcaactctaaaatggtattttgtacttgtctcagagacgaattctgccatgatccttatgatctgtgttatgttgggccaaaggtgattactttataaattataaagatccctaaactctgcattgcctttggtcccaaacaagcaaatctgggtcaattaatg

SEQ ID NO: 26172 - DNA, 1296 bp, Homo sapiens
  source 1..1296: mol_type = unassigned DNA
atgacccgagccctttccggtctggcctgccgggcgcttccggccggaagggactccgcggagggcctaggggtgccgatccctagtgtcgactatgcgagatctgattccggagctgccatgattgaagtggtagcagagctcagccggggtcctgtatttttggctggggaggcgctggagtgtgtagtgaccgtcaccaacccccttccgcccacggccacttctgcatccagtgaggccctggcctgggccagtgcccaaatccactgccagttccatgccagtgagagtcgagtagcactgcctcctcctgactctagtcagccagatgtccagcccgacagccagactgtctttctgccacaccgaggtgagaggggccagtgtatcctttctactccaccgaaaattctattctgtgacctgaggcttgatcctggagagtccaaatcatactcctacagtgaagtgctgcccatagagggaccaccctcctttcggggtcagtcagtcaagtacgtctacaaactgaccattggctgccagcgtgtcaactcccctatcactttactcagagtccctctgagggttcttgtgctgactggccttcaggatgtccggtttccccaggatgaggctgtagccccatccagtccattcttggaggaggatgaaggtgggaagaaagattcatggctagctgagctggctggggaacgcctaatggctgccacatcctgccgcagcctccatctatacaatatcagtgatggccgagggaaagttgggacgtttggcatcttcaaatctgtgtacagacttggcgaggacgtggtggggaccttaaacttaggggaaggaaccgtagcttgtttgcagttttcagtcagcttacagaccgaggagcgtgtacagcctgagtaccagcggcgacgtggggcagggggtgtcccctctgtgtcacatgtgactcacgcccggcaccaggaatcctgcctacatacaactagaaccagcttctccctcccaatccctctcagctccaccccaggcttctgtacagccattgtgtccttgaagtggagattgcattttgaatttgtaacgtcccgagaaccaggattggtactcctaccccctgtggaacagcccgaacctaccacctggacaggacctgagcaagtacctgtagacaccttcagctgggacctgcccatcaaggtgctgcctactagccccaccctggcctcatatgctgccccaggccccagcaccagcaccataaccatctga

SEQ ID NO: 26173 - DNA, 1537 bp, Homo sapiens
  source 1..1537: mol_type = unassigned DNA
atcgctccctcaagccctcaagtaggtgttggagagaggggtgatgcctggtgctggtggaacccctgcacagagacggacacaggatgagctctaagtacccgcggtctgtccggcgctgcctgcccctctgcgccctaacactggaagcagctctcattctcctcttctatttttttacccactatgacgcttccttagaggatcaaaaggggctcgtggcatcctatcaagtcggccaagatctgaccgtgatggcggcccttggcttgggcttcctcacctcaaatttccggagacacagctggagcagtgtggccttcaacctcttcatgctggcgcttggtgtgcagtgggcaatcctgctggacggcttcctgagccagttccctcctgggaaggtggtcatcacactgttcagtattcggctggccaccatgagtgctatgtcggtgctgatctcagcgggtgctgtcttggggaaggtcaacttggcgcagttggtggtgatggtgctggtggaggtgacagctttaggcaccctgaggatggtcatcagtaatatcttcaacacagactaccacatgaacctgaggcacttctacgtgttcgcagcctattttgggctgactgtggcctggtgcctgccaaagcctctacccaagggaacggaggataatgatcagagagcaacgatacccagtttgtctgccatgctgggcgccctcttcttgtggatgttctggccaagtgtcaactctgctctgctgagaagtccaatccaaaggaagaatgccatgttcaacacctactatgctctagcagtcagtgtggtgacagccatctcagggtcatccttggctcacccccaaaggaagatcagcatgacttatgtgcacagtgcggtgttggcaggaggcgtggctgtgggtacctcgtgtcacctgatcccttctccgtggcttgccatggtgctgggtcttgtggctgggctgatctccatcgggggagccaagtgcctgccggtgtgttgtaaccgagtgctggggattcaccacatctccgtcatgcactccatcttcagcttgctgggtctgcttggagagatcacctacattgtgctgctggtgcttcatactgtctggaacggcaatggcatgtttgctcctaaatctcaaaatatggaaagcacctcatgtggctaaatattttgatgaccaagttttctggaagtttcctcatttggctgttggattttaagcaaaagcatccaagaaaaacaaggcctgttcaaaaacaagacaacttcctctcactgttgcctgcatttgtacgtgagaaacgctcatgacagcaaagtctccttatgtataatgaaacaaggtcagagacagatttgatattaaaaaattaaagactaaaaacttagtttaagagtcaatttaataagtttaaaataaatgtttagtttcattaggatgatgctatcaatattttcttggttacagacacattattaaagttttgggttaatttt

SEQ ID NO: 26174 - DNA, 1477 bp, Homo sapiens
  source 1..1477: mol_type = unassigned DNA
gttggagagaggggtgatgcctggtgctggtggaacccctgcacagagacggacacaggatgagctctaagtacccgcggtctgtccggcgctgcctgcccctctgcgccctaacactggaagcagctctcattctcctcttctatttttttacccactatgacgcttccttagaggatcaaaaggggctcgtggcatcctatcaagtcggccaagatctgaccgtgatggcggcccttggcttgggcttcctcacctcaaatttccggagacacagctggagcagtgtggccttcaacctcttcatgctggcgcttggtgtgcagtgggcaatcctgctggacggcttcctgagccagttccctcctgggaaggtggtcatcacactgttcagtattcggctggccaccatgagtgctatgtcggtgctgatctcagcgggtgctgtcttggggaaggtcaacttggcgcagttggtggtgatggtgctggtggaggtgacagctttaggcaccctgaggatggtcatcagtaatatcttcaacacagactaccacatgaacctgaggcacttctacgtgttcgcagcctattttgggctgactgtggcctggtgcctgccaaagcctctacccaagggaacggaggataatgatcagagagcaacgatacccagtttgtctgccatgctgggcgccctcttcttgtggatgttctggccaagtgtcaactctgctctgctgagaagtccaatccaaaggaagaatgccatgttcaacacctactatgctctagcagtcagtgtggtgacagccatctcagggtcatccttggctcacccccaaaggaagatcagcatgacttatgtgcacagtgcggtgttggcaggaggcgtggctgtgggtacctcgtgtcacctgatcccttctccgtggcttgccatggtgctgggtcttgtggctgggctgatctccatcgggggagccaagtgcctgccggtgtgttgtaaccgagtgctggggattcaccacatctccgtcatgcactccatcttcagcttgctgggtctgcttggagagatcacctacattgtgctgctggtgcttcatactgtctggaacggcaatggcatgattggcttccaggtcctcctcagcattggggaactcagcttggccatcgtgatagctctcacgtctggtctcctgacaggtttgctcctaaatctcaaaatatggaaagcacctcatgtggctaaatattttgatgaccaagttttctggaagtttcctcatttggctgttggattttaagcaaaagcatccaagaaaaacaaggcctgttcaaaaacaagacaacttcctctcactgttgcctgcatttgtacgtgagaaacgctcatgacagcaaagtctccttatgtataatgaaacaaggtcagagacagatttgatattaaaaaattaaagactaaaaa

SEQ ID NO: 26175 - DNA, 1087 bp, Homo sapiens
  source 1..1087: mol_type = unassigned DNA
ggacacaggatgagctctaagtacccgcggtctgtccggcgctgcctgcccctctgcgccctaacactggaagcagctctcattctcctcttctatttttttacccactatgacgcttccttagaggatcaaaaggggctcgtggcatcctatcaagtcggccaagatctgaccgtgatggcggcccttggcttgggcttcctcacctcaaatttccggagacacagctggagcagtgtggccttcaacctcttcatgctggcgcttggtgtgcagtgggcaatcctgctggacggcttcctgagccagttccctcctgggaaggtggtcatcacactgttcagtattcggctggccaccatgagtgctatgtcggtgctgatctcagcgggtgctgtcttggggaaggtcaacttggcgcagttggtggtgatggtgctggtggaggtgacagctttaggcaccctgaggatggtcatcagtaatatcttcaacacttatgtgcacagtgcggtgttggcaggaggcgtggctgtgggtacctcgtgtcacctgatcccttctccgtggcttgccatggtgctgggtcttgtggctgggctgatctccatcgggggagccaagtgcctgccggtgtgttgtaaccgagtgctggggattcaccacatctccgtcatgcactccatcttcagcttgctgggtctgcttggagagatcacctacattgtgctgctggtgcttcatactgtctggaacggcaatggcatgtttgctcctaaatctcaaaatatggaaagcacctcatgtggctaaatattttgatgaccaagttttctggaagtttcctcatttggctgttggattttaagcaaaagcatccaagaaaaacaaggcctgttcaaaaacaagacaacttcctctcactgttgcctgcatttgtacgtgagaaacgctcatgacagcaaagtctccttatgtataatgaaacaaggtcagagacagatttgatattaaaaaattaaagactaaaaacttagtttaagagtcaatttaataagtttaaaataaatgtttagtttcattagga

SEQ ID NO: 26176 - DNA, 971 bp, Homo sapiens
  source 1..971: mol_type = unassigned DNA
cacaggatgagctctaagtacccgcggtctgtccggcgctgcctgcccctctgcgccctaacactggaagcagctctcattctcctcttctatttttttacccactatgacgcttccttagaggatcaaaaggggctcgtggcatcctatcaagtcggccaagatctgaccgtgatggcggcccttggcttgggcttcctcacctcaaatttccggagacacagctggagcagtgtggccttcaacctcttcatgctggcgcttggtgtgcagtgggcaatcctgctggacggcttcctgagccagttccctcctgggaaggtggtcatcacactgttcagtattcggctggccaccatgagtgctatgtcggtgctgatctcagcgggtgctgtcttggggaaggtcaacttggcgcagttggtggtgatggtgctggtggaggtgacagctttaggcaccctgaggatggtcatcagtaatatcttcaacgtgtgttgtaaccgagtgctggggattcaccacatctccgtcatgcactccatcttcagcttgctgggtctgcttggagagatcacctacattgtgctgctggtgcttcatactgtctggaacggcaatggcatgattggcttccaggtcctcctcagcattggggaactcagcttggccatcgtgatagctctcacgtctggtctcctgacaggtttgctcctaaatctcaaaatatggaaagcacctcatgtggctaaatattttgatgaccaagttttctggaagtttcctcatttggctgttggattttaagcaaaagcatccaagaaaaacaaggcctgttcaaaaacaagacaacttcctctcactgttgcctgcatttgtacgtgagaaacgctcatgacagcaaagtctccttatgtataatgaaacaaggtcagagacagatttgatattaaaaaattaaagactaaaaa

SEQ ID NO: 26177 - DNA, 1810 bp, Homo sapiens
  source 1..1810: mol_type = unassigned DNA
atgcccggggcgtgtgcggcggtgcggcccgggctccacgtccacaggctgggcagcgctgtgggccccgcgggcgccgagtccgcaggacccgcgagggcactaccgcgaagcatcggcctccgggccgggccgggccggaccgggagcctgctcggcgggtccgggctcctgcaaggcggggacgcggggccggcgacccttcacgcttcgtactcattgagcgccgattttatgccaggcaccgtgctggatctcccagtgcctggaagagaaaacccattctgtttcgaagggcatccagagctggtcacagtggggacccaccctccttttccaggctacgccagaccctgggtgtgtgtacgtttcaatggaagtgaatttaaatgtactttataaatcaaagactttttctgagactttggagagttccagtaatgagagcttctcattgttatcaaagccagggctggagaccagtggcagtcggccaagatctgaccgtgatggcggcccttggcttgggcttcctcacctcaaatttccggagacacagctggagcagtgtggccttcaacctcttcatgctggcgcttggtgtgcagtgggcaatcctgctggacggcttcctgagccagttccctcctgggaaggtggtcatcacactgttcagtattcggctggccaccatgagtgctatgtcggtgctgatctcagcgggtgctgtcttggggaaggtcaacttggcgcagttggtggtgatggtgctggtggaggtgacagctttaggcaccctgaggatggtcatcagtaatatcttcaacacagactaccacatgaacctgaggcacttctacgtgttcgcagcctattttgggctgactgtggcctggtgcctgccaaagcctctacccaagggaacggaggataatgatcagagagcaacgatacccagtttgtctgccatgctgggcgccctcttcttgtggatgttctggccaagtgtcaactctgctctgctgagaagtccaatccaaaggaagaatgccatgttcaacacctactatgctctagcagtcagtgtggtgacagccatctcagggtcatccttggctcacccccaaaggaagatcagcatgacttatgtgcacagtgcggtgttggcaggaggcgtggctgtgggtacctcgtgtcacctgatcccttctccgtggcttgccatggtgctgggtcttgtggctgggctgatctccatcgggggagccaagtgcctgccggtgtgttgtaaccgagtgctggggattcaccacatctccgtcatgcactccatcttcagcttgctgggtctgcttggagagatcacctacattgtgctgctggtgcttcatactgtctggaacggcaatggcatgattggcttccaggtcctcctcagcattggggaactcagcttggccatcgtgatagctctcacgtctggtctcctgacaggtttgctcctaaatctcaaaatatggaaagcacctcatgtggctaaatattttgatgaccaagttttctggaagtttcctcatttggctgttggattttaagcaaaagcatccaagaaaaacaaggcctgttcaaaaacaagacaacttcctctcactgttgcctgcatttgtacgtgagaaacgctcatgacagcaaagtctccttatgtataatgaaacaaggtcagagacagatttgatattaaaaaattaaagactaaaaacttagtttaagagtcaatttaataagtttaaaataaatgtttagtttcatt

SEQ ID NO: 26178 - DNA, 1235 bp, Homo sapiens
  source 1..1235: mol_type = unassigned DNA
gcacagagacggacacaggatgagctctaagtacccgcggtctgtccggcgctgcctgcccctctgcgccctaacactggaagcagctctcattctcctcttctatttttttacccactatgacgcttccttagaggatcaaaaggggctcgtggcatcctatcaagtcggccaagatctgaccgtgatggcggcccttggcttgggcttcctcacctcaaatttccggagacacagctggagcagtgtggccttcaacctcttcatgctggcgcttggtgtgcagtgggcaatcctgctggacggcttcctgagccagttccctcctgggaaggtggtcatcacactgttcagtattcggctggccaccatgagtgctatgtcggtgctgatctcagcgggtgctgtcttggggaaggtcaacttggcgcagttggtggtgatggtgctggtggaggtgacagctttaggcaccctgaggatggtcatcagtaatatcttcaacacagactaccacatgaacctgaggcacttctacgtgttcgcagcctattttgggctgactgtggcctggtgcctgccaaagcctctacccaagggaacggaggataatgatcagagagcaacgatacccagtttgtctgccatgctgggcgccctcttcttgtggatgttctggccaagtgtcaactctgctctgctgagaagtccaatccaaaggaagaatgccatgttcaacacctactatgctctagcagtcagtgtggtgacagccatctcagggtcatccttggctcacccccaaaggaagatcagcatgacttatgtgcacagtgcggtgttggcaggaggcgtggctgtgggtacctcgtgtcacctgatcccttctccgtggcttgccatggtgctgggtcttgtggctgggctgatctccatcgggggagccaagtgcctgccggattggcttccaggtcctcctcagcattggggaactcagcttggccatcgtgatagctctcacgtctggtctcctgacaggtttgctcctaaatctcaaaatatggaaagcacctcatgtggctaaatattttgatgaccaagttttctggaagtttcctcatttggctgttggattttaagcaaaagcatccaagaaaaacaaggcctgttcaaaaacaagacaacttcctctcactgttgcctgcatttgtacgtgagaaacgctcatgacagca

SEQ ID NO: 26179 - DNA, 1483 bp, Homo sapiens
  source 1..1483: mol_type = unassigned DNA
atgtactttataaatcaaagactttttctgagactttggagagttccagtaatgagagcttctcattgttatcaaagccagggctggagaccagtggcagtcggccaagatctgaccgtgatggcggcccttggcttgggcttcctcacctcaaatttccggagacacagctggagcagtgtggccttcaacctcttcatgctggcgcttggtgtgcagtgggcaatcctgctggacggcttcctgagccagttccctcctgggaaggtggtcatcacactgttcagtattcggctggccaccatgagtgctatgtcggtgctgatctcagcgggtgctgtcttggggaaggtcaacttggcgcagttggtggtgatggtgctggtggaggtgacagctttaggcaccctgaggatggtcatcagtaatatcttcaacacagactaccacatgaacctgaggcacttctacgtgttcgcagcctattttgggctgactgtggcctggtgcctgccaaagcctctacccaagggaacggaggataatgatcagagagcaacgatacccagtttgtctgccatgctgggcgccctcttcttgtggatgttctggccaagtgtcaactctgctctgctgagaagtccaatccaaaggaagaatgccatgttcaacacctactatgctctagcagtcagtgtggtgacagccatctcagggtcatccttggctcacccccaaaggaagatcagcatgacttatgtgcacagtgcggtgttggcaggaggcgtggctgtgggtacctcgtgtcacctgatcccttctccgtggcttgccatggtgctgggtcttgtggctgggctgatctccatcgggggagccaagtgcctgccggtgtgttgtaaccgagtgctggggattcaccacatctccgtcatgcactccatcttcagcttgctgggtctgcttggagagatcacctacattgtgctgctggtgcttcatactgtctggaacggcaatggcatgattggcttccaggtcctcctcagcattggggaactcagcttggccatcgtgatagctctcacgtctggtctcctgacaggtttgctcctaaatctcaaaatatggaaagcacctcatgtggctaaatattttgatgaccaagttttctggaagtttcctcatttggctgttggattttaagcaaaagcatccaagaaaaacaaggcctgttcaaaaacaagacaacttcctctcactgttgcctgcatttgtacgtgagaaacgctcatgacagcaaagtctccttatgtataatgaaacaaggtcagagacagatttgatattaaaaaattaaagactaaaaacttagtttaagagtcaatttaataagtttaaaataaatgtttagtttcattaggatgatgctatcaatattttcttggttacagacacattattaaagttttgggttaatttt

SEQ ID NO: 26180 - DNA, 1463 bp, Homo sapiens
  source 1..1463: mol_type = unassigned DNA
atcgctccctcaagccctcaagtaggtgttggagagaggggtgatgcctggtgctggtggaacccctgcacagagacggacacaggatgagctctaagtacccgcggtctgtccggcgctgcctgcccctctgcgccctaacactggaagcagctctcattctcctcttctatttttttacccactatgacgcttccttagaggatcaaaaggggctcgtggcatcctatcaagtcggccaagatctgaccgtgatggcggcccttggcttgggcttcctcacctcaaatttccggagacacagctggagcagtgtggccttcaacctcttcatgctggcgcttggtgtgcagtgggcaatcctgctggacggcttcctgagccagttccctcctgggaaggtggtcatcacactgttcagtattcggctggccaccatgagtgctatgtcggtgctgatctcagcgggtgctgtcttggggaaggtcaacttggcgcagttggtggtgatggtgctggtggaggtgacagctttaggcaccctgaggatggtcatcagtaatatcttcaacacagactaccacatgaacctgaggcacttctacgtgttcgcagcctattttgggctgactgtggcctggtgcctgccaaagcctctacccaagggaacggaggataatgatcagagagcaacgatacccagtttgtctgccatgctgggcgccctcttcttgtggatgttctggccaagtgtcaactctgctctgctgagaagtccaatccaaaggaagaatgccatgttcaacacctactatgctctagcagtcagtgtggtgacagccatctcagggtcatccttggctcacccccaaaggaagatcagcatgacttatgtgcacagtgcggtgttggcaggaggcgtggctgtgggtacctcgtgtcacctgatcccttctccgtggcttgccatggtgctgggtcttgtggctgggctgatctccatcgggggagccaagtgcctgccggtgtgttgtaaccgagtgctggggattcaccacatctccgtcatgcactccatcttcagcttgctgggtctgcttggagagatcacctacattgtgctgctggtgcttcatactgtctggaacggcaatggcattttcctcatttggctgttggattttaagcaaaagcatccaagaaaaacaaggcctgttcaaaaacaagacaacttcctctcactgttgcctgcatttgtacgtgagaaacgctcatgacagcaaagtctccttatgtataatgaaacaaggtcagagacagatttgatattaaaaaattaaagactaaaaacttagtttaagagtcaatttaataagtttaaaataaatgtttagtttcattaggatgatgctatcaatattttcttggttacagacacattattaaagttttgggttaatttt

SEQ ID NO: 26181 - DNA, 1345 bp, Homo sapiens
  source 1..1345: mol_type = unassigned DNA
atcgctccctcaagccctcaagtaggtgttggagagaggggtgatgcctggtgctggtggaacccctgcacagagacggacacaggatgagctctaagtacccgcggtctgtccggcgctgcctgcccctctgcgccctaacactggaagcagctctcattctcctcttctatttttttacccactatgacgcttccttagaggatcaaaaggggctcgtggcatcctatcaagtcggccaagatctgaccgtgatggcggcccttggcttgggcttcctcacctcaaatttccggagacacagctggagcagtgtggccttcaacctcttcatgctggcgcttggtgtgcagtgggcaatcctgctggacggcttcctgagccagttccctcctgggaaggtggtcatcacactgttcagtattcggctggccaccatgagtgctatgtcggtgctgatctcagcgggtgctgtcttggggaaggtcaacttggcgcagttggtggtgatggtgctggtggaggtgacagctttaggcaccctgaggatggtcatcagtaatatcttcaacacagactaccacatgaacctgaggcacttctacgtgttcgcagcctattttgggctgactgtggcctggtgcctgccaaagcctctacccaagggaacggaggataatgatcagagagcaacgatacccagtttgtctgccatgctgggcgccctcttcttgtggatgttctggccaagtgtcaactctgctctgctgagaagtccaatccaaaggaagaatgccatgttcaacacctactatgctctagcagtcagtgtggtgacagccatctcagggtcatccttggctcacccccaaaggaagatcagcatggattggcttccaggtcctcctcagcattggggaactcagcttggccatcgtgatagctctcacgtctggtctcctgacaggtttgctcctaaatctcaaaatatggaaagcacctcatgtggctaaatattttgatgaccaagttttctggaagtttcctcatttggctgttggattttaagcaaaagcatccaagaaaaacaaggcctgttcaaaaacaagacaacttcctctcactgttgcctgcatttgtacgtgagaaacgctcatgacagcaaagtctccttatgtataatgaaacaaggtcagagacagatttgatattaaaaaattaaagactaaaaacttagtttaagagtcaatttaataagtttaaaataaatgtttagtttcattaggatgatgctatcaatattttcttggttacagacacattattaaagttttgggttaatttt

SEQ ID NO: 26182 - DNA, 1411 bp, Homo sapiens
  source 1..1411: mol_type = unassigned DNA
atgagctctaagtacccgcggtctgtccggcgctgcctgcccctctgcgccctaacactggaagcagctctcattctcctcttctatttttttacccactatgacgcttccttagaggatcaaaaggggctcgtggcatcctatcaagtcggccaagatctgaccgtgatggcggcccttggcttgggcttcctcacctcaaatttccggagacacagctggagcagtgtggccttcaacctcttcatgctggcgcttggtgtgcagtgggcaatcctgctggacggcttcctgagccagttccctcctgggaaggtggtcatcacactgttcagtattcggctggccaccatgagtgctatgtcggtgctgatctcagcgggtgctgtcttggggaaggtcaacttggcgcagttggtggtgatggtgctggtggaggtgacagctttaggcaccctgaggatggtcatcagtaatatcttcaacacagactaccacatgaacctgaggcacttctacgtgttcgcagcctattttgggctgactgtggcctggtgcctgccaaagcctctacccaagggaacggaggataatgatcagagagcaacgatacccagtttgtctgccatgctgggcgccctcttcttgtggatgttctggccaagtgtcaactctgctctgctgagaagtccaatccaaaggaagaatgccatgttcaacacctactatgctctagcagtcagtgtggtgacagccatctcagggtcatccttggctcacccccaaaggaagatcagcatgacttatgtgcacagtgcggtgttggcaggaggcgtggctgtgggtacctcgtgtcacctgatcccttctccgtggcttgccatggtgctgggtcttgtggctgggctgatctccatcgggggagccaagtgcctgccggtgtgttgtaaccgagtgctggggattccacatctccgtcatgcactccatcttcagcttgctgggtctgcttggagagatcacctacattgtgctgctggtgcttcatactgtctggaacggcaatggcatgattggcttccaggtcctcctcagcattggggaactcagcttggccatcgtgatagctctcacgtctggtctcctgacaggtttgctcctaaatctcaaaatatggaaagcacctcatgtggctaaatattttgatgaccaagttttctggaagtttcctcatttggctgttggattttaagcaaaagcatccaagaaaaacaaggcctgttcaaaaacaagacaacttcctctcactgttgcctgcatttgtacgtgagaaacgctcatgacagcaaagtctccttatgtataatgaaacaaggtcagagacagatttgatattaaaaaattaaagact

SEQ ID NO: 26183 - DNA, 1302 bp, Homo sapiens
  source 1..1302: mol_type = unassigned DNA
atcgctccctcaagccctcaagtaggtgttggagagaggggtgatgcctggtgctggtggaacccctgcacagagacggacacaggatgagctctaagtacccgcggtctgtccggcgctgcctgcccctctgcgccctaacactggaagcagctctcattctcctcttctatttttttacccactatgacgcttccttagaggatcaaaaggggctcgtggcatcctatcaagtcggccaagatctgaccgtgatggcggcccttggcttgggcttcctcacctcaaatttccggagacacagctggagcagtgtggccttcaacctcttcatgctggcgcttggtgtgcagtgggcaatcctgctggacggcttcctgagccagttccctcctgggaaggtggtcatcacactgttcagtattcggctggccaccatgagtgctatgtcggtgctgatctcagcgggtgctgtcttggggaaggtcaacttggcgcagttggtggtgatggtgctggtggaggtgacagctttaggcaccctgaggatggtcatcagtaatatcttcaacacttatgtgcacagtgcggtgttggcaggaggcgtggctgtgggtacctcgtgtcacctgatcccttctccgtggcttgccatggtgctgggtcttgtggctgggctgatctccatcgggggagccaagtgcctgccggtgtgttgtaaccgagtgctggggattcaccacatctccgtcatgcactccatcttcagcttgctgggtctgcttggagagatcacctacattgtgctgctggtgcttcatactgtctggaacggcaatggcatgattggcttccaggtcctcctcagcattggggaactcagcttggccatcgtgatagctctcacgtctggtctcctgacaggtttgctcctaaatctcaaaatatggaaagcacctcatgtggctaaatattttgatgaccaagttttctggaagtttcctcatttggctgttggattttaagcaaaagcatccaagaaaaacaaggcctgttcaaaaacaagacaacttcctctcactgttgcctgcatttgtacgtgagaaacgctcatgacagcaaagtctccttatgtataatgaaacaaggtcagagacagatttgatattaaaaaattaaagactaaaaacttagtttaagagtcaatttaataagtttaaaataaatgtttagtttcattaggatgatgctatcaatattttcttggttacagacacattattaaagttttgggttaatttt

SEQ ID NO: 26184 - DNA, 1404 bp, Homo sapiens
  source 1..1404: mol_type = unassigned DNA
atcgctccctcaagccctcaagtaggtgttggagagaggggtgatgcctggtgctggtggaacccctgcacagagacggacacaggatgagctctaagtacccgcggtctgtccggcgctgcctgcccctctgcgccctaacactggaagcagctctcattctcctcttctatttttttacccactatgacgcttccttagaggatcaaaaggggctcgtggcatcctatcaagtcggccaagatctgaccgtgatggcggcccttggcttgggcttcctcacctcaaatttccggagacacagctggagcagtgtggccttcaacctcttcatgctggcgcttggtgtgcagtgggcaatcctgctggacggcttcctgagccagttccctcctgggaaggtggtcatcacactgttcagtattcggctggccaccatgagtgctatgtcggtgctgatctcagcgggtgctgtcttggggaaggtcaacttggcgcagttggtggtgatggtgctggtggaggtgacagctttaggcaccctgaggatggtcatcagtaatatcttcaacccaagtgtcaactctgctctgctgagaagtccaatccaaaggaagaatgccatgttcaacacctactatgctctagcagtcagtgtggtgacagccatctcagggtcatccttggctcacccccaaaggaagatcagcatgacttatgtgcacagtgcggtgttggcaggaggcgtggctgtgggtacctcgtgtcacctgatcccttctccgtggcttgccatggtgctgggtcttgtggtgtgttgtaaccgagtgctggggattcaccacatctccgtcatgcactccatcttcagcttgctgggtctgcttggagagatcacctacattgtgctgctggtgcttcatactgtctggaacggcaatggcatgattggcttccaggtcctcctcagcattggggaactcagcttggccatcgtgatagctctcacgtctggtctcctgacaggtttgctcctaaatctcaaaatatggaaagcacctcatgtggctaaatattttgatgaccaagttttctggaagtttcctcatttggctgttggattttaagcaaaagcatccaagaaaaacaaggcctgttcaaaaacaagacaacttcctctcactgttgcctgcatttgtacgtgagaaacgctcatgacagcaaagtctccttatgtataatgaaacaaggtcagagacagatttgatattaaaaaattaaagactaaaaacttagtttaagagtcaatttaataagtttaaaataaatgtttagtttcattaggatgatgctatcaatattttcttggttacagacacattattaaagttttgggttaatttt

SEQ ID NO: 26185 - DNA, 2833 bp, Homo sapiens
  source 1..2833: mol_type = unassigned DNA
ttggagagaggggtgatgcctggtgctggtggaacccctgcacagagacggacacaggatgagctctaagtacccgcggtctgtccggcgctgcctgcccctctgggccctaacactggaagcagctctcattctcctcttctatttttttacccactatgacgcttccttagaggatcaaaaggggctcgtggcatcctatcaagttggccaagatctgaccgtgatggcggccattggcttgggcttcctcacctcgagtttccggagacacagctggagcagtgtggccttcaacctcttcatgctggcgcttggtgtgcagtgggcaatcctgctggacggcttcctgagccagttcccttctgggaaggtggtcatcacactgttcagtattcggctggccaccatgagtgctttgtcggtgctgatctcagtggatgctgtcttggggaaggtcaacttggcgcagttggtggtgatggtgctggtggaggtgacagctttaggcaacctgaggatggtcatcagtaatatcttcaacacagactaccacatgaacatgatgcacatctacgtgttcgcagcctattttgggctgtctgtggcctggtgcctgccaaagcctctacccgagggaacggaggataaagatcagacagcaacgatacccagtttgtctgccatgctgggcgccctcttcttgtggatgttctggccaagtttcaactctgctctgctgagaagtccaatcgaaaggaagaatgccgtgttcaacacctactatgctgtagcagtcagcgtggtgacagccatctcagggtcatccttggctcacccccaagggaagatcagcaagacttatgtgcacagtgcggtgttggcaggaggcgtggctgtgggtacctcgtgtcacctgatcccttctccgtggcttgccatggtgctgggtcttgtggctgggctgatctccgtcgggggagccaagtacctgccggggtgttgtaaccgagtgctggggattccccacagctccatcatgggctacaacttcagcttgctgggtctgcttggagagatcatctacattgtgctgctggtgcttgataccgtcggagccggcaatggcatgattggcttccaggtcctcctcagcattggggaactcagcttggccatcgtgatagctctcatgtctggtctcctgacaggtttgctcctaaatcttaaaatatggaaagcacctcatgaggctaaatattttgatgaccaagttttctggaagtttcctcatttggctgttggattttaagcaaaagcatccaagaaaaacaaggcctgttcaaaaacaagacaacttcctctcactgttgcctgcatttgtacgtgagaaacgctcatgacagcaaagtctccaatgttcgcgcaggcactggagtcagagaaaatggagttgaatcctttctctgccactctttgaggagaatctcaccatttattatgcactgtagaatacaacaataaaatacagccatgtaccacataacaacatcttggtaaacaacagactgcatatatgatggtggtcatccagtaagctaaggttaatttattattattccttgtttttttttttttttttttttttttgagatgtagtcttactctgtcacccaggctagagtgcaatggcaccatcttggctcactgcaacctctacctcctgggttcaagcaaatctcctgcctcagcctccaaagtagctgggattacaggcacccaccacatctggctaattttttgtatttttagtaaagatggggtttcaccatgttggccaggctgatctcaaactcctgacctcaagtgatctgcccgcctcggcctcccaaagtgctggaaccacaggcctgagccactgtgcccagccttgtttgcttttttaacagataacagtgtgctcatagaaactgctttgacatgactgcaatcatgtgcttcatagaaacttaattagattataccactagagtcttcagatttttatactttttttttttgaaacggagtctcactctgtcaccaggctggagtgcagtgccgcaatctcggctcactgcaacctccgcctcccaggttcaagcaattctcctgcctcagcctcccgagtagctggaattacaagtgcgcactaccacacccagctaatttttgcatttttacttgacagggtttcaccatgttggctaggatagtttcaccaggatctcttggcctcatgatcagcctgcctcggcctcccaaagtgctgggattacaggtgtgagccaccgtgcccagcctatacttccctttttgaataccatttggtgttttgaagaattaacagctttgtgaacgtggcagtgcttgtgattcaggcttccattgagaccaaggggagaacctggttgcaggacaaacagacggacagcgtgtggcagtgtttaaatgctcttctgaaggctgatacgacagctctctgtgcactgattgcatatgcatcccaagattatattattgttttctactgctatgtgtcacactttgccaaacaggatgtggaaaatgaataagcggttttcttaggcacttcttaacagacaattggtcaaaatgaactccattgcttaagaaacacataaacaccatttagtcactgaacatagctatatgtatggttgttactatgggaaatcttgttttgccaattttctttgaaaattctggcagaccaaggttctttttgtttacataatacttgaaaaataaaaatgaacaagctaacaaacta

SEQ ID NO: 26186 - DNA, 1557 bp, Homo sapiens
  source 1..1557: mol_type = unassigned DNA
atgagctctaagtacccgcggtctgtccggcgctgcctgcccctctgggccctaacactggaagcagctctcattctcctcttctatttttttacccactatgacgcttccttagaggatcaaaaggggctcgtggcatcctatcaagttggccaagatctgaccgtgatggcggccattggcttgggcttcctcacctcgagtttccggagacacagctggagcagtgtggccttcaacctcttcatgctggcgcttggtgtgcagtgggcaatcctgctggacggcttcctgagccagttcccttctgggaaggtggtcatcacactgttcagtattcggctggccaccatgagtgctttgtcggtgctgatctcagtggatgctgtcttggggaaggtcaacttggcgcagttggtggtgatggtgctggtggaggtgacagctttaggcaacctgaggatggtcatcagtaatatcttcaacacagactaccacatgaacatgatgcacatctacgtgttcgcagcctattttgggctgtctgtggcctggtgcctgccaaagcctctacccgagggaacggaggataaagatcagacagcaacgatacccagtttgtctgccatgctgggcgccctcttcttgtggatgttctggccaagtttcaactctgctctgctgagaagtccaatcgaaaggaagaatgccgtgttcaacacctactatgctgtagcagtcagcgtggtgacagccatctcagggtcatccttggctcacccccaagggaagatcagcaagacttatgtgcacagtgcggtgttggcaggaggcgtggctgtgggtacctcgtgtcacctgatcccttctccgtggcttgccatggtgctgggtcttgtggctgggctgatctccgtcgggggagccaagtacctgccggggtgttgtaaccgagtgctggggattccccacagctccatcatgggctacaacttcagcttgctgggtctgcttggagagatcatctacattgtgctgctggtgcttgataccgtcggagccggcaatggcatgtcactcggctggaacctggctgtaaaaatggctgaagcaggtgatgaggagctgatgcgtttggacgtgtctcagagaaatcatggaggcgctgcggttcctaccggttcttggatgccttctacagagacaaccatagccccaaattatagggatcacatatcagtggtttcctcatttggctgttggattttaagcaaaagcatccaagaaaaacaaggcctgttcaaaaacaagacaacttcctctcactgttgcctgcatttgtacgtgagaaacgctcatgacagcaaagtctccaatgttcgcgcaggcactggagtcagagaaaatggagttgaatcctttctctgccactctttgaggagaatctcaccatttattatgcactgtagaatacaacaataaaatacagccatgtaccacataacaacatcttggtaaacaacagactgcatatatgatggtggtcatccagtaagc

SEQ ID NO: 26187 - DNA, 1387 bp, Homo sapiens
  source 1..1387: mol_type = unassigned DNA
atgagctctaagtacccgcggtctgtccggcgctgcctgcccctctgggccctaacactggaagcagctctcattctcctcttctatttttttacccactatgacgcttccttagaggatcaaaaggggctcgtggcatcctatcaagttggccaagatctgaccgtgatggcggccattggcttgggcttcctcacctcgagtttccggagacacagctggagcagtgtggccttcaacctcttcatgctggcgcttggtgtgcagtgggcaatcctgctggacggcttcctgagccagttcccttctgggaaggtggtcatcacactgttcagtattcggctggccaccatgagtgctttgtcggtgctgatctcagtggatgctgtcttggggaaggtcaacttggcgcagttggtggtgatggtgctggtggaggtgacagctttaggcaacctgaggatggtcatcagtaatatcttcaacacagactaccacatgaacatgatgcacatctacgtgttcgcagcctattttgggctgtctgtggcctggtgcctgccaaagcctctacccgagggaacggaggataaagatcagacagcaacgatacccagtttgtctgccatgctgggcgccctcttcttgtggatgttctggccaagtttcaactctgctctgctgagaagtccaatcgaaaggaagaatgccgtgttcaacacctactatgctgtagcagtcagcgtggtgacagccatctcagggtcatccttggctcacccccaagggaagatcagcaagacttatgtgcacagtgcggtgttggcaggaggcgtggctgtgggtacctcgtgtcacctgatcccttctccgtggcttgccatggtgctgggtcttgtggctgggctgatctccgtcgggggagccaagtacctgccggggtgttgtaaccgagtgctggggattccccacagctccatcatgggctacaacttcagcttgctgggtctgcttggagagatcatctacattgtgctgctggtgcttgataccgtcggagccggcaatggcattttcctcatttggctgttggattttaagcaaaagcatccaagaaaaacaaggcctgttcaaaaacaagacaacttcctctcactgttgcctgcatttgtacgtgagaaacgctcatgacagcaaagtctccaatgttcgcgcaggcactggagtcagagaaaatggagttgaatcctttctctgccactctttgaggagaatctcaccatttattatgcactgtagaatacaacaataaaatacagccatgtaccacataacaacatcttggtaaacaacagactgcatatatgatggtggtcatccagtaagc

SEQ ID NO: 26188 - DNA, 1333 bp, Homo sapiens
  source 1..1333: mol_type = unassigned DNA
atgagctctaagtacccgcggtctgtccggcgctgcctgcccctctgggccctaacactggaagcagctctcattctcctcttctatttttttacccactatgacgcttccttagaggatcaaaaggggctcgtggcatcctatcaagttggccaagatctgaccgtgatggcggccattggcttgggcttcctcacctcgagtttccggagacacagctggagcagtgtggccttcaacctcttcatgctggcgcttggtgtgcagtgggcaatcctgctggacggcttcctgagccagttcccttctgggaaggtggtcatcacactgttcagtattcggctggccaccatgagtgctttgtcggtgctgatctcagtggatgctgtcttggggaaggtcaacttggcgcagttggtggtgatggtgctggtggaggtgacagctttaggcaacctgaggatggtcatcagtaatatcttcaacacagactaccacatgaacatgatgcacatctacgtgttcgcagcctattttgggctgtctgtggcctggtgcctgccaaagcctctacccgagggaacggaggataaagatcagacagcaacgatacccagtttgtctgccatgctgggcgccctcttcttgtggatgttctggccaagtttcaactctgctctgctgagaagtccaatcgaaaggaagaatgccgtgttcaacacctactatgctgtagcagtcagcgtggtgacagccatctcagggtcatccttggctcacccccaagggaagatcagcaagacttatgtgcacagtgcggtgttggcaggaggcgtggctgtgggtacctcgtgtcacctgatcccttctccgtggcttgccatggtgctgggtcttgtggctgggctgatctccgtcgggggagccaagtacctgccggattggcttccaggtcctcctcagcattggggaactcagcttggccatcgtgatagctctcatgtctggtctcctgacagtttcctcatttggctgttggattttaagcaaaagcatccaagaaaaacaaggcctgttcaaaaacaagacaacttcctctcactgttgcctgcatttgtacgtgagaaacgctcatgacagcaaagtctccaatgttcgcgcaggcactggagtcagagaaaatggagttgaatcctttctctgccactctttgaggagaatctcaccatttattatgcactgtagaatacaacaataaaatacagccatgtaccacataacaacatcttggtaaacaacagactgcatatatgatggtggtcatccagtaagc

SEQ ID NO: 26189 - DNA, 2831 bp, Homo sapiens
  source 1..2831: mol_type = unassigned DNA
ttggagagaggggtgatgcctggtgctggtggaacccctgcacagagacggacacaggatgagctctaagtacccgcggtctgtccggcgctgcctgcccctctgggccctaacactggaagcagctctcattctcctcttctatttttttacccactatgacgcttccttagaggatcaaaaggggctcgtggcatcctatcaagttggccaagatctgaccgtgatggcggccattggcttgggcttcctcacctcgagtttccggagacacagctggagcagtgtggccttcaacctcttcatgctggcgcttggtgtgcagtgggcaatcctgctggacggcttcctgagccagttcccttctgggaaggtggtcatcacactgttcagtattcggctggccaccatgagtgctttgtcggtgctgatctcagtggatgctgtcttggggaaggtcaacttggcgcagttggtggtgatggtgctggtggaggtgacagctttaggcaacctgaggatggtcatcagtaatatcttcaacacagactaccacatgaacatgatgcacatctacgtgttcgcagcctattttgggctgtctgtggcctggtgcctgccaaagcctctacccgagggaacggaggataaagatcagacagcaacgatacccagtttgtctgccatgctgggcgccctcttcttgtggatgttctggccaagtttcaactctgctctgctgagaagtccaatcgaaaggaagaatgccgtgttcaacacctactatgctgtagcagtcagcgtggtgacagccatctcagggtcatccttggctcacccccaagggaagatcagcaagacttatgtgcacagtgcggtgttggcaggaggcgtggctgtgggtacctcgtgtcacctgatcccttctccgtggcttgccatggtgctgggtcttgtggctgggctgatctccgtcgggggagccaagtacctgccggggtgttgtaaccgagtgctggggattccccacagctccatcatgggctacaacttcagcttgctgggtctgcttggagagatcatctacattgtgctgctggtgcttgataccgtcggagccggcaatggcatgattggcttccaggtcctcctcagcattggggaactcagcttggccatcgtgatagctctcatgtctggtctcctgacaggtttgctcctaaatcttaaaatatggaaagcacctcatgaggctaaatattttgatgaccaagttttctggaagtttcctcatttggctgttggatttagcaaaagcatccaagaaaaacaaggcctgttcaaaaacaagacaacttcctctcactgttgcctgcatttgtacgtgagaaacgctcatgacagcaaagtctccaatgttcgcgcaggcactggagtcagagaaaatggagttgaatcctttctctgccactctttgaggagaatctcaccatttattatgcactgtagaatacaacaataaaatacagccatgtaccacataacaacatcttggtaaacaacagactgcatatatgatggtggtcatccagtaagctaaggttaatttattattattccttgtttttttttttttttttttttttttgagatgtagtcttactctgtcacccaggctagagtgcaatggcaccatcttggctcactgcaacctctacctcctgggttcaagcaaatctcctgcctcagcctccaaagtagctgggattacaggcacccaccacatctggctaattttttgtatttttagtaaagatggggtttcaccatgttggccaggctgatctcaaactcctgacctcaagtgatctgcccgcctcggcctcccaaagtgctggaaccacaggcctgagccactgtgcccagccttgtttgcttttttaacagataacagtgtgctcatagaaactgctttgacatgactgcaatcatgtgcttcatagaaacttaattagattataccactagagtcttcagatttttatactttttttttttgaaacggagtctcactctgtcaccaggctggagtgcagtgccgcaatctcggctcactgcaacctccgcctcccaggttcaagcaattctcctgcctcagcctcccgagtagctggaattacaagtgcgcactaccacacccagctaatttttgcatttttacttgacagggtttcaccatgttggctaggatagtttcaccaggatctcttggcctcatgatcagcctgcctcggcctcccaaagtgctgggattacaggtgtgagccaccgtgcccagcctatacttccctttttgaataccatttggtgttttgaagaattaacagctttgtgaacgtggcagtgcttgtgattcaggcttccattgagaccaaggggagaacctggttgcaggacaaacagacggacagcgtgtggcagtgtttaaatgctcttctgaaggctgatacgacagctctctgtgcactgattgcatatgcatcccaagattatattattgttttctactgctatgtgtcacactttgccaaacaggatgtggaaaatgaataagcggttttcttaggcacttcttaacagacaattggtcaaaatgaactccattgcttaagaaacacataaacaccatttagtcactgaacatagctatatgtatggttgttactatgggaaatcttgttttgccaattttctttgaaaattctggcagaccaaggttctttttgtttacataatacttgaaaaataaaaatgaacaagctaacaaacta

SEQ ID NO: 26190 - DNA, 1637 bp, Homo sapiens
  source 1..1637: mol_type = unassigned DNA
atgagctctaagtacccgcggtctgtccggcgctgcctgcccctctgggccctaacactggaagcagctctcattctcctcttctatttttttacccactatgacgcttccttagaggatcaaaaggggctcgtggcatcctatcaagttggccaagatctgaccgtgatggcggccattggcttgggcttcctcacctcgagtttccggagacacagctggagcagtgtggccttcaacctcttcatgctggcgcttggtgtgcagtgggcaatcctgctggacggcttcctgagccagttcccttctgggaaggtggtcatcacactgttcagtattcggctggccaccatgagtgctttgtcggtgctgatctcagtggatgctgtcttggggaaggtcaacttggcgcagttggtggtgatggtgctggtggaggtgacagctttaggcaacctgaggatggtcatcagtaatatcttcaacacagactaccacatgaacatgatgcacatctacgtgttcgcagcctattttgggctgtctgtggcctggtgcctgccaaagcctctacccgagggaacggaggataaagatcagacagcaacgatacccagtttgtctgccatgctgggcgccctcttcttgtggatgttctggccaagtttcaactctgctctgctgagaagtccaatcgaaaggaagaatgccgtgttcaacacctactatgctgtagcagtcagcgtggtgacagccatctcagggtcatccttggctcacccccaagggaagatcagcaagacttatgtgcacagtgcggtgttggcaggaggcgtggctgtgggtacctcgtgtcacctgatcccttctccgtggcttgccatggtgctgggtcttgtggctgggctgatctccgtcgggggagccaagtacctgccggggtgttgtaaccgagtgctggggattccccacagctccatcatgggctacaacttcagcttgctgggtctgcttggagagatcatctacattgtgctgctggtgcttgataccgtcggagccggcaatggcatgtcactcggctggaacctggctgtaaaaatggctgaagcaggtgatgaggagctgatgcgtttggacgtgtctcagagaaatcatggaggcgctgcggttcctaccggttcttggatgccttctacagagacaaccatagccccaaattatagggatcacatatcagtgggattggcttccaggtcctcctcagcattggggaactcagcttggccatcgtgatagctctcatgtctggtctcctgacagtttcctcatttggctgttggattttaagcaaaagcatccaagaaaaacaaggcctgttcaaaaacaagacaacttcctctcactgttgcctgcatttgtacgtgagaaacgctcatgacagcaaagtctccaatgttcgcgcaggcactggagtcagagaaaatggagttgaatcctttctctgccactctttgaggagaatctcaccatttattatgcactgtagaatacaacaataaaatacagccatgtaccacataacaacatcttggtaaacaacagactgcatatatgatggtggtcatccagtaagc

SEQ ID NO: 26191 - DNA, 2545 bp, Homo sapiens
  source 1..2545: mol_type = unassigned DNA
ttggagagaggggtgatgcctggtgctggtggaacccctgcacagagacggacacaggatgagctctaagtacccgcggtctgtccggcgctgcctgcccctctgggccctaacactggaagcagctctcattctcctcttctatttttttacccactatgacgcttccttagaggatcaaaaggggctcgtggcatcctatcaagttggccaagatctgaccgtgatggcggccattggcttgggcttcctcacctcgagtttccggagacacagctggagcagtgtggccttcaacctcttcatgctggcgcttggtgtgcagtgggcaatcctgctggacggcttcctgagccagttcccttctgggaaggtggtcatcacactgttcagtattcggctggccaccatgagtgctttgtcggtgctgatctcagtggatgctgtcttggggaaggtcaacttggcgcagttggtggtgatggtgctggtggaggtgacagctttaggcaacctgaggatggtcatcagtaatatcttcaacacagactaccacatgaacatgatgcacatctacgtgttcgcagcctattttgggctgtctgtggcctggtgcctgccaaagcctctacccgagggaacggaggataaagatcagacagcaacgatacccagtttgtctgccatgctgggcgccctcttcttgtggatgttctggccaagtttcaactctgctctgctgagaagtccaatcgaaaggaagaatgccgtgttcaacacctactatgctgtagcagtcagcgtggtgacagccatctcagggtcatccttggctcacccccaagggaagatcagcaagacttatgtgcacagtgcggtgttggcaggaggcgtggctgtgggtacctcgtgtcacctgatcccttctccgtggcttgccatggtgctgggtcttgtggctgggctgatctccgtcgggggagccaagtacctgccgtttcctcatttggctgttggattttaagcaaaagcatccaagaaaaacaaggcctgttcaaaaacaagacaacttcctctcactgttgcctgcatttgtacgtgagaaacgctcatgacagcaaagtctccaatgttcgcgcaggcactggagtcagagaaaatggagttgaatcctttctctgccactctttgaggagaatctcaccatttattatgcactgtagaatacaacaataaaatacagccatgtaccacataacaacatcttggtaaacaacagactgcatatatgatggtggtcatccagtaagctaaggttaatttattattattccttgtttttttttttttttttttttttttgagatgtagtcttactctgtcacccaggctagagtgcaatggcaccatcttggctcactgcaacctctacctcctgggttcaagcaaatctcctgcctcagcctccaaagtagctgggattacaggcacccaccacatctggctaattttttgtatttttagtaaagatggggtttcaccatgttggccaggctgatctcaaactcctgacctcaagtgatctgcccgcctcggcctcccaaagtgctggaaccacaggcctgagccactgtgcccagccttgtttgcttttttaacagataacagtgtgctcatagaaactgctttgacatgactgcaatcatgtgcttcatagaaacttaattagattataccactagagtcttcagatttttatactttttttttttgaaacggagtctcactctgtcaccaggctggagtgcagtgccgcaatctcggctcactgcaacctccgcctcccaggttcaagcaattctcctgcctcagcctcccgagtagctggaattacaagtgcgcactaccacacccagctaatttttgcatttttacttgacagggtttcaccatgttggctaggatagtttcaccaggatctcttggcctcatgatcagcctgcctcggcctcccaaagtgctgggattacaggtgtgagccaccgtgcccagcctatacttccctttttgaataccatttggtgttttgaagaattaacagctttgtgaacgtggcagtgcttgtgattcaggcttccattgagaccaaggggagaacctggttgcaggacaaacagacggacagcgtgtggcagtgtttaaatgctcttctgaaggctgatacgacagctctctgtgcactgattgcatatgcatcccaagattatattattgttttctactgctatgtgtcacactttgccaaacaggatgtggaaaatgaataagcggttttcttaggcacttcttaacagacaattggtcaaaatgaactccattgcttaagaaacacataaacaccatttagtcactgaacatagctatatgtatggttgttactatgggaaatcttgttttgccaattttctttgaaaattctggcagaccaaggttctttttgtttacataatacttgaaaaataaaaatgaacaagctaacaaacta

SEQ ID NO: 26192 - DNA, 1913 bp, Homo sapiens
  source 1..1913: mol_type = unassigned DNA
aaagcctgcgagcgccagccgagatcgcagcccaacccatggccgggtctcctagccgcgccgcgggccggcgactgcagcttcccctgctgtgcctcttcctccagggcgccactgccgtcctctttgctgtctttgtccgctacaaccacaaaaccgacgctgccctctggcaccggagcaaccacagtaacgcggacaatgaattttactttcgctacccaaatggagtttcgctcttgttgcccaggctggagtgcaatggcacaatctcggctcaccacaacctctgcctcccgggttcaagcgattctcctgcctcagtctcctgagtagctgggattacaggcttccaggacgtgcatgccatggtcttcgtgggctttggcttcctcatggtcttcctgcagcgttacggcttcagcagcgtgggcttcaccttcctcctggccgcctttgccctgcagtggtccacactggtccagggctttctccactccttccacggtggccacatccatgttggcgtggagagcatgatcaatgctgacttttgtgcgggggccgtgctcatctcctttggtgccgtcctgggcaagaccgggcctacccagctgctgctcatggccctgctggaggtggtgctgtttggcatcaatgagtttgtgctccttcatctcctgggggtgagagatgccggaggctccatgactatccacacctttggtgcctacttcgggctcgtcctttcgcgggttctgtacaggccccagctggagaagagcaagcaccgccagggctccgtctaccattcagacctcttcgccatgattgggaccatcttcctgtggatcttctggcctagcttcaatgctgcactcacagcgctgggggctgggcagcatcggacggccctcaacacatactactccctggctgccagcacccttggcacctttgccttgtcagcccttgtaggggaagatgggaggcttgacatggtccacatccaaaatgcagcgctggctggaggggttgtggtggggacctcaagtgaaatgatgctgacaccctttggggctctggcagctggcttcttggctgggactgtctccacgctggggtacaagttcttcacgcccatccttgaatcaaaattcaaagtccaagacacatgtggagtccacaacctccatgggatgccgggggtcctgggggccctcctgggggtccttgtggctggacttgccacccatgaagcttacggagatggcctggagagtgtgtttccactcatagccgagggccagcgcagtgccacgtcacaggccatgcaccagctcttcgggctgtttgtcacactgatgtttgcctctgtgggcgggggccttggagggctcctgctgaagctaccctttctggactccccccccagactcccagcactacgaggaccaagttcactggcaggtgcctggcgagcatgaggataaagcccagagacctctgagggtggaggaggcagacactcaggcctaacccactgccagcccctgagaggacacgctccttttcgaagatgctgactggctgctactaggaagttctttttgagctcccattcctccagctgcaagaagggagccatgagccagaaggaggcccctttccacaggcagcgtctccacagggagaggggcaacaggaggctgggaaatggtggggagtggggccgtaactgggtacaatagggggaacctcaccagatgcccaacccgactgccctaccagcctgcacatgggtagaagaggccaaattgaggcacccaagtgatccactggccccacgtcacacagttacagtgaagcccaagccaggcctggttgagggtgataaacgccactgtctctaa

SEQ ID NO: 26193 - DNA, 1863 bp, Homo sapiens
  source 1..1863: mol_type = unassigned DNA
aaagcctgcgagcgccagccgagatcgcagcccaacccatggccgggtctcctagccgcgccgcgggccggcgactgcagcttcccctgctgtgcctcttcctccagggcgccactgccgtcctctttgctgtctttgtccgctacaaccacaaaaccgacgctgccctctggcaccggagcaaccacagtaacgcggacaatgaattttactttcgctacccaaaagagtctcactctgttgcccaggctggagtgcaacggcgcaatctcggctcactgcaaccttcacctcccaggcttccaggacgtgcatgccatggtcttcgtgggctttggcttcctcatggtcttcctgcagcgttacggcttcagcagcgtgggcttcaccttcctcctggccgcctttgccctgcagtggtccacactggtccagggctttctccactccttccacggtggccacatccatgttggcgtggagagcatgatcaatgctgacttttgtgcgggggccgtgctcatctcctttggtgccgtcctgggcaagaccgggcctacccagctgctgctcatggccctgctggaggtggtgctgtttggcatcaatgagtttgtgctccttcatctcctgggggtgagagatgccggaggctccatgactatccacacctttggtgcctacttcgggctcgtcctttcgcgggttctgtacaggccccagctggagaagagcaagcaccgccagggctccgtctaccattcagacctcttcgccatgattgggaccatcttcctgtggatcttctggcctagcttcaatgctgcactcacagcgctgggggctgggcagcatcggacggccctcaacacatactactccctggctgccagcacccttggcacctttgccttgtcagcccttgtaggggaagatgggaggcttgacatggtccacatccaaaatgcagcgctggctggaggggttgtggtggggacctcaagtgaaatgatgctgacaccctttggggctctggcagctggcttcttggctgggactgtctccacgctggggtacaagttcttcacgcccatccttgaatcaaaattcaaagtccaagacacatgtggagtccacaacctccatgggatgccgggggtcctgggggccctcctgggggtccttgtggctggacttgccacccatgaagcttacggagatggcctggagagtgtgtttccactcatagccgagggccagcgcagtgccacgtcacaggccatgcaccagctcttcgggctgtttgtcacactgatgtttgcctctgtgggcgggggccttggagggctcctgctgaagctaccctttctggactccccccccagactcccagcactacgaggaccaagttcactggcaggtgcctggcgagcatgaggataaagcccagagacctctgagggtggaggaggcagacactcaggcctaacccactgccagcccctgagaggacacgctccttttcgaagatgctgactggctgctactaggaagttctttttgagctcccattcctccagctgcaagaagggagccatgagccagaaggaggcccctttccacaggcagcgtctccacagggagaggggcaacaggaggctgggaaatggtggggagtggggccgtaactgggtacaatagggggaacctcaccagatgcccaacccgactgccctaccagcctgcacatgggtagaagaggccaaattgaggcacccaagtgatccactggccccacgtcacacagttacagtgaagcccaagccaggcctggttgagggtgataaacgccactgtctctaa

SEQ ID NO: 26194 - DNA, 1911 bp, Homo sapiens
  source 1..1911: mol_type = unassigned DNA
aaagcctgcgagcgccagccgagatcgcagcccaacccatggccgggtctcctagccgcgccgcgggccggcgactgcagcttcccctgctgtgcctcttcctccagggcgccactgccgtcctctttgctgtctttgtccgctacaaccacaaaaccgacgctgccctctggcaccggagcaaccacagtaacgcggacaatgaattttactttcgctacccaaatggagtttcgctcttgttgcccaggctggagtgcaatggcacaatctcggctcaccacaacctctgcctcccgggttcaagcgattctcctgcctcagtctcctgagtagctgggattacaggcttccaggacgtgcatgccatggtcttcgtgggctttggcttcctcatggtcttcctgcagcgttacggcttcagcagcgtgggcttcaccttcctcctggccgcctttgccctgcagtggtccacactggtccagggctttctccactccttccacggtggccacatccatgttggcgtggagagcatgatcaatgctgacttttgtgcgggggccgtgctcatctcctttggtgccgtcctgggcaagaccgggcctacccagctgctgctcatggccctgctggaggtggtgctgtttggcatcaatgagtttgtgctccttcatctcctgggggtgagagatgccggaggctccatgactatccacacctttggtgcctacttcgggctcgtcctttcgcgggttctgtacaggccccagctggagaagagcaagcaccgccagggctccgtctaccattcagacctcttcgccatgattgggaccatcttcctgtggatcttctggcctagcttcaatgctgcactcacagcgctgggggctgggcagcatcggacggccctcaacacatactactccctggctgccagcacccttggcacctttgccttgtcagcccttgtaggggaagatgggaggcttgacatggtccacatccaaaatgcagcgctggctggaggggttgtggtggggacctcaagtgaaatgatgctgacaccctttggggctctggcagctggcttcttggctgggactgtctccacgctggggtacaagttcttcacgcccatccttgaatcaaaattcaaagtccaagacacatgtggagtccacaacctccatgggatgccgggggtcctgggggccctcctgggggtccttgtggctggacttgccacccatgaagcttacggagatggcctggagagtgtgtttccactcatagccgagggccagcgcagtgccacgtcacaggccatgcaccagctcttcgggctgtttgtcacactgatgtttgcctctgtgggcgggggccttggagggctcctgctgaagctaccctttctggactccccccccagactcccagcactacgaggaccaagttcactggcaggtgcctggcgagcatgaggataaagcccagagacctctgagggtggaggaggcagacactcaggcctaacccactgccagcccctgagaggacacgctccttttcgaagatgctgactggctgctactaggaagttctttttgagctcccattcctccagctgcaagaagggagccatgagccagaaggaggcccctttccacaggcagcgtctccacagggagaggggcaacaggaggctgggaaatggtggggagtggggccgtaactgggtacaatagggggaacctcaccagatgcccaacccgactgccctaccagcctgcacatgggtagaagaggccaaattgaggcacccaagtgatccactggccccacgtcacacagttacagtgaagcccaagccaggcctggttgagggtgataaacgccactgtctct

SEQ ID NO: 26195 - DNA, 1784 bp, Homo sapiens
  source 1..1784: mol_type = unassigned DNA
aaagcctgcgagcgccagccgagatcgcagcccaacccatggccgggtctcctagccgcgccgcgggccggcgactgcagcttcccctgctgtgcctcttcctccagggcgccactgccgtcctctttgctgtctttgtccgctacaaccacaaaaccgacgctgccctctggcaccggagcaaccacagtaacgcggacaatgaattttactttcgctacccaagcttccaggacgtgcatgccatggtcttcgtgggctttggcttcctcatggtcttcctgcagcgttacggcttcagcagcgtgggcttcaccttcctcctggccgcctttgccctgcagtggtccacactggtccagggctttctccactccttccacggtggccacatccatgttggcgtggagagcatgatcaatgctgacttttgtgcgggggccgtgctcatctcctttggtgccgtcctgggcaagaccgggcctacccagctgctgctcatggccctgctggaggtggtgctgtttggcatcaatgagtttgtgctccttcatctcctgggggtgagagatgccggaggctccatgactatccacacctttggtgcctacttcgggctcgtcctttcgcgggttctgtacaggccccagctggagaagagcaagcaccgccagggctccgtctaccattcagacctcttcgccatgattgggaccatcttcctgtggatcttctggcctagcttcaatgctgcactcacagcgctgggggctgggcagcatcggacggccctcaacacatactactccctggctgccagcacccttggcacctttgccttgtcagcccttgtaggggaagatgggaggcttgacatggtccacatccaaaatgcagcgctggctggaggggttgtggtggggacctcaagtgaaatgatgctgacaccctttggggctctggcagctggcttcttggctgggactgtctccacgctggggtacaagttcttcacgcccatccttgaatcaaaattcaaagtccaagacacatgtggagtccacaacctccatgggatgccgggggtcctgggggccctcctgggggtccttgtggctggacttgccacccatgaagcttacggagatggcctggagagtgtgtttccactcatagccgagggccagcgcagtgccacgtcacaggccatgcaccagctcttcgggctgtttgtcacactgatgtttgcctctgtgggcgggggccttggagggctcctgctgaagctaccctttctggaccccccagactcccagcactacgaggaccaagttcactggcaggtgcctggcgagcatgaggataaagcccagagacctctgagggtggaggaggcagacactcaggcctaacccactgccagcccctgagaggacacgctccttttcgaagatgctgactggctgctactaggaagttctttttgagctcccattcctccagctgcaagaagggagccatgagccagaaggaggcccctttccacaggcagcgtctccacagggagaggggcaacaggaggctgggaaatggtggggagtggggccgtaactgggtacaatagggggaacctcaccagatgcccaacccgactgccctaccagcctgcacatgggtagaagaggccaaattgaggcacccaagtgatccactggccccacgtcacacagttacagtgaagcccaagccaggcctggttgagggtgataaacgccactgtctct

SEQ ID NO: 26196 - DNA, 1790 bp, Homo sapiens
  source 1..1790: mol_type = unassigned DNA
aaagcctgcgagcgccagccgagatcgcagcccaacccatggccgggtctcctagccgcgccgcgggccggcgactgcagcttcccctgctgtgcctcttcctccagggcgccactgccgtcctctttgctgtctttgtccgctacaaccacaaaaccgacgctgccctctggcaccggagcaaccacagtaacgcggacaatgaattttactttcgctacccaagcttccaggacgtgcatgccatggtcttcgtgggctttggcttcctcatggtcttcctgcagcgttacggcttcagcagcgtgggcttcaccttcctcctggccgcctttgccctgcagtggtccacactggtccagggctttctccactccttccacggtggccacatccatgttggcgtggagagcatgatcaatgctgacttttgtgcgggggccgtgctcatctcctttggtgccgtcctgggcaagaccgggcctacccagctgctgctcatggccctgctggaggtggtgctgtttggcatcaatgagtttgtgctccttcatctcctgggggtgagagatgccggaggctccatgactatccacacctttggtgcctacttcgggctcgtcctttcgcgggttctgtacaggccccagctggagaagagcaagcaccgccagggctccgtctaccattcagacctcttcgccatgattgggaccatcttcctgtggatcttctggcctagcttcaatgctgcactcacagcgctgggggctgggcagcatcggacggccctcaacacatactactccctggctgccagcacccttggcacctttgccttgtcagcccttgtaggggaagatgggaggcttgacatggtccacatccaaaatgcagcgctggctggaggggttgtggtggggacctcaagtgaaatgatgctgacaccctttggggctctggcagctggcttcttggctgggactgtctccacgctggggtacaagttcttcacgcccatccttgaatcaaaattcaaagtccaagacacatgtggagtccacaacctccatgggatgccgggggtcctgggggccctcctgggggtccttgtggctggacttgccacccatgaagcttacggagatggcctggagagtgtgtttccactcatagccgagggccagcgcagtgccacgtcacaggccatgcaccagctcttcgggctgtttgtcacactgatgtttgcctctgtgggcgggggccttggagggctcctgctgaagctaccctttctggactccccccccagactcccagcactacgaggaccaagttcactggcaggtgcctggcgagcatgaggataaagcccagagacctctgagggtggaggaggcagacactcaggcctaacccactgccagcccctgagaggacacgctccttttcgaagatgctgactggctgctactaggaagttctttttgagctcccattcctccagctgcaagaagggagccatgagccagaaggaggcccctttccacaggcagcgtctccacagggagaggggcaacaggaggctgggaaatggtggggagtggggccgtaactgggtacaatagggggaacctcaccagatgcccaacccgactgccctaccagcctgcacatgggtagaagaggccaaattgaggcacccaagtgatccactggccccacgtcacacagttacagtgaagcccaagccaggcctggttgagggtgataaacgccactgtctctaa

SEQ ID NO: 26197 - DNA, 2022 bp, Homo sapiens
  source 1..2022: mol_type = unassigned DNA
aaagcctgcgagcgccagccgagatcgcagcccaacccatggccgggtctcctagccgcgccgcgggccggcgactgcagcttcccctgctgtgcctcttcctccagggcgccactgccgtcctctttgctgtctttgtccgctacaaccacaaaaccgacgctgccctctggcaccggagcaaccacagtaacgcggacaatgaattttactttcgctacccaaatggagtttcgctcttgttgcccaggctggagtgcaatggcacaatctcggctcaccacaacctctgcctcccgggttcaagcgattctcctgcctcagtctcctgagtagctgggattacaggcttccaggacgtgcatgccatggtcttcgtgggctttggcttcctcatggtcttcctgcagcgttacggcttcagcagcgtgggcttcaccttcctcctggccgcctttgccctgcagtggtccacactggtccagggctttctccactccttccacggtggccacatccatgttggcgtggagagcatgatcaatgctgacttttgtgcgggggccgtgctcatctcctttggtgccgtcctgggcaagaccgggcctacccagctgctgctcatggccctgctggaggtggtgctgtttggcatcaatgagtttgtgctccttcatctcctgggggtgagagtctggggagggatggagtcgggggtggggggtggtcaaggtcagcctctgagccaggagcgtgggggtgggggcggggtgctgcctctcaccccacctccccaggtgagagatgccggaggctccatgactatccacacctttggtgcctacttcgggctcgtcctttcgcgggttctgtacaggccccagctggagaagagcaagcaccgccagggctccgtctaccattcagacctcttcgccatgattgggaccatcttcctgtggatcttctggcctagcttcaatgctgcactcacagcgctgggggctgggcagcatcggacggccctcaacacatactactccctggctgccagcacccttggcacctttgccttgtcagcccttgtaggggaagatgggaggcttgacatggtccacatccaaaatgcagcgctggctggaggggttgtggtggggacctcaagtgaaatgatgctgacaccctttggggctctggcagctggcttcttggctgggactgtctccacgctggggtacaagttcttcacgcccatccttgaatcaaaattcaaagtccaagacacatgtggagtccacaacctccatgggatgccgggggtcctgggggccctcctgggggtccttgtggctggacttgccacccatgaagcttacggagatggcctggagagtgtgtttccactcatagccgagggccagcgcagtgccacgtcacaggccatgcaccagctcttcgggctgtttgtcacactgatgtttgcctctgtgggcgggggccttggagggctcctgctgaagctaccctttctggactccccccccagactcccagcactacgaggaccaagttcactggcaggtgcctggcgagcatgaggataaagcccagagacctctgagggtggaggaggcagacactcaggcctaacccactgccagcccctgagaggacacgctccttttcgaagatgctgactggctgctactaggaagttctttttgagctcccattcctccagctgcaagaagggagccatgagccagaaggaggcccctttccacaggcagcgtctccacagggagaggggcaacaggaggctgggaaatggtggggagtggggccgtaactgggtacaatagggggaacctcaccagatgcccaacccgactgccctaccagcctgcacatgggtagaagaggccaaattgaggcacccaagtgatccactggccccacgtcacacagttacagtgaagcccaagccaggcctggttgagggtgataaacgccactgtctct

SEQ ID NO: 26198 - DNA, 1493 bp, Homo sapiens
  source 1..1493: mol_type = unassigned DNA
aaagcctgcgagcgccagccgagatcgcagcccaacccatggccgggtctcctagccgcgccgcgggccggcgactgcagcttcccctgctgtgcctcttcctccagggcgccactgccgtcctctttgctgtctttgtccgctacaaccacaaaaccgacgctgccctctggcaccggagcaaccacagtaacgcggacaatgaattttactttcgctacccaaatggagtttcgctcttgttgcccaggctggagtgcaatggcacaatctcggctcaccacaacctctgcctcccgggttcaagcgattctcctgcctcagtctcctgagtagctgggattacaggcttccaggacgtgcatgccatggtcttcgtgggctttggcttcctcatggtcttcctgcagcgttacggcttcagcagcgtgggcttcaccttcctcctggccgcctttgccctgcagtggtccacactggtccagggctttctccactccttccacggtggccacatccatgttggcgtggagagcatgatcaatgctgacttttgtgcgggggccgtgctcatctcctttggtgccgtcctgggcaagaccgggcctacccagctgctgctcatggccctgctggaggtggtgctgtttggcatcaatgagtttgtgctccttcatctcctgggggtgagagtctggggagggatggagtcgggggtggggggtggtcaaggtcagcctctgagccaggagcgtgggggtgggggcggggtgctgcctctcaccccacctccccaggtgagagatgccggaggctccatgactatccacacctttggtgcctacttcgggctcgtcctttcgcgggttctgtacaggccccagctggagaagagcaagcaccgccagggctccgtctaccattcagacctcttcgccatgattgggaccatcttcctgtggatcttctggcctagcttcaatgctgcactcacagcgctgggggctgggcagcatcggacggccctcaacacatactactccctggctgccagcacccttggcacctttgccttgtcagcccttgtaggggaagatgggaggcttgacatgcccatccttgaatcaaaattcaaagtccaagacacatgtggagtccacaacctccatgggatgccgggggtcctgggggccctcctgggggtccttgtggctggacttgccacccatgaagcttacggagatggcctggagagtgtgtttccactcatagccgagggccagcgcagtgccacgtcacaggccatgcaccagctcttcgggctgtttgtcacactgatgtttgcctctgtgggcgggggccttggaggcatcatattggtcttatgcctcctagacccctgtgccctgtggcactgggtggcaccctcctccatggtggggggcagagaagcctcacagatcctcccctaccaccaccagggctcctgctga

SEQ ID NO: 26199 - DNA, 1197 bp, Homo sapiens
  source 1..1197: mol_type = unassigned DNA
aaagcctgcgagcgccagccgagatcgcagcccaacccatggccgggtctcctagccgcgccgcgggccggcgactgcagcttcccctgctgtgcctcttcctccagggcgccactgccgtcctctttgctgtctttgtccgctacaaccacaaaaccgacgctgccctctggcaccggagcaaccacagtaacgcggacaatgaattttactttcgctacccaaggaccatcttcctgtggatcttctggcctagcttcaatgctgcactcacagcgctgggggctgggcagcatcggacggccctcaacacatactactccctggctgccagcacccttggcacctttgccttgtcagcccttgtaggggaagatgggaggcttgacatggtccacatccaaaatgcagcgctggctggaggggttgtggtggggacctcaagtgaaatgatgctgacaccctttggggctctggcagctggcttcttggctgggactgtctccacgctgggcccatccttgaatcaaaattcaaagtccaagacacatgtggagtccacaacctccatgggatgccgggggtcctgggggccctcctgggggtccttgtggctggacttgccacccatgaagcttacggagatgggtgagtttcctcccaacccgtactgcagtcgtcatccatctggaatgacctctgtcattctctttcactgtgtgtgaccaagaaaaaagaatgaattcattcattcatccatattctgggagcaaaggaaattggagttaacaaaaccaacccagaaactgccttcctggtcctctatcaagtgcagcagaaggtcatggaacaaatgacttcaagagtgttacttgttactgaagggtcagtaagagataatgacctttaggatctatttttgcacatcaagggtgggcaaaagcaacccgcaaatggagtcttaaaaggtgcctaggtgtctgctggcctacaagggtgggaaggtgttccaggctgtgggcctggcttgagcagtggcctggaggtgagactcagcctggcatgcaccctcgagaccctcttggccacttcctgttccccagtgtgagttccagtgccatgagcagccctggccccgggctgcatccctctctctccctacccctgcctttcctctatctggtctccctgcagcct

SEQ ID NO: 26200 - DNA, 1982 bp, Homo sapiens
  source 1..1982: mol_type = unassigned DNA
ctcaaaagccccgccggcctccgagcgtccgaaccgcccgctgccagcccggccaggcacccctgcagcatggcctggaacaccaacctccgctggcggctgccgctcacctgcctgctcctgcaggtgattatggtgattctcttcggggtgttcgtgcgctacgacttcgaggccgacgcccactggtggtcagagaggacgcacaagaacttgagcgacatggagaacgaattctactatcgctacccaagcttccaggacgtgcacgtgatggtcttcgtgggcttcggcttcctcatgactttcctgcagcgctacggcttcagcgccgtgggcttcaacttcctgttggcagccttcggcatccagtgggcgctgctcatgcagggctggttccacttcttacaagaccgctacatcgtcgtgggcgtggagaacctcatcaacgctgacttctgcgtggcctctgtctgcgtggcctttggggcagttctgggtaaagtcagccccattcagctgctcatcatgactttcttccaagtgaccctcttcgctgtgaatgagttcattctccttaacctgctaaaggtgaaggatgcaggaggctccatgaccatccacacatttggcgcctactttgggctcacagtgacccggatcctctaccgacgcaacctagagcagagcaaggagagacagaattctgtgtaccagtcggacctctttgccatgattggcaccctcttcctgtggatgtactggcccagcttcaactcagccatatcctaccatggggacagccagcaccgagccgccatcaacacctactgctccttggcagcctgcgtgcttacctcggtggcaatatccagtgccctgcacaagaagggcaagctggacatggtgcacatccagaatgccacgctcgcaggaggggtggccgtgggtaccgctgctgagatgatgctcatgccttacggtgccctcatcatcggcttcgtctgcggcatcatctccaccctgggttttgtatacctgaccccattcctggagtcccggctgcacatccaggacacatgtggcattaacaatctgcatggcattcctggcatcataggcggcatcgtgggtgctgtgacagcggcctccgccagccttgaagtctatggaaaagaagggcttgtccattcctttgactttcaaggtttcaacggggactggaccgcaagaacacagggaaagttccagatttatggtctcttggtgaccctggccatggccctgatgggtggcatcattgtggggctcattttgagattaccattctggggacaaccttcagatgagaactgctttgaggatgcggtctactgggagatgcctgaagggaacagcactgtctacatccctgaggaccccaccttcaagccctcaggaccctcagtaccctcagtacccatggtgtccccactacccatggcttcctcggtacccttggtaccctaggctcccagggcaggtgaggagcaggctccacagactgtcctggggcccagaggagctggtgctgacctagctagggatgcaagagtgagcaagcagcacccccacctgctggcttggcctcaaggtgcctccacccctgccctccccttcatcccagggggtctgactgagaatggagaaggagaagctacaaagtgggcatccaagccgggttctggctgcagaagttctgcctctgcctggggtcttggccacattggagaaaaacaggctcaaagtggggctgggacctggtgggtgaacctgagctctcccaggagacaacttagctgccagtcaccacctatgaggctcttctaccccgtgcctgcacctcggccagcatctcctatgctccctgggtcccccagacctctctgtgttgtgtgcgtggcagcctccaggaataaacattcttgttgtcctttgtaaaa

SEQ ID NO: 26201 - DNA, 1882 bp, Homo sapiens
  source 1..1882: mol_type = unassigned DNA
atggcctggaacacctgcctgctcctgcaggtgattatggtgattctcttcggggtgttcgtgcgctacgacttcgaggccgacgcccactggtggtcagagaggacgcacaagaacttgagcgacatggagaacgaattctactatcgctacccaagcttccaggacgtgcacgtgatggtcttcgtgggcttcggcttcctcatgactttcctgcagcgctacggcttcagcgccgtgggcttcaacttcctgttggcagccttcggcatccagtgggcgctgctcatgcagggctggttccacttcttacaagaccgctacatcgtcgtgggcgtggagaacctcatcaacgctgacttctgcgtggcctctgtctgcgtggcctttggggcagttctgggtaaagtcagccccattcagctgctcatcatgactttcttccaagtgaccctcttcgctgtgaatgagttcattctccttaacctgctaaaggtgaaggatgcaggaggctccatgaccatccacacatttggcgcctactttgggctcacagtgacccggatcctctaccgacgcaacctagagcagagcaaggagagacagaattctgtgtaccagtcggacctctttgccatgattggcaccctcttcctgtggatgtactggcccagcttcaactcagccatatcctaccatggggacagccagcaccgagccgccatcaacacctactgctccttggcagcctgcgtgcttacctcggtggcaatatccagtgccctgcacaagaagggcaagctggacatggtgcacatccagaatgccacgctcgcaggaggggtggccgtgggtaccgctgctgagatgatgctcatgccttacggtgccctcatcatcggcttcgtctgcggcatcatctccaccctgggttttgtatacctgaccccattcctggagtcccggctgcacatccaggacacatgtggcattaacaatctgcatggcattcctggcatcataggcggcatcgtgggtgctgtgacagcggcctccgccagccttgaagtctatggaaaagaagggcttgtccattcctttgactttcaaggtttcaacggggactggaccgcaagaacacagggaaagttccagatttatggtctcttggtgaccctggccatggccctgatgggtggcatcattgtggggctcattttgagattaccattctggggacaaccttcagatgagaactgctttgaggatgcggtctactgggagatgcctgaagggaacagcactgtctacatccctgaggaccccaccttcaagccctcaggaccctcagtaccctcagtacccatggtgtccccactacccatggcttcctcggtacccttggtaccctaggctcccagggcaggtgaggagcaggctccacagactgtcctggggcccagaggagctggtgctgacctagctagggatgcaagagtgagcaagcagcacccccacctgctggcttggcctcaaggtgcctccacccctgccctccccttcatcccagggggtctgactgagaatggagaaggagaagctacaaagtgggcatccaagccgggttctggctgcagaagttctgcctctgcctggggtcttggccacattggagaaaaacaggctcaaagtggggctgggacctggtgggtgaacctgagctctcccaggagacaacttagctgccagtcaccacctatgaggctcttctaccccgtgcctgcacctcggccagcatctcctatgctccctgggtcccccagacctctctgtgttgtgtgcgtggcagcctccaggaataaacattcttgttgtcctttgt

SEQ ID NO: 26202 - DNA, 1748 bp, Homo sapiens
  source 1..1748: mol_type = unassigned DNA
gaaccgcccgctgccagcccggccaggcacccctgcagcatggcctggaacaccaacctccgctggcggctgccgctcacctgcctgctcctgcaggtgattatggtgattctcttcggggtgttcgtgcgctacgacttcgaggccgacgcccactggtggtcagagaggacgcacaagaacttgagcgacatggagaacgaattctactatcgctacccaagcttccaggacgtgcacgtgatggtcttcgtgggcttcggcttcctcatgactttcctgcagcgctacggcttcagcgccgtgggcttcaacttcctgttggcagccttcggcatccagtgggcgctgctcatgcagggctggttccacttcttacaagaccgctacatcgtcgtgggcgtggagaacctcatcaacgctgacttctgcgtggcctctgtctgcgtggcctttggggcagttctgggtaaagtcagccccattcagctgctcatcatgactttcttccaagtgaccctcttcgctgtgaatgagttcattctccttaacctgctaaaggtgaaggatgcaggaggctccatgaccatccacacatttggcgcctactttgggctcacagtgacccggatcctctaccgacgcaacctagagcagagcaaggagagacagaattctgtgtaccagtcggacctctttgccatgattggcaccctcttcctgtggatgtactggcccagcttcaactcagccatatcctaccatggggacagccagcaccgagccgccatcaacacctactgctccttggcagcctgcgtgcttacctcggtggcaatatccagtgccctgcacaagaagggcaagctggacatggtgcacatccagaatgccacgctcgcaggaggggtggccgtgggtaccgctgctgagatgatgctcatgccttacggtgccctcatcatcggcttcgtctgcggcatcatctccaccctgggttttgtatacctgaccccattcctggagtcccggctgcacatccaggacacatgtggcattaacaatctgcatggcattcctggcatcataggcggcatcgtgggtgctgtgacagcggcctccgccagccttgaagtctatggaaaagaagggcttgtccattcctttgactttcaaggtttcaacggggactggaccgcaagaacacagggaaagttccagatttatggtctcttggtgaccctggccatggccctgatgggtggcatcattgtggggctcattttgagattaccattctggggacaaccttcagatgagaactgctttgaggatgcggtctactgggaggacctggaacttgctcctaatcaatagaatacagcaaaggcatgggatgcaggtgattctgtgtacatggttacgtaactaaatagataagattgtagcacctgtcttgctggagtgtttcacactcttgctggctttgatgaagcaggtggccatttgaggcccaactgagagtggcctgtaaaactgagggcagctgacagccagcaagaaaatgagccttcagtcctgtaaatgcaaggaactgaattgtgccaagagctgcatgagcttggaagcagatccttcctcagtcaagcttccagatgaggacccagtcctgacccatactttgattgcaggcttgcagagggcccagctcagccattccaagattcttgacccacagaagctgagag

SEQ ID NO: 26203 - DNA, 1014 bp, Homo sapiens
  source 1..1014: mol_type = unassigned DNA
ggacagccagcaccgagccgccatcaacacctactgctccttggcagcctgcgtgcttacctcggtggcaatatccagtgccctgcacaagaagggcaagctggacatggtgcacatccagaatgccacgctcgcaggaggggtggccgtgggtaccgctgctgagatgatgctcatgccttacggtgccctcatcatcggcttcgtctgcggcatcatctccaccctgggttttgtatacctgaccccattcctggagtcccggctgcacatccaggacacatgtggcattaacaatctgcatggcattcctggcatcataggcggcatcgtgggtgctgtgacagcggcctccgccagccttgaagtctatggaaaagaagggcttgtccattcctttgactttcaaggtttcaacggggactggaccgcaagaacacagggaaagttccagatttatggtctcttggtgaccctggccatggccctgatgggtggcatcattgtggggctcattttgagattaccattctggggacaaccttcagatgagaactgctttgaggatgcggtctactgggagatgcctgaagggaacagcactgtctacatccctgaggaccccaccttcaagccctcaggaccctcagtaccctcagtacccatggtgtccccactacccatggcttcctcggtacccttggtaccctaggctcccagggcaggtgaggagcagggggtctgactgagaatggagaaggagaagctacaaagtgggcatccaagccgggttctggctgcagaagttctgcctctgcctggggtcttggccacattggagaaaaacaggctcaaagtggggctgggacctggtgggtgaacctgagctctcccaggagacaacttagctgccagtcaccacctatgaggctcttctaccccgtgcctgcacctcggccagcatctcctatgctccctgggtcccccagacctctctgtgttgtgtgcgtggca

SEQ ID NO: 26204 - DNA, 1291 bp, Homo sapiens
  source 1..1291: mol_type = unassigned DNA
gtttgcgcctgcgcagtgggtgctgattatgtcgaccgcggcgccgcggacgctgctggagtcgcctggcaacgatgtcgcctggcaactgaataggttggccagtggcgcgggctactggaagcagaaagggctgcggaggcagtgagtggtttctgcagagcttcatttggaaaggcctctgtagttggggaaagatggcccattcccagaactccttggagcttcccattaacatcaatgccacccagattaccactgcctatggccatcgggccctgcccaagctgaaggaggagctgcagtcagaggacctccagacgaggcagaaagccctcatggccttgtgtgacctcatgcatgaccccgagtgtatctacaaggccatgaacataggctgtatggagaacctgaaagctttgctgaaggatagcaacagtatggtgcgcataaagaccaccgaggtgctccacatcacggcaagccatagcgtgggcagatacgcctttctagagcacgacatcgtccttgccctgtccttcctgctgaatgaccccagcccagtctgccgggggaacctgtacaaggcatacatgcagctggtccaggtgcctagaggggcccaagagatcatcagcaaaggtctgatttcctcactggtatggaagctgcaggtggaggtggaggaggaggagttccaggagttcatcctggacacactggtcctctgcctgcaggaggatgccaccgaggccctgggcagcaatgtggtgcttgtcctgaagcagaagctcctcagcgccaaccagaacatccgcagcaaggccgcccgtgcgctccttaatgtcagcatatctcgagagggcaagaaacaggtgtgtcattttgacgtcatccccatcctggtccatctgctgaaagacccagtggagcatgtgaagtctaacgctgccggtgccctgatgttcgccacagtgatcactgaagggaagtatgcggccctggaggcacaagccatcggcctgctcctggagctgctgcactcccccatgaccatagcgcgcctgaatgccaccaaggcccttaccatgctggcagaggcccccgagggccgcaaggccctgcagacgcacgtgcccactttccgtgccatggaggtggagacttacgaaaagcctcaagtggccgaagccttacagcgggcagcccggatcgccatcagtgtcatcgagttcaaaccctgagcccttcattcacctctgtgagtgaataaatgtgctaagtctcttta

SEQ ID NO: 26205 - DNA, 1225 bp, Homo sapiens
  source 1..1225: mol_type = unassigned DNA
agtgtgcctctgtcctttgccacaaacatgaggttcacattccctctcatggctatagtcctggaaattgccatgattgttttatttggattatttgttgagtatgaaacggaccagactgttctcgagcagctcaacatcaccaagccaacagacatgggcatattctttgagttatatcctctgttccaagatgtacatgttatgatatttgttgggtttggcttcctcatgaccttcctgaagaaatatggcttcagcagtgtgggtatcaacctactcgttgctgctttgggcctccagtggggcactattgtacagggaatcctgcaaagccagggacagaaatttaacattggaatcaaaaacatgataaatgcagacttcagtgcagccacagttctgatatcttttggagctgtcctgggaaaaacgagccccacccaaatgctgatcatgacaattttagaaattgttttctttgcccacaatgaatacctggttagtgaaatatttaaggcctctgacattggagcatcaatgacgatccatgcctttggggcctactttggcttggctgtagcaggcatcttgtatcgatctggactgagaaaggggcatgaaaatgaagagtccgcatactactcagacttgtttgcaatgattgggactctctttctgtggatgttttggcccagctttaactcggccattgctgaacctggagacaaacagtgcagggccattgtaaacacgtacttctctctcgctgcctgtgtgctcacagcctttgccttctccagcctagtggagcaccgaggcaagctcaacatggttcacattcagaatgccacccttgctggaggagttgctgtgggcacttgtgcggatatggcaattcacccatttggttctatgattattgggagcattgcaggaatggtctctgtgcttggatacaagttcctgactgtctatggccatgcaggcagctgcactgggttcctctatcggaacagcagttgttggaggtctgatgacaggtttaattctaaagttgcctctctggggacagccatctgaccagaactgctatgatgattctgtttattggaaggtccctaagacgagataacttgacaatcagttccatggacatggtgaccacagccagctggaacctgaagtctaaacaccattcctgctctccagcttcctttcccat

SEQ ID NO: 26206 - DNA, 1912 bp, Homo sapiens
  source 1..1912: mol_type = unassigned DNA
agtgtgcctctgtcctttgccacaaacatgaggttcacattccctctcatggctatagtcctggaaattgccatgattgttttatttggattatttgttgagtatgaaacggaccagactgttctcgagcagctcaacatcaccaagccaacagacatgggcatattctttgagttatatcctctgttccaagatgtacatgttatgatatttgttgggtttggcttcctcatgaccttcctgaagaaatatggcttcagcagtgtgggtatcaacctactcgttgctgctttgggcctccagtggggcactattgtacagggaatcctgcaaagccagggacagaaatttaacattggaatcaaaaacatgataaatgcagacttcagtgcagccacagttctgatatcttttggagctgtcctgggaaaaacgagccccacccaaatgctgatcatgacaattttagaaattgttttctttgcccacaatgaatacctggttagtgaaatatttaaggcctctgacattggagcatcaatgacgatccatgcctttggggcctactttggcttggctgtagcaggcatcttgtatcgatctggactgagaaaggggcatgaaaatgaagagtccgcatactactcagacttgtttgcaatgattgggactctctttctgtggatgttttggcccagctttaactcggccattgctgaacctggagacaaacagtgcagggccattgtaaacacgtacttctctctcgctgcctgtgtgctcacagcctttgccttctccagcctagtggagcaccgaggcaagctcaacatggttcacattcagaatgccacccttgctggaggagttgctgtgggcacttgtgcggatatggcaattcacccatttggttctatgattattgggagcattgcaggaatggtctctgtgcttggatacaagttcctgactccactttttactactaaactgaggatccatgatacatgtggggtccataacctccacggcttacctggtgtagtgggaggccttgcaggcattgtggcagtagcaatgggcgcctccaacacgtctatggccatgcaggcagctgcactgggttcctctatcggaacagcagttgttggaggtctgatgacaggtttaattctaaagttgcctctctggggacagccatctgaccagaactgctatgatgattctgtttattggaaggtccctaagacgagataacttgacaatcagttccatggacatggtgaccacagccagctggaacctgaagtctaaacaccattcctgctctccagcttcctttcccattatccagaatcaagtccaaataaacaaaaagggagtaaccaaagagagtatggaccagagtgaatagatcctaagtcccaaatggccagtgtaaaaatgtccttatgtctgatgctgtctcttgctcttcaatgattaattgaggggatgttactcataaaacagataatcaaatagatcttctccaggattcccaaaaagcttttggcagtgagtaaatacagagtaaacatgtcagtttcttaatgtagacactatgtcttcaatcccaaaaattataaaactgaaacccatgaagcaagaatagatgtgagaaatctatgtaaaaaaataattaaagaaatgcatgtgtgtaaagtagtaatatgatgattttaggtagtgctttttattttaaaaatagtctagttagtaatgttgtatccttgcatgaatattattcttaattccttttgcatgttgactatttgcaacgagctcaaatgctatctgatcaaagtctattttgcataaaatgtccaataattaaatattgttataaaataaaacatcagtctttgactct

SEQ ID NO: 26207 - DNA, 1283 bp, Homo sapiens
  source 1..1283: mol_type = unassigned DNA
agtgtgcctctgtcctttgccacaaacatgaggttcacattccctctcatggctatagtcctggaaattgccatgattgttttatttggattatttgttgagtatgaaacggaccagactgttctcgagcagctcaacatcaccaagccaacagacatgggcatattctttgagttatatcctctgttccaagatgtacatgttatgatatttgttgggtttggcttcctcatgaccttcctgaagaaatatggcttcagcagtgtgggtatcaacctactcgttgctgctttgggcctccagtggggcactattgtacagggaatcctgcaaagccagggacagaaatttaacattggaatcaaaaacatgataaatgcagacttcagtgcagccacagttctgatatcttttggagctgtcctgggaaaaacgagccccacccaaatgctgatcatgacaattttagaaattgttttctttgcccacaatgaatacctggttagtgaaatatttaaggcctctgacattggagcatcaatgacgatccatgcctttggggcctactttggcttggctgtagcaggcatcttgtatcgatctggactgagaaaggggcatgaaaatgaagagtccgcatactactcagacttgtttgcaatgattgggactctctttctgtggatgttttggcccagctttaactcggccattgctgaacctggagacaaacagtgcagggccattgtaaacacgtacttctctctcgctgcctgtgtgctcacagcctttgccttctccagcctagtggagcaccgaggcaagctcaacatggttcacattcagaatgccacccttgctggaggagttgctgtgggcacttgtgcggatatggcaattcacccatttggttctatgattattgggagcattgcaggaatggtctctgtgcttggatacaagttcctgactccactttttactactaaactgaggatccatgatacatgtggggtccataacctccacggcttacctggtgtagtgggaggccttgcaggcattgtggcagtagcaatgggcgcctccaacacgtctatggccatgcaggcagctgcactgggttcctctatcggaacagcagttgttggaggtctgatgacaggtttaattctaaagttgcctctctggggacagccatctgaccagaactgctatgatgattctgtttattggaaggtccctaagacgagagtctaaacaccattcctgctctccagctt

SEQ ID NO: 26208 - DNA, 1203 bp, Homo sapiens
  source 1..1203: mol_type = unassigned DNA
agtgtgcctctgtcctttgccacaaacatgaggttcacattccctctcatggctatagtcctggaaattgccatgattgttttatttggattatttgttgagtatgaaacggaccagactgttctcgagcagctcaacatcaccaagccaacagacatgggcatattctttgagttatatcctctgttccaagatgtacatgttatgatatttgttgggtttggcttcctcatgaccttcctgaagaaatatggcttcagcagtgtgggtatcaacctactcgttgctgctttgggcctccagtggggcactattgtacagggaatcctgcaaagccagggacagaaatttaacattggaatcaaaaacatgataaatgcagacttcagtgcagccacagttctgatatcttttggagctgtcctgggaaaaacgagccccacccaaatgctgatcatgacaattttagaaattgttttctttgcccacaatgaatacctggttagtgaaatatttaaggcctctgacattggagcatcaatgacgatccatgcctttggggcctactttggcttggctgtagcaggcatcttgtatcgatctggactgagaaaggggcatgaaaatgaagagtccgcatactactcagacttgtttgcaatgattgggactctctttctgtggatgttttggcccagctttaactcggccattgctgaacctggagacaaacagtgcagggccattgtaaacacgtacttctctctcgctgcctgtgtgctcacagcctttgccttctccagcctagtggagcaccgaggcaagctcaacatggttcacattcagaatgccacccttgctggaggagttgctgtgggcacttgtgcggatatggcaattcacccatttggttctatgattattgggagcattgcaggaatggtctctgtgcttggatacaagttcctgactccactttttactactaaactgaggatccatgatacatgtggggtccataacctccacggcttacctggtgtagtgggaggccttgcaggcattgtggcagtagcaatgggcgcctccaacacgtctatggccatgcaggcagctgcactgggttcctctatcggaacagcagttgttggaggtctgatgacaggaacctgaagtctaaacaccattcctgctctccagctt

SEQ ID NO: 26209 - DNA, 1256 bp, Homo sapiens
  source 1..1256: mol_type = unassigned DNA
ccagggtttcctcttcaagtaggtctaaaacatttttttttctcattgacttccttcctgttctaactgccagtactcagaagtcagagttgagagacagaggcaccccggacagagacgtgaagcactgaataaatagatcagaatgactgaaaaagccccagagccacatgtggaggaggatgatgatgatgagctggacagcaagctcaattataagcctccaccacagaagtccctgaaagagctgcaggaaatggacaaagatgatgagagtctaattaagtacaagaaaacgctgctgggagatggtcctgtggtgacagatccgaaagcccccaatgtcgttgtcacccggctcaccctggtttgtgagagtgccccgggaccaatcaccatggaccttactggagatctggaagccctcaaaaaggaaaccattgtgttaaaggaaggttctgaatatagagtcaaaattcacttcaaagtgaacagggatattgtgtcaggcctgaaatacgttcagcacacctacaggactggggtgaaagtggataaagcaacatttatggttggcagctatggacctcggcctgaggagtatgagttcctcactccagttgaggaggctcccaagggcatgctggcgcgaggcacgtaccacaacaagtccttcttcaccgacgatgacaagcaagaccacctcagctgggagtggaacctgtcgattaagaaggagtggacagaatgaatgcatccacccctttccccacccttgccacctggaagaattctctcaggcgtgttcagcaccctgtccctcctccctgtccacagctgggtccctcttcaacactgccacatttccttattgatgcatcttttcccaccctgtcactcaacgtggtccctagaacaagaggcttaaaaccgggctttcacccaacctgctccctctgatcctccatcagggccagatcttccacgtctccatctcagtacacaatcatttaatatttccctgtcttacccctattcaagcaactagaggccagaaaatgggcaaattatcactaacaggtctttgactcaggttccagtagttcattctaatgcctagattcttttgtggttgttgctggcccaatgagtccctagtcacatcccctgccagagggagttcttcttttgtgagagacactgtaaacgacacaagagaacaagaataaaacaataactgtgtgtgttctggctga

SEQ ID NO: 26210 - DNA, 463 bp, Homo sapiens
  source 1..463: mol_type = unassigned DNA
tcagaagggctctgagaacacgcaccgggagtgcctggaggggtttcctgcaaagtaggagcaggcacctggccaggcttggaagaaaaagactgtagatccaaaatgatacgaaatagatcagaatgactgaaaaagccccagagccacatgtggaggaggatgatgatgatgagctggacagcaagctcaattataagcctccaccacagaagtccctgaaagagctgcaggaaatggacaaagatgatgagagtctaattaagtacaagaaaacgctgctgggagatggtcctgtggtgacagatccgaaagcccccaatgtcgttgtcacccggctcaccctggtttgtgagagtgccccgggaccaatcaccatggaccttactggagatctggaagccctcaaaaaggaaaccattgtgttaaaggaaggttctgaatatagagtcaaaattcactt

SEQ ID NO: 26211 - DNA, 859 bp, Homo sapiens
  source 1..859: mol_type = unassigned DNA
aactgccagtactcagaagtcagagttgagagacagaggcaccccggacagagacgtgaagcactgaataggatgaaactggggcccagtgaggttaagcaacttgcaggaggtaacgcaggaaccgagttgcgctgaaacatcgttatctgacacttccctgctttgttaaagctgtctctgcagagcttgcaaagaagcatttacctctgcttgtgcacctccagaaatagatcagaatgactgaaaaagccccagagccacatgtggaggaggatgatgatgatgagctggacagcaagctcaattataagcctccaccacagaagtccctgaaagagctgcaggaaatggacaaagatgatgagagtctaattaagtacaagaaaacgctgctgggagatggtcctgtggtgacagatccgaaagcccccaatgtcgttgtcacccggctcaccctggtttgtgagagtgccccgggaccaatcaccatggaccttactggagatctggaagccctcaaaaaggaaaccattgtgttaaaggaaggttctgaatatagagtcaaaattcacttcaaagtgaacagggatattgtgtcaggcctgaaatacgttcagcacacctacaggactggggtgaaagtggataaagcaacatttatggttggcagctatggacctcggcctgaggagtatgagttcctcactccagttgaggaggctcccaagggcatgctggcgcgaggcacgtaccacaacaagtccttcttcaccgacgatgacaagcaagaccacctcagctgggagtggaacctgtcgattaagaaggagtggacagaatgaatgcatccacccct

SEQ ID NO: 26212 - DNA, 911 bp, Homo sapiens
  source 1..911: mol_type = unassigned DNA
ggctggctggatttggaggactgtgataactcctacagctttttgactgggcttttgcttcatttgttcaggagtctttgtgccatgttgcttcactcgtaaaatagatcagaatgactgaaaaagccccagagccacatgtggaggaggatgatgatgatgagctggacagcaagctcaattataagcctccaccacagaagtccctgaaagagctgcaggaaatggacaaagatgatgagagtctaattaagtacaagaaaacgctgctgggagatggtcctgtggtgacagatccgaaagcccccaatgtcgttgtcacccggctcaccctggtttgtgagagtgccccgggaccaatcaccatggaccttactggagatctggaagccctcaaaaaggaaaccattgtgttaaaggaaggttctgaatatagagtcaaaattcacttcaaagtgaacagggatattgtgtcaggcctgaaatacgttcagcacacctacaggactggggtgaaagtggataaagcaacatttatggttggcagctatggacctcggcctgaggagtatgagttcctcactccagttgaggaggctcccaagggcatgctggcgcgaggcacgtaccacaacaagtccttcttcaccgacgatgacaagcaagaccacctcagctgggagtggaacctgtcgattaagaaggagtggacagaatgaatgcatccacccctttccccacccttgccacctggaagaattctctcaggcgtgttcagcaccctgtccctcctccctgtccacagctgggtccctcttcaacactgccacatttccttattgatgcatcttttcccaccctgtcactcaacgtggtccctagaacaagaggcttaaaaccgggctttcacc

SEQ ID NO: 26213 - DNA, 354 bp, Homo sapiens
  source 1..354: mol_type = unassigned DNA
gctgctcaagttggctgatcaagagataggcagtgcaaaggaacaggatttgagacagcccagggtttcctcttcaaaaatagatcagaatgactgaaaaagccccagagccacatgtggaggaggatgatgatgatgagctggacagcaagctcaattataagcctccaccacagaagtccctgaaagagctgcaggaaatggacaaagatgatgagagtctaattaagtacaagaaaacgctgctgggagatggtcctgtggtgacagatccgaaagcccccaatgtcgttgtcacccggctcaccctggtttgtgagagtgccccgggaccaatcaccatggaccttactg

SEQ ID NO: 26214 - DNA, 723 bp, Homo sapiens
  source 1..723: mol_type = unassigned DNA
cattatcactcagactgtgcatgctgcaagctttgacgctagccaggctggctggatttggaggactgtgataactcctacagctttttgactgggcttttgcttcatttgttcaggagtctttgtgccatgttgcttcactcgtagtacgttattcacatatgagtgatttctttcttgtcagttttgttcagtgaatagaagatactacaatggtacagagaaattcaggcagaaatagatcagaatgactgaaaaagccccagagccacatgtggaggaggatgatgatgatgagctggacagcaagctcaattataagcctccaccacagaagtccctgaaagagctgcaggaaatggacaaagatgatgagagtctaattaagtacaagaaaacgctgctgggagatggtcctgtggtgacagatccgaaagcccccaatgtcgttgtcacccggctcaccctggtttgtgagagtgccccgggaccaatcaccatggaccttactggagatctggaagccctcaaaaaggaaaccattgtgttaaaggaaggttctgaatatagagtcaaaattcacttcaaagtgaacagggatattgtgtcaggcctgaaatacgttcagcacacctacaggactggggtgaaagtggataaagcaacatttatggttggcagctatggacctcggcctgaggagtatgagttcctcactccagt

SEQ ID NO: 26215 - DNA, 3375 bp, Homo sapiens
  source 1..3375: mol_type = unassigned DNA
gtttgccgagccttgacaggcgtggcagagggagcagtgcccgagcgcggtttctcttaaggttctgcagggcaaggctgtctgggacaggcttggccatggatccgctctcagagctgcaggatgatctgaccttggatgacaccagcgaggctctgaaccagctgaagctggcctccatcgatgagaagaactggccctcggatgaaatgcctgacttccccaagtcagatgactccaaaagcagctccccggaacttgtcacacacctgaagtgggatgacccatactatgacatcgcccggcaccagatcgtggaggtggcaggagatgacaagtatgggcggaagatcattgtgtttagtgcctgtcgaatgccccccagccaccagctcgaccacagcaagctcctggggtacctgaagcacaccctggaccagtacgtggagagtgactacacacttctgtatctgcaccacggcctgaccagcgacaacaagccctccctcagctggctccgtgatgcctaccgggagtttgaccgcaagtacaagaaaaacatcaaggccttgtacatcgtgcatccaaccatgttcatcaaaactctgctcatcctcttcaagcccctcatcagcttcaagttcgggcagaagatcttctatgtgaattacctgagcgagctgagcgagcacgtgaagctggagcagctggggatccctcgccaagtgctcaaatatgacgacttcctgaaatccacacagaagagccccgcgacagcccccaagcccatgcccccacggccccccctgcccaaccagcagtttggagtctcgctgcagcacctccaggagaagaatccagagcaggagcccattcccattgtactcagggagactgttgcctacttacaggcccacgctctcaccaccgagggcatcttccggaggtcggccaacacccaagtggtccgggaagtgcagcagaagtacaacatggggctgcctgtggatttcgaccagtacaatgagctgcacctgccagcagtcatcctcaagaccttcctccgggagcttcctgagcccctgctcacctttgacctctacccccatgtggtgggcttcctcaacattgatgaaagccagagggtgccagcgacactgcaggtcctccagacgctgcccgaggagaactaccaggtgcttcgtttcctgactgctttcctggtgcagatttctgcacacagtgaccagaacaagatgaccaacactaacctggctgttgttttcggccctaacctgctgtgggccaaggatgcggccatcaccctcaaggccattaatcccatcaacaccttcaccaagttccttctggatcaccaaggggagctgttcccaagcccggaccccagcgggctctgaacctggcccctgccccaccagccccttctctggtagcccgggtttggactcttcctcctggcatcaggggccatgaagccccctggagagagatgttggagccacccatcaggcatgctctcccccacctctgtccagcccgcctcacggccctggcggcctcgctgttaccagaagacgtttttctctgccttacacttctcactgcctctctggacaccgggcttttgctgggctctccagagctgggcttggctcttccagctggagaaggactgagccccagtaacccctttcctgctttttcctgcctctgtttccctagcaagtgtggatgaatcaaatgactgccggctgggctggtagcaggggccagtcctcccctcttgattgctgggaatgagcagctgagctctttggtgtggacaccgccccaagctgaggtgcctccctatctggtaggctgccctgctttgcagaagccccactgcatgaaggcctgagtgcaagcacccttgctcctgtactgcccccagcagcgcagtctggggtatttcccctgctgaggagtgacagggctggagactgtgtctgctttctgcctcctcttccacacatcctgggtcagcctttcccaagtgatactgcccctggggtgtcctaaccccttggttgtgcagggactggtagcttggatgacatggctcagagtcccagcatccacttgaaacctccctctccacctccccgcccccgagagctacagcgtgtgatggaatcagtgaccggccaggttagcctctcccctcttggcctcctttcccacacgggcagatcatcagccttcatgttcttgtggacctgtctgttacggagtcacactggcccctgccccagccagaggtgactcagtgcctcaggatcttatggctccttcctccagctgggggactcttaaaggggctggggtagagactaagagtgcccgtaggaggggcagagattgtgctgataggtcagtccagataggtgggttctagcaatttccccaggggattaaggggctctagggccacctttttttttttttttctgagatggagtctcgctctgtcaccaggctggagtgcagtggcgcgatctcggcacacctccgccttctgggttcaagcaattctcctgcctcagcctcctgagtagctgggactataggtgcatgccaccatgcccagctaatttttgtatttttagtagagacggggtttcaccatgttggccaggatggtctcgatctcctgacctcatgatccacccacctcggcctcccaaagtgctgggattccaggcgtgagccactgcacccggccagccctgttgtctttcaaagaacctcggccccagtgatggctgatctcactcccactgtctcgtagaattacactccttcctggggatccctcttcctgcagccttgtccttggggagtacagggaagtacctgcagtgaccctgcccccatgaccttggccaggcaggatgattccagagcccgtactgtggggatcctcactgaccagcccagccccatccgcaagccaggctgggcctgggcataacttcgctgggctctcccaagaccatcagcagtgcatccagccccctggggcctgggctgctgctggttcttcatcagtcccttggtctctagcctcggccagggctgctctgctctccgccctcctttgtgtatcaagtgtcgctcacagccccattcactggggagcctttcggatctatttggtctttctcatgtcccccactggtctgtaccccagggagcgggtgcttgtactgtgtgaatccagtgttcacattcacacttaatgacttccttggcaccaatcatgtatttcaccgtttgcactttttgtatttcaataaaaatgttgatgcaaaa

SEQ ID NO: 26216 - DNA, 1667 bp, Homo sapiens
  source 1..1667: mol_type = unassigned DNA
cgcggagccggatgtttgccgagccttgacaggcgtggcagagggagcagtgcccgagcgcggtttctcttaaggttctgcagggcaaggctgtctgggacaggcttggccatggatccgctctcagagctgcaggatgatctgaccttggatgacaccagcgaggctctgaaccagctgaagctggcctccatcgatgagaagaactggccctcggatgaaatgcctgacttccccaagtcagatgactccaaaagcagctccccggaacttgtcacacacctgaagtgggatgacccatactatgacatcgcccggcaccagatcgtggaggtggcaggagatgacaagtatgggcggaagatcattgtgtttagtgcctgtcgaatgccccccagccaccagctcgaccacagcaagctcctggggtacctgaagcacaccctggaccagtacgtggagagtgactacacacttctgtatctgcaccacggcctgaccagcgacaacaagccctccctcagctggctccgtgatgcctaccgggagtttgaccgcaagtacaagaaaaacatcaaggccttgtacatcgtgcatccaaccatgttcatcaaaactctgctcatcctcttcaagcccctcatcagcttcaagttcgggcagaagatcttctatgtgaattacctgagcgagctgagcgagcacgtgaagctggagcagctggggatccctcgccaagtgctcaaatatgacgacttcctgaaatccacacagaagagccccgcgacagcccccaagcccatgcccccacggccccccctgcccaaccagcagtttggagtctcgctgcagcacctccaggagaagaatccagagcaggagcccattcccattgtactcagggagactgttgcctacttacaggcccacgctctcaccaccgagggcatcttccggaggtcggccaacacccaagtggtccgggaagtgcagcagaagtacaacatggggctgcctgtggatttcgaccagtacaatgagctgcacctgccagcagtcatcctcaagaccttcctccgggagcttcctgagcccctgctcacctttgacctctacccccatgtggtgggcttcctcaacattgatgaaagccagagggtgccagcgacactgcaggtcctccagacgctgcccgaggagaactaccaggtgcttcgtttcctgactgctttcctggtgcagatttctgcacacagtgaccagaacaagatgaccaacactaacctggctgttgttttcggccctaacctgctgtgggccaaggatgcggccatcaccctcaaggccattaatcccatggccacctttttttttttttttctgagatggagtctcgctctgtcaccaggctggagtgcagtggcgcgatctcggcacacctccgccttctgggttcaagcaattctcctgcctcagcctcctgagtagctgggactataggtgcatgccaccatgcccagctaatttttgtatttttagtagagacggggtttcaccatgttggccaggatggtctcgatctcctgacctcatgatccacccacctcggcctcccaaagtgctgggattccaggcgtgagccactgcacccggccagccctgttgtc

SEQ ID NO: 26217 - DNA, 890 bp, Homo sapiens
  source 1..890: mol_type = unassigned DNA
gttgctgcccattagggctgagggcagaggtgcctacccccaggctgcatgcggctgcagccttctggccagattccagacctacagaaacccagcttggtggtcgagtctgccttgtgcctgccggagctgctgttctgctggtgacctcctcatctcagcaccccagacatcacgagcatccccctttcccatctgcgccctccaatccttagggccgtcaacctttccaccttgaaactggtgtcaggagcaccctgcagagtttctcttaaggttctgcagggcaaggctgtctgggacaggcttggccatggatccgctctcagagctgcaggatgatctgaccttggatgacaccagcgaggctctgaaccagctgaagctggcctccatcgatgagaagaactggccctcggatgaaatgcctgacttccccaagtcagatgactccaaaagcagctccccggaacttgtcacacacctgaagtgggatgacccatactatgacatcgcccggcaccagatcgtggaggtggcaggagatgacaagtatgggcggaagatcattgtgtttagtgcctgtcgaatgccccccagccaccagctcgaccacagcaagctcctggggtacctgaagcacaccctggaccagtacgtggagagtgactacacacttctgtatctgcaccacggcctgaccagcgacaacaagccctccctcagctggctccgtgatgcctaccgggagtttgaccgcaagtacaagaaaaacatcaaggccttgtacatcgtgcatccaaccatgttcatcaaaactctgctcatcctcttcaagcccctcatcagcttcaagttcgggcagaagatcttctatgtgaattacctga

SEQ ID NO: 26218 - DNA, 3299 bp, Homo sapiens
  source 1..3299: mol_type = unassigned DNA
gagctcggcgggggctgccgggattggggcgccgcagctagcgctggtctcggtggcagctcctccgcgccgcaggactcggctctacgggacatgtccgtgccgcgctcgccgcgcgcccgggcctgctagctcctctgtgctccctgaacgcgcggcgccgcacctggcagcggcctcggagctcggctcgggcaggagcgcgcggccgtgcgcaccgcgcagcgaccgctgccgtcatggggctgcagcccctggagttcagcgactgctacctcgacagcccgtggttccgggagaggatccgcgctcacgaagcggaactcgagaggaccaacaagttcatcaaagagctcattaaggacgggaagaacctcatcgctgcgacgaaaagtctgtcagtggcccagcggaagtttgctcattcactcagagactttaagtttgagtttatcggtgatgctgtgacagatgatgaacgatgcatagatgcttccttacgtgaattttcaaattttttgaagaatctggaggaacagagagaaattatggcattaagtgtaactgaaaccctgattaaacccttggaaaaattcagaaaagagcaacttggagctgtaaaggaagaaaaaaagaagtttgacaaagagacagaaaagaattatagtctaattgataaacatttgaatttatcagcaaaaaagaaagactcacatttacaagaggcagatatccaagtagagcagaaccggcaacacttctatgaactgtctctcgagtatgtgtgtaagctgcaggaaatccaagaaagaaagaagtttgagtttgtggaacctatgctgtcattttttcaggggatgtttaccttctatcatcagggccatgaacttgccaaagacttcaatcactacaaaatggaactacagatcaacattcagaatacacggaatcgatttgaaggaacaaggtcagaagtggaagagctcatgaacaaaatcagacagaatcccaaggaccacaaacgagcaagtcagtttacagccgaaggctacctgtatgtccaggaaaaaaggcctgctccgtttggttccagttgggtcaaacactattgcatgtatcgaaaagcagcaaagaagttcaacatgatcccatttgagcacagatctggagggaaacttggggacggagaggtgttctttttgaaagaatgtaccaagaggcatactgactccattgacagaaggttttgttttgacatagaagctgctgatcggcctggcgtttccttgaccatgcaggcattttccgaagaggaaaggaagcagtggttggaagctctgggtggaaaggaagctctgtcccatagttttaatacagccatcatcccaagaccagaaggaaatgcacagttggataagatggggttcacaattatcagaaaatgcatcagtgccgttgaaacacgaggtataaatgaccaaggattgtacagagttgtgggggtgagttcaaaggtccagagacttctgagtatgttgatggatgtaaaaacatgcaatgaggtggacctggagaattctgcagattgggaagtgaagacaataacaagtgccttgaaacagtatttgaggagtcttccagagcctctcatgacctatgagttacatggagatttcattgttccagccaaaagcggcagcccagaatctcgtgttaatgcgatccatttcttggtacacaaactgccagagaagaataaagagatgttggatattttggtgaaacacttaacaaatgtttcaaatcactccaagcagaacctgatgactgtggcaaacttaggagtggtgtttggaccaactctgatgaggccacaggaagaaactgtcgctgccctcatggacttgaagtttcagaatattgttgtggaaatcttaattgaaaaccatgaaaagatttttcggacgccgcccgatactacattccctgagcccacctgcctgtcagcatcacccccaaatgcgccaccaaggcagtcgaagagacaaggccagagaaccaagaggcccgtggccgtctacaatctttgtctggagctggaagatggtgacaatccttacccttccaaggaggacacccctaccagcagtctggactcactttcctccccgtctcccgtgactacagctgtccctgggcctcctggaccagacaaaaaccaccttctggcagatggagggagctttggagactgggcatccactatcccaggccagacccgatcgtctatggtccagtggcttaacccacagtctccaaccacaacaagctccaactcagctgtgacacctctttcacccgggtcgtcccctttccccttttctcctcctgctactgtagcggacaagccacctgaaagcatccgcagtcggaaggctcgagccgtgtatccgtgtgaagcagaacacagctcggaattatcttttgaaataggagcaatttttgaggatgtacaaacctccagggaacctggctggctagaagggactctgaacggcaagagggggctgattccacagaactacgtcaagctgctgtagctcctggcctcagagcccctgctgaccctggcacccagggacctgcctgggggcagagagctgtcttcctcctccgaggctctgggctgcacccacaggtacctccacacttgggagttaccatcatcacagtcagccctgggggtggggggtggtgggcagggatgggacgcaccacacagaactgtgattgtggatcaggaggggaatgtcaggattcgcaaaatggacttttcatttgtcaagtattgggacttgtgatttttaattatccagcatatagaatgagagggagggcagccttctgccacctgtgtcgcctccactggcagtcacgccaccagagccaccctggctccctctcctccctgagcacctgctgctgcgattttaaagggaactgtactactcgcagtgataggtttgcagagtgtgtgcttggctgtggcagcctagcttggagaagctgctgttggtgcaagggagatggtctcaagtcagagggaagcagagacgcgcgtctcaagcctgcccttcctagacggccacctgcaggaccccacactcactgcactggcagcgtgcactggcgtatttgtaacaggcttctcggtgctcctcacccgtgtgctgttttccaaacaccacctttttgcctcaaggtctctgtaaatgaaataaactgtaatttactatttg

SEQ ID NO: 26219 - DNA, 1934 bp, Homo sapiens
  source 1..1934: mol_type = unassigned DNA
atgtaccaagaggcatactgactccattgacagaaggttttgttttgacatagaagctgctgatcggcctggcgtttccttgaccatgcaggcattttccgaagaggaaaggaagcagtggttggaagctctgggtggaaaggaagctctgtcccatagttttaatacagccatcatcccaagaccagaaggaaatgcacagttggataagatggggttcacaattatcagaaaatgcatcagtgccgttgaaacacgaggtataaatgaccaaggattgtacagagttgtgggggtgagttcaaaggtccagagacttctgagtatgttgatggatgtaaaaacatgcaatgaggtggacctggagaattctgcagattgggaagtgaagacaataacaagtgccttgaaacagtatttgaggagtcttccagagcctctcatgacctatgagttacatggagatttcattgttccagccaaaagcggcagcccagaatctcgtgttaatgcgatccatttcttggtacacaaactgccagagaagaataaagagatgttggatattttggtgaaacacttaacaaatgtttcaaatcactccaagcagaacctgatgactgtggcaaacttaggagtggtgtttggaccaactctgatgaggccacaggaagaaactgtcgctgccctcatggacttgaagtttcagaatattgttgtggaaatcttaattgaaaaccatgaaaagatttttcggacgccgcccgatactacattccctgagcccacctgcctgtcagcatcacccccaaatgcgccaccaaggcagtcgaagagacaaggccagagaaccaagaggcccgtggccgtctacaatctttgtctggagctggaagatggtgacaatccttacccttccaaggaggacacccctaccagcagtctggactcactttcctccccgtctcccgtgactacagctgtccctgggcctcctggaccagacaaaaaccaccttctggcagatggagggagctttggagactgggcatccactatcatccgcagtcggaaggctcgagccgtgtatccgtgtgaagcagaacacagctcggaattatcttttgaaataggagcaatttttgaggatgtacaaacctccagggaacctggctggctagaagggactctgaacggcaagagggggctgattccacagaactacgtcaagctgctgtagctcctggcctcagagcccctgctgaccctggcacccagggacctgcctgggggcagagagctgtcttcctcctccgaggctctgggctgcacccacaggtacctccacacttgggagttaccatcatcacagtcagccctgggggtggggggtggtgggcagggatgggacgcaccacacagaactgtgattgtggatcaggaggggaatgtcaggattcgcaaaatggacttttcatttgtcaagtattgggacttgtgatttttaattatccagcatatagaatgagagggagggcagccttctgccacctgtgtcgcctccactggcagtcacgccaccagagccaccctggctccctctcctccctgagcacctgctgctgcgattttaaagggaactgtactactcgcagtgataggtttgcagagtgtgtgcttggctgtggcagcctagcttggagaagctgctgttggtgcaagggagatggtctcaagtcagagggaagcagagacgcgcgtctcaagcctgcccttcctagacggccacctgcaggaccccacactcactgcactggcagcgtgcactggcgtatttgtaacaggcttctcggtgctcctcacccgtgtgctgttttccaaacaccacctttttgcctcaaggtctctgtaaatgaaataaactgtaatttact

SEQ ID NO: 26220 - DNA, 5898 bp, Homo sapiens
  source 1..5898: mol_type = unassigned DNA
gaaactgcgggtgtgacccccccgtggtggctctgggtgtctgcggaggagctgggggcggaagcatgaggctaacggcttggcttcagtgaacgcaccgggatgtgcaggccgggaggtagaggcaggctgatgggggagggaacgagcagcctgtgagacggggtgacggcggctaccagcccgggcgggcaccgggactggaagagttgcctgagcagccggctggtccggcggccaggctagggcgggggcgagcgcccagttgagcctgctggggctggaggagcgagaagggttttcttcacatttcagagcgaaccagacggggacagtaaggtttggaggaagggggatcgttggaagtagcaagaagtggagagaatctggcaatagacgagaaaccgaaagaatcagaaagaagtctatgtgagtagctgaaagcattgggtgaccagaaagaaggtcggtgtaagtgaaggaagagtgaggtgtggctggatcaaagggctaagagaagcgggtctgtgtaagtggatgtgagtgaggatcaaggaaaagccgtggaagtggccgggggtcggggccgcagaagtgccagacggggccggaaagcagccgagcggagttcaaatttgagagcgtttggaaattggaagacttggtggcgaacgagggtcaggacctgcatcctgcctcagagagttatcgacgtatccggaatgtgggatcagaggctggtgaggttggccctgttgcagcatctgcgggccttctatggtattaaggtgaagggtgtccgtgggcagtgcgatcgcaggagacatgaaacagcagccacggaaatagggggtaaaatatttggagtaccttttaatgcactgccccattctgctgtaccagaatatggacacattccaagctttcttgtcgatgcttgcacatctttagaagaccatattcataccgaagggctttttcggaaatcaggatctgtgattcgcctaaaagcactaaagaataaagtggatcatggtgaaggttgcctatcttctgcacctccttgtgatattgcgggacttcttaagcagttttttagggaactgccagagcccattctcccagctgatttgcatgaagcacttttgaaagctcaacagttaggcacagaggaaaagaataaagctacactgttgctctcctgtcttctggctgaccacacagttcatgtattaagatacttctttaactttctcaggaatgtttctcttagatccagtgagaataagatggacagcagcaatcttgcagtaatatttgcaccgaatcttcttcagacaagtgaaggacatgaaaagatgtcttctaacacagaaaagaagctacgattacaggctgcagtagtacagactcttatcgattatgcatcagatattgggcgtgtaccagattttatcctggaaaagataccagccatgttgggtattgatggtctctgtgctactccatcactggaaggctttgaagaaggtgaatatgaaactcctggtgaatataagagaaagagaagacaaagtgtaggagattttgttagtggagcactaaataaatttaaacctaacagaacaccttctattacacctcaagaagaaagaattgcccagctatctgaatcaccagtgattcttacaccaaatgctaagcgtacattgccagtagattcttctcatggtttctcaagtaagaaaaggaagtccatcaagcacaattttaactttgagctgttgccaagtaatctcttcaatagcagttctacaccggtatcagttcacatcgatacaagctcagaagggtcatctcagagttcactctctcctgtactcattggtggaaaccatttgatcactgcaggtgtgccaaggcgaagtaaaagaattgcaggcaaaaaagtttgcagagtggaatcaggaaaagcaggctgcttttctcctaaaatcagccataaagaaaaggttcgaagatctctgcgtttgaaattcaatctagggaaaaatggcagagaagtaaatggatgttctggtgtcaatagatatgaaagtgttggttggcgacttgcaaatcaacaaagtttaaaaaatcgaattgaatctgtaaaaacaggtttgctttttagcccagatgttgatgaaaagttaccaaagaaaggttcagaaaagatcagtaagtctgaggaaaccttactaactccagagcgactagttggaacaaattaccggatgtcttggacaggacctaataattcaagttttcaagaagtagatgcaaatgaagcttcttcaatggtggaaaatcttgaggtagaaaactctttggagcctgatattatggtagaaaagtcacctgctacttcatgtgaactcaccccttccaatttaaacaataagcataatagcaacataacaagtagccctcttagcggggatgaaaataacatgaccaaagagactttggtgaaagttcaaaaagcgttttctgaatctggaagtaatcttcacgcattgatgaatcagaggcagtcatcagtaactaatgtggggaaagtaaaattaactgaaccatcttatttagaagatagcccagaggaaaatctatttgaaactaatgatttgactatagtagaatcaaaggagaaatatgaacaccacactggtaaaggtgaaaaatgtttttcagagagggacttttcaccccttcaaactcaaacatttaatagagaaacaactataaaatgttattcaactcagatgaagatggaacatgaaaaagacattcattcaaatatgccaaaagattatttaagcaagcaagaattctccagtgatgaagaaataaagaaacagcagtccccaaaggataaactaaataataaattaaaagagaatgagaatatgatggaaggtaacttaccgaagtgtgcagcacatagcaaggacgaggctagatcctctttctcacagcagagtacatgtgttgtaacaaacttgtcaaaacctaggcctatgagaattgctaaacagcagtcattggaaacatgtgagaaaacagtttctgaaagttcacaaatgacagaacatagaaaggtttctgatcacatacagtggtttaacaagctttctttaaatgaaccaaatagaataaaagtcaagtcacctcttaagtttcagcgtactcctgttcgtcagtccgtcagaagaattaattctttgttggagtatagcagacaacctacagggcataagttggcgagtcttggtgatacagcttctcctttggtcaaatcagtgagctgtgacggtgctctttcctcttgtatagaaagtgcatcaaaagattcctctgtttcatgtatcaaatcaggtcctaaagaacagaagtccatgtcatgtgaagagtcaaatattggtgcaatttcaaagtcaagcatggagttaccctcgaaatctttcttaaagatgaggaagcacccagattcagtgaatgcttctcttaggtctactacagtttataaacagaagatcttatctgatggccaagttaaggttcccttggatgatctgactaatcatgatatagtaaaaccagttgtaaataacaacatgggcatttcttctgggataaataacagggtccttaggagaccatcagaaagaggaagggcctggtacaaaggttctccaaaacatcctatcggaaaaactcaattactaccaacaagtaaacctgtagatttgtaattggtaaatgttatacttgtcattaatgtaaataaagtgagtaattggtatgacttgcaggatgatgtacatgttagtttgtagctcaggatgattgttaagcaatagatttgctctattgaaaatgtttcatttttttcactgtacaagcaacttagatttttatttgtacaaattacttctttgtttttcttaatgatggcaatttttaaactttaattttattgtgatctcttaaagcagaggttagactttacctttctgactctgtcgtccaggctggagtgcagtggcgcaatctcactgcaagctccacttcctgggttcatgccattttcctgcctcagcctcccgagtagctgggactacaggtgcccgccaccacgcccagctaattttttgtatttttagtagagacggtttcaccgtgttagccaggatggtctcgatctcctgacgttgtgatccgcccgcctcagcctcccaaagtgctgggattacaggcatgagccaccacgcccggctagactttacctttctaaagaaattgtttactggatttataagaagttaatttttgaaaatgacatatttttgtgtgatagaaagaatggagcaagttgtgcctatttcctccaagtcagataaggtttctaaaataaataaatttctagcatataaagggtagagataaactctgcaaatcttatgtctggaattatattaatgtttattgtccttgccaaaattcctagaaattaatttccttcaatagcatcctaaaactctatttttatttggggcagagtaatttcatttatagtgccagtaggtgtaccttgtgttcactcgaactaagaacaatggttaaggcagaataatgactaaaatatgttcatatattatgatgtggaaataattgataacttttaagccatactatgtttttaaagataatttgcacaaacacgtttgtgtctgttctgtccaatatagatttggcaattatttaaagagggataatcttgaaaaaaattaaccaaggtgatttcttatatgtagatgctcgattttggaatttgaaatagtagatgcacctctttaccttttttacttggataaaaacctatgatgattttgtcctgtgtgtaaatgttatttatttagcatagacattaaagataactctctggaaaatgacttgactaaggctctcatgaaattcaaagtgccatttagaacatgcaccaaattgtcaagtaaatctgtctaaatttatattttaaattattacaaattacacatctttgaggaaagagtattatgaacaatagaacatattctctaggttgtagaggaaggaataagcagacagaatcaaccactaaaggtagtttttcagattggttgttagaatgtcatgtttagatgttggagcagattagagcagcattcatgccactcggagcaaccagacttacagcataagtatgtacgaggaatttcaaatcatcagatgtttgcttggctaggttctactttgtttatttgatatcaaataggtttgtagatgtttatggcatttctaattgtaagtagagacaaaatattcatatagtcagatatatgttgtctgctttaaacaatttttaaattttaaaaatgcattaacgtctttttatatccatcaagggaaggatgaaatgttgaatttgaagactaattcagtaagaagtcctaggggtttaactgtacatactacctgaactggcttttctgagagatgaatcaataatgaaacatgtctgttttaaaaactaccacatgtgactcctatttttgttagctgaaagctgctatacggagtattacaggaatgtgaaggtgactagcttgaaggtagggtaactagagagccagaaaagttttgttttaaacttgatttaatgcgtttttattttttcttatacaaaatagagataatgttgctaacttcatggaatatttgaggaaatgatatgaaagtgtctggacgtgcagtaacctcatgggttcttctcactgtcttataaatgtaaataaagatctaatattaatttggtta

SEQ ID NO: 26221 - DNA, 3152 bp, Homo sapiens
  source 1..3152: mol_type = unassigned DNA
ggcttcagtgaacgcaccgggatgtgcaggccgggagagcgaaccagacggggacagtaaggtttggaggaagggggatcgttggaagtagcaagaagtggagagaatctggcaatagacgagaaaccgaaagaatcagaaagaagtctatggtaaaatatttggagtaccttttaatgcactgccccattctgctgtaccagaatatggacacattccaagctttcttgtcgatgcttgcacatctttagaagaccatattcataccgaagggctttttcggaaatcaggatctgtgattcgcctaaaagcactaaagaataaagtggatcatggtgaaggttgcctatcttctgcacctccttgtgatattgcgggacttcttaagcagttttttagggaactgccagagcccattctcccagctgatttgcatgaagcacttttgaaagctcaacagttaggcacagaggaaaagaataaagctacactgttgctctcctgtcttctggctgaccacacagttcatgtattaagatacttctttaactttctcaggaatgtttctcttagatccagtgagaataagatggacagcagcaatcttgcagtaatatttgcaccgaatcttcttcagacaagtgaaggacatgaaaagatgtcttctaacacagaaaagaagctacgattacaggctgcagtagtacagactcttatcgattatgcatcagatattgggcgtgtaccagattttatcctggaaaagataccagccatgttgggtattgatggtctctgtgctactccatcactggaaggctttgaagaaggtgaatatgaaactcctggtgaatataagagaaagagaagacaaagtgtaggagattttgttagtggagcactaaataaatttaaacctaacagaacaccttctattacacctcaagaagaaagaattgcccagctatctgaatcaccagtgattcttacaccaaatgctaagcgtacattgccagtagattcttctcatggtttctcaagtaagaaaaggaagtccatcaagcacaattttaactttgagctgttgccaagtaatctcttcaatagcagttctacaccggtatcagttcacatcgatacaagctcagaagggtcatctcagagttcactctctcctgtactcattggtggaaaccatttgatcactgcaggtgtgccaaggcgaagtaaaagaattgcaggcaaaaaagtttgcagagtggaatcaggaaaagcaggctgcttttctcctaaaatcagccataaagaaaaggttcgaagatctctgcgtttgaaattcaatctagggaaaaatggcagagaagtaaatggatgttctggtgtcaatagatatgaaagtgttggttggcgacttgcaaatcaacaaagtttaaaaaatcgaattgaatctgtaaaaacaggtttgctttttagcccagatgttgatgaaaagttaccaaagaaaggttcagaaaagatcagtaagtctgaggaaaccttactaactccagagcgactagttggaacaaattaccggatgtcttggacaggacctaataattcaagttttcaagaagtagatgcaaatgaagcttcttcaatggtggaaaatcttgaggtagaaaactctttggagcctgatattatggtagaaaagtcacctgctacttcatgtgaactcaccccttccaatttaaacaataagcataatagcaacataacaagtagccctcttagcggggatgaaaataacatgaccaaagagactttggtgaaagttcaaaaagcgttttctgaatctggaagtaatcttcacgcattgatgaatcagaggcagtcatcagtaactaatgtggggaaagtaaaattaactgaaccatcttatttagaagatagcccagaggaaaatctatttgaaactaatgatttgactatagtagaatcaaaggagaaatatgaacaccacactggtaaaggtgaaaaatgtttttcagagagggacttttcaccccttcaaactcaaacatttaatagagaaacaactataaaatgttattcaactcagatgaagatggaacatgaaaaagacattcattcaaatatgccaaaagattatttaagcaagcaagaattctccagtgatgaagaaataaagaaacagcagtccccaaaggataaactaaataataaattaaaagagaatgagaatatgatggaaggtaacttaccgaagtgtgcagcacatagcaaggacgaggctagatcctctttctcacagcagagtacatgtgttgtaacaaacttgtcaaaacctaggcctatgagaattgctaaacagcagtcattggaaacatgtgagaaaacagtttctgaaagttcacaaatgacagaacatagaaaggtttctgatcacatacagtggtttaacaagctttctttaaatgaaccaaatagaataaaagtcaagtcacctcttaagtttcagcgtactcctgttcgtcagtccgtcagaagaattaattctttgttggagtatagcagacaacctacagggcataagttggcgagtcttggtgatacagcttctcctttggtcaaatcagtgagctgtgacggtgctctttcctcttgtatagaaagtgcatcaaaagattcctctgtttcatgtatcaaatcaggtcctaaagaacagaagtccatgtcatgtgaagagtcaaatattggtgcaatttcaaagtcaagcatggagttaccctcgaaatctttcttaaagatgaggaagcacccagattcagtgaatgcttctcttaggtctactacagtttataaacagaagatcttatctgatggccaagttaaggttcccttggatgatctgactaatcatgatatagtaaaaccagttgtaaataacaacatgggcatttcttctgggataaataacagggtccttaggagaccatcagaaagaggaagggcctggtacaaaggttctccaaaacatcctatcggaaaaactcaattactaccaacaagtaaacctgtagatttgtaattggtaaatgttatacttgtcattaatgtaaataaagtgagtaattggtatgacttgc

SEQ ID NO: 26222 - DNA, 2422 bp, Homo sapiens
  source 1..2422: mol_type = unassigned DNA
agctgggggcggaagcatgaggctaacggcttggcttcagtgaacgcaccgggatgtgcaggccgggaggtagaggcaggctgatgggggagggaacgagcagcctgtgagacggggtgacggcggctaccagcccgggcgggcaccgggactggaagagttgcctgagcagccggctggtccggcggccaggctagggcgggggcgagcgcccagttgagcctgctggggctggaggagcgagaagggttttcttcacatttcagagcgaaccagacggggacagtaaggtttggaggaagggggatcgttggaagtagcaagaagtggagagaatctggcaatagacgagaaaccgaaagaatcagaaagaagtctatgtgagtagctgaaagcattgggtgaccagaaagaaggtcggtgtaagtgaaggaagagtgaggtgtggctggatcaaagggctaagagaagcgggtctgtgtaagtggatgtgagtgaggatcaaggaaaagccgtggaagtggccgggggtcggggccgcagaagtgccagacggggccggaaagcagccgagcggagttcaaatttgagagcgtttggaaattggaagacttggtggcgaacgagggtcaggacctgcatcctgcctcagagagttatcgacgtatccggaatgtgggatcagaggctggtgaggttggccctgttgcagcatctgcgggccttctatggtattaaggtgaagggtgtccgtgggcagtgcgatcgcaggagacatgaaacagcagccacggaaatagggggtaaaatatttggagtaccttttaatgcactgccccattctgctgtaccagaatatggacacattccaagctttcttgtcgatgcttgcacatctttagaagaccatattcataccgaagggctttttcggaaatcaggatctgtgattcgcctaaaagcactaaagaataaagtggatcatggtgaaggttgcctatcttctgcacctccttgtgatattgcgggacttcttaagcagttttttagggaactgccagagcccattctcccagctgatttgcatgaagcacttttgaaagctcaacagttaggcacagaggaaaagaataaagctacactgttgctctcctgtcttctggctgaccacacagttcatgtattaagatacttctttaactttctcaggaatgtttctcttagatccagtgagaataagatggacagcagcaatcttgcagtaatatttgcaccgaatcttcttcagacaagtgaaggacatgaaaagatgtcttctaacacagaaaagaagctacgattacaggctgcagtagtacagactcttatcgattatgcatcagatattgggcgtgtaccagattttatcctggaaaagataccagccatgttgggtattgatggtctctgtgctactccatcactggaaggctttgaagaaggtgaatatgaaactcctggtgaatataagagaaagagaagacaaagtgtaggagattttgttagtggagcactaaataaatttaaacctaacagaacaccttctattacacctcaagaagaaagaattgcccagctatctgaatcaccagtgattcttacaccaaatgctaagcgtacattgccagtagattcttctcatggtttctcaagtaagaaaaggaagtccatcaagcacaattttaactttgagctgttgccaagtaatctcttcaatagcagttctacaccggtatcagttcacatcgatacaagctcagaagggtcatctcagagttcactctctcctgtactcattggtggaaaccatttgatcactgcaggtgtgccaaggcgaagtaaaagaattgcaggcaaaaaagtttgcagagtggaatcaggaaaagcaggctgcttttctcctaaaatcagccataaagaaaaggttcgaagatctctgcgtttgaaattcaatctagggaaaaatggcagagaagtaaatggatgttctggtgtcaatagatatgaaagtgttggttggcgacttgcaaatcaacaaagtttaaaaaatcgaattgaatctgtaaaaacaggtttgctttttagcccagatgttgatgaaaagttaccaaagaaaggtacatttacatactactgttagagttttacctaaaaatcctgctttagttgcttttttaatggcaaaacatattaattaatttactgttctagagattaaaagttcatgtttgaatagtgaaaatattagaattggcaatgtatttttctatcaacaattgggaaatgcttatacatgtaaatatgaaaatgtttgacattcttatgttaaaaattatttcttgtaacacaaatactttattagaattaaatgcttagtgactta

SEQ ID NO: 26223 - DNA, 4625 bp, Homo sapiens
  source 1..4625: mol_type = unassigned DNA
gagaggtgaatattattgaatgaaaatggctgacagaagtgggaagattattccaggacaagtgtatattgaggtggaatatgattatgaatatgaagcaaaggacagaaagattgtgataaaacaaggggagaggtacatcttggtgaaaaagaccaatgatgactggtggcaagtcaagccagatgaaaactccaaagcgttttatgtgccagcccagtatgtgaaggaggtcacgcgcaaagctctcatgccacctgttaagcaggtagctggtctgccaaataactccacgaaaataatgcagagtttgcatcttcagagatcaacagaaaatgtgaacaaattgcctgagctttcaagtttcggaaagccatcgtcatctgttcaaggaacaggtcttattcgtgatgccaatcagaattttggacccagttataatcaaggtcagactgtcaacctaagcctggacctgacccataataacggaaagtttaacaatgactcacattctcctaaagtttccagccagaataggacacgctcatttggtcattttcccggtccagagttcttggatgtagagaaaactagcttctcccaggaacaatcttgtgattccgcaggagaaggctctgaaagaatacatcaagattctgaatctggtgatgaacttagcagcagctccactgaacagataagggcaaccacacctccaaatcaaggaaggccagattctcctgtctatgctaaccttcaagaactgaaaatatcccagtctgctcttcccccacttcctgggagcccggcaattcagattaatggagaatgggaaactcataaagacagctcagggcgttgctattactataacagagggacacaggaaagaacttggaaacctcctcgttggactcgggatgcaagcatcagcaaaggagatttccaaaatccaggggatcaagagtggctcaagcatgttgatgatcaaggtagacaatattactacagtgcagacggatctcggtcagaatgggaattgccaaagtataatgcttcatcccagcagcaaagagaaataattaaaagtaggagcctggacaggcggctgcaagaaccaatagtattaacaaagtggagacatagcaccattgtattggacactaatgataaggaatctccaactgcctcaaaaccctgctttcctgaaaatgagtcttctccctcctcaccaaagcaccaagatacagatcaagagaaatatggattattaaatgtaacaaaaattgctgaaaatgggaaaaaggttcgaaagaactggttgtcttcttgggcggtgttgcagggttcatctttactttttaccaaaactcaaggaagtagcacaagttggtttggcagtaatcagtccaaaccagagttcacagtggacctcaagggggcaacaattgagatggcttcaaaggataaatccagcaaaaagaatgtatttgagctgaaaactcgtcaaggaacagaactgctaattcagtctgacaatgacactgttattaatgattggtttaaagttcttagtagtacaatcaataatcaggcagtagaaactgatgaaggaattgaagaggagataccggattcaccaggaatagaaaagcatgataaagaaaaggaacaaaaggatcccaaaaagcttcgttcctttaaagtatctagcatagattcttcagaacagaaaaaaaccaagaaaaacttaaagaagtttcttacacgacgccccactttgcaagctgttcgtgaaaaaggttatattaaagatcaggtatttggatccaatctcgctaatctgtgtcagagagagaatggcacagtaccaaagtttgtgaagttatgtattgaacatgttgaagaacatggtttggatattgatgggatatacagagtaagtggcaacctcgcagtgatccagaaactaaggtttgcagtcaatcatgatgagaaattggacttgaatgacagtaaatgggaagatattcatgtcattactggagccctcaaaatgttttttcgagaattaccagaacctctttttacatttaatcattttaatgattttgttaatgcaattaagcaagaaccaagacagcgagtcgctgctgttaaggacctaatcagacagttgccaaagccaaaccaagacacaatgcagattcttttccgacatctcagaagagttatagaaaatggagagaaaaatcgaatgacctatcagagtatagcaattgtttttggtcccactctattaaaaccagaaaaagagactggtaatatagcagttcatactgtgtaccagaatcagattgtagaattaattcttctggaactgagttccatcttcggacgttgattcttactgaagacaacctgtggaatagaagctggattccatcagatttcaaatgtttatacacaatgtattttattttttggaccaagcagtgactctttgattttgcactttttttttgagggatcagaagggaaggggagagtcgagatgtgtgttaggccctcatatttgctgctttgttgcaagttgatataactgcgtgtaattatgaattcattttatcctgaatgtttgcatttcatactctgaatttcagtaaaaatcaaaacttaaaattctaaccagtcatatacactggataatttggtaagaaaactgtattttttttccctgaaattggataatgtactttcttctcaagattcatgacttgatagaacaatactttcagttatgttgcaaaggctcttgggcattttaaacaaaatgaagtatatccattttgaaacctgtgtatttctttttcggggtttctgcatgcagtggcagtcttaagtgccaaaattcattataaccccaaaataaccccttgatgaaggcttgctgtcttttactgtgttacacagcatccttactggatatcttagttgcttgtttgggcagcacactaatattacttaaaacactgtgatatactggagttttagttagcggaagtcagttcagggcattttagggctgtcttgctatactgaattgtagctaacaatcctaattatatctagtaccatactgagttattggtatgaccctgtggaaacacacattattttatgtaaatataggctaaagacttaatgtcctttagcttgtgtatataattgtgttgtatagtctcagagtacattctaaccctacatttctaatcattgttattggtaatcttttctgtgaatattaggtttcctccagaaatagtccgttatttgggaaagttaactgtgtgcacttttagatattaactacatttacaggcaaatcactgtaatgagaatggtactggaaaaatactgaatagacttgctaaatggcacatgcactacaagaggaaccttttgggttatttaatatgtacagaaaacattagaaaaaatttattacagaattctaattccagtatgaatagtggaaacccatctgtaaattagatggatgttggatggaaaatgacattgctaaatttgagaatttctttttacctactaatgtagattgctttgtataataaaacacagggtttggaaggttttgttacagggagcatggtctgttgaagatttttaaaatgtatttttctagattaacttctgtacatgaaatgtctaataaaactataagaggtttagagatttttccattggaaatgtgcattttggtttctaatttttttgttttttcatttactggcatactgttatacctcatttttaaaaatcaactgaatccaatatttcctgtggcaaataacactttcctcatttcataccttttctcctctcttccatgccaacatttctccacccacaacgtacactttttatttctccatcaatatttgaaagcgagtgatttgtgaccaggatttttttttcttagggttgcatttataatttacagattgccttccttgggaacaagtatttttttgtatgatctgtctaaaaacctctcacctgaattttgtggtagaaagtctgtatttgttgttgtgagcgtgttaaattgataacaaaccaaactacttgatagctaaagcagattgtttcgggtggggagaaaaagccctaaatcagaatgtttatatttgcctaaagatgtccttaataatacaatatgctttagatcttgcttatttagtgattgtataccaggaaaacaattagactcaaatcagtgatgttcttgttcttggtgttcatgaacatatatcaaagattaaaattgtcctgtgtttcttgtttcaaggtacgtgtgtgtgtgtgtgtgtgtgtgtgtgtgtgtgtgtgaagtcttaaatgttttattagtctacagctaatcagtttattgtaatattgtatgtacagtgagattaatgtcttgcgttttcatcctttgtgaattaaaaattctcacttgttttgtaataacaaagctagtaatattttcctgtcttgacagcttggttttatagtagaaaatatattaaaagctgaaataaattatcagtggaatttta

SEQ ID NO: 26224 - DNA, 4128 bp, Homo sapiens
  source 1..4128: mol_type = unassigned DNA
agcctgcggggacgggccggccgcggccgtagccgtgtgaacgctcttcgggctcgcgtcgtcgacccgcagccgcggggcggactaagaagggagccgcctgctgcgaggccgccgggctcccggtttaaatgtgatactggtgtagatctccttgttctaagctatattcatccaacaagccataaagccataatgtggtataacatcctttttgagaggtgaatattattgaatgaaaatggctgacagaagtgggaagattattccaggacaagtgtatattgaggtggaatatgattatgaatatgaagcaaaggacagaaagattgtgataaaacaaggggagaggtacatcttggtgaaaaagaccaatgatgactggtggcaagtcaagccagatgaaaactccaaagcgttttatgtgccagcccagtatgtgaaggaggtcacgcgcaaagctctcatgccacctgttaagcaggtagctggtctgccaaataactccacgaaaataatgcagagtttgcatcttcagagatcaacagaaaatgtgaacaaattgcctgagctttcaagtttcggaaagccatcgtcatctgttcaaggaacaggtcttattcgtgatgccaatcagaattttggacccagttataatcaaggtcagactgtcaacctaagcctggacctgacccataataacggaaagtttaacaatgactcacattctcctaaagtttccagccagaataggacacgctcatttggtcattttcccggtccagagttcttggatgtagagaaaactagcttctcccaggaacaatcttgtgattccgcaggagaaggctctgaaagaatacatcaagattctgaatctggtgatgaacttagcagcagctccactgaacagataagggcaaccacacctccaaatcaaggaaggccagattctcctgtctatgctaaccttcaagaactgaaaatatcccagtctgctcttcccccacttcctgggagcccggcaattcagattaatggagaatgggaaactcataaagacagctcagggcgttgctattactataacagagggacacaggaaagaacttggaaacctcctcgttggactcgggatgcaagcatcagcaaaggagatttccaaaatccaggggatcaagagcttctttcatcggaagaaaactactacagcacttcttacagccagtcagatagtcagtgtggttctcctccaaggggttggtcagaagagttggatgaacgtgggcataccttatataccagtgactatactaatgaaaagtggctcaagcatgttgatgatcaaggtagacaatattactacagtgcagacggatctcggtcagaatgggaattgccaaagtataatgcttcatcccagcagcaaagagaaataattaaaagtaggagcctggacaggcggctgcaagaaccaatagtattaacaaagtggagacatagcaccattgtattggacactaatgataaggaatctccaactgcctcaaaaccctgctttcctgaaaatgagtcttctccctcctcaccaaagcaccaagatacagccagcagtccaaaggatcaagagaaatatggattattaaatgtaacaaaaattgctgaaaatgggaaaaaggttcgaaagaactggttgtcttcttgggcggtgttgcagggttcatctttactttttaccaaaactcaaggaagtagcacaagttggtttggcagtaatcagtccaaaccagagttcacagtggacctcaagggggcaacaattgagatggcttcaaaggataaatccagcaaaaagaatgtatttgagctgaaaactcgtcaaggaacagaactgctaattcagtctgacaatgacactgttattaatgattggtttaaagttcttagtagtacaatcaataatcaggcagtagaaactgatgaaggaattgaagaggagataccggattcaccaggaatagaaaagcatgataaagaaaaggaacaaaaggatcccaaaaagcttcgttcctttaaagtatctagcatagattcttcagaacagaaaaaaaccaagaaaaacttaaagaagtttcttacacgacgccccactttgcaagctgttcgtgaaaaaggttatattaaagatcaggtatttggatccaatctcgctaatctgtgtcagagagagaatggcacagtaccaaagtttgtgaagttatgtattgaacatgttgaagaacatggtttggatattgatgggatatacagagtaagtggcaacctcgcagtgatccagaaactaaggtttgcagtcaatcatgatgagaaattggacttgaatgacagtaaatgggaagatattcatgtcattactggagccctcaaaatgttttttcgagaattaccagaacctctttttacatttaatcattttaatgattttgttaatgcaattaagcaagaaccaagacagcgagtcgctgctgttaaggacctaatcagacagttgccaaagccaaaccaagacacaatgcagattcttttccgacatctcagaagagttatagaaaatggagagaaaaatcgaatgacctatcagagtatagcaattgtttttggtcccactctattaaaaccagaaaaagagactggtaatatagcagttcatactgtgtaccagaatcagattgtagaattaattcttctggaactgagttccatcttcggacgttgattcttactgaagacaacctgtggaatagaagctggattccatcagatttcaaatgtttatacacaatgtattttattttttggaccaagcagtgactctttgattttgcactttttttttgagggatcagaagggaaggggagagtcgagatgtgtgttaggccctcatatttgctgctttgttgcaagttgatataactgcgtgtaattatgaattcattttatcctgaatgtttgcatttcatactctgaatttcagtaaaaatcaaaacttaaaattctaaccagtcatatacactggataatttggtaagaaaactgtattttttttccctgaaattggataatgtactttcttctcaagattcatgacttgatagaacaatactttcagttatgttgcaaaggctcttgggcattttaaacaaaatgaagtatatccattttgaaacctgtgtatttctttttcggggtttctgcatgcagtggcagtcttaagtgccaaaattcattataaccccaaaataaccccttgatgaaggcttgctgtcttttactgtgttacacagcatccttactggatatcttagttgcttgtttgggcagcacactaatattacttaaaacactgtgatatactggagttttagttagcggaagtcagttcagggcattttagggctgtcttgctatactgaattgtagctaacaatcctaattatatctagtaccatactgagttattggtatgaccctgtggaaacacacattattttatgtaaatataggctaaagacttaatgtcctttagcttgtgtatataattgtgttgtatagtctcagagtacattctaaccctacatttctaatcattgttattggtaatcttttctgtgaatattaggtttcctccagaaatagtccgttatttgggaaagttaactgtgtgcacttttagatattaactacatttacaggcaaatcactgtaatgagaatggtactggaaaaatactgaatagacttgctaaatggcacatgcactacaagaggaaccttttgggttatttaatatgtacagaaaacattagaaaaaatttattacagaattctaattccagtatgaatagtggaaacccatctgtaaattagatggatgttggatggaaaatgacattgctaaatttgagaatttctttttacctactaatgtagattgctttgtataataaaacacagggtttggaaggttttgttacagggagcatggtctgttgaagatttttaaaatgtatttttctagattaacttctgtacatgaaatgtctaataaaactataagaggtttagaga

SEQ ID NO: 26225 - DNA, 3960 bp, Homo sapiens
  source 1..3960: mol_type = unassigned DNA
ggggacgggccggccgcggccgtagccgtgtgaacgctcttcgggctcgcgtcgtcgacccgcagccgcggggcggactaagaagggagccgcctgctgcgaggccgccgggctcccggtttaaatgtgatactggtgtagatctccttgttctaagctatattcatccaacaagccataaagccataatgtggtataacatcctttttgagaggtgaatattattgaatgaaaatggctgacagaagtgggaagattattccaggacaagtgtatattgaggtggaatatgattatgaatatgaagcaaaggacagaaagattgtgataaaacaaggggagaggtacatcttggtgaaaaagaccaatgatgactggtggcaagtcaagccagatgaaaactccaaagcgttttatgtgccagcccagtatgtgaaggaggtcacgcgcaaagctctcatgccacctgttaagcaggtagctggtctgccaaataactccacgaaaataatgcagagtttgcatcttcagagatcaacagaaaatgtgaacaaattgcctgagctttcaagtttcggaaagccatcgtcatctgttcaaggaacaggtcttattcgtgatgccaatcagaattttggacccagttataatcaaggtcagactgtcaacctaagcctggacctgacccataataacggaaagtttaacaatgactcacattctcctaaagtttccagccagaataggacacgctcatttggtcattttcccggtccagagttcttggatgtagagaaaactagcttctcccaggaacaatcttgtgattccgcaggagaaggctctgaaagaatacatcaagattctgaatctggtgatgaacttagcagcagctccactgaacagataagggcaaccacacctccaaatcaaggaaggccagattctcctgtctatgctaaccttcaagaactgaaaatatcccagtctgctcttcccccacttcctgggagcccggcaattcagattaatggagaatgggaaactcataaagacagctcagggcgttgctattactataacagagggacacaggaaagaacttggaaacctcctcgttggactcgggatgcaagcatcagcaaaggagatttccaaaatccaggggatcaagagtggctcaagcatgttgatgatcaaggtagacaatattactacagtgcagacggatctcggtcagaatgggaattgccaaagtataatgcttcatcccagcagcaaagagaaataattaaaagtaggagcctggacaggcggctgcaagaaccaatagtattaacaaagtggagacatagcaccattgtattggacactaatgataaggaatctccaactgcctcaaaaccctgctttcctgaaaatgagtcttctccctcctcaccaaagcaccaagatacagatcaagagaaatatggattattaaatgtaacaaaaattgctgaaaatgggaaaaaggttcgaaagaactggttgtcttcttgggcggtgttgcagggttcatctttactttttaccaaaactcaaggaagtagcacaagttggtttggcagtaatcagtccaaaccagagttcacagtggacctcaagggggcaacaattgagatggcttcaaaggataaatccagcaaaaagaatgtatttgagctgaaaactcgtcaaggaacagaactgctaattcagtctgacaatgacactgttattaatgattggtttaaagttcttagtagtacaatcaataatcaggcagtagaaactgatgaaggaattgaagaggagataccggattcaccaggaatagaaaagcatgataaagaaaaggaacaaaaggatcccaaaaagcttcgttcctttaaagtatctagcatagattcttcagaacagaaaaaaaccaagaaaaacttaaagaagtttcttacacgacgccccactttgcaagctgttcgtgaaaaaggttatattaaagatcaggtatttggatccaatctcgctaatctgtgtcagagagagaatggcacagtaccaaagtttgtgaagttatgtattgaacatgttgaagaacatggtttggatattgatgggatatacagagtaagtggcaacctcgcagtgatccagaaactaaggtttgcagtcaatcatgatgagaaattggacttgaatgacagtaaatgggaagatattcatgtcattactggagccctcaaaatgttttttcgagaattaccagaacctctttttacatttaatcattttaatgattttgttaatgcaattaagcaagaaccaagacagcgagtcgctgctgttaaggacctaatcagacagttgccaaagccaaaccaagacacaatgcagattcttttccgacatctcagaagagttatagaaaatggagagaaaaatcgaatgacctatcagagtatagcaattgtttttggtcccactctattaaaaccagaaaaagagactggtaatatagcagttcatactgtgtaccagaatcagattgtagaattaattcttctggaactgagttccatcttcggacgttgattcttactgaagacaacctgtggaatagaagctggattccatcagatttcaaatgtttatacacaatgtattttattttttggaccaagcagtgactctttgattttgcactttttttttgagggatcagaagggaaggggagagtcgagatgtgtgttaggccctcatatttgctgctttgttgcaagttgatataactgcgtgtaattatgaattcattttatcctgaatgtttgcatttcatactctgaatttcagtaaaaatcaaaacttaaaattctaaccagtcatatacactggataatttggtaagaaaactgtattttttttccctgaaattggataatgtactttcttctcaagattcatgacttgatagaacaatactttcagttatgttgcaaaggctcttgggcattttaaacaaaatgaagtatatccattttgaaacctgtgtatttctttttcggggtttctgcatgcagtggcagtcttaagtgccaaaattcattataaccccaaaataaccccttgatgaaggcttgctgtcttttactgtgttacacagcatccttactggatatcttagttgcttgtttgggcagcacactaatattacttaaaacactgtgatatactggagttttagttagcggaagtcagttcagggcattttagggctgtcttgctatactgaattgtagctaacaatcctaattatatctagtaccatactgagttattggtatgaccctgtggaaacacacattattttatgtaaatataggctaaagacttaatgtcctttagcttgtgtatataattgtgttgtatagtctcagagtacattctaaccctacatttctaatcattgttattggtaatcttttctgtgaatattaggtttcctccagaaatagtccgttatttgggaaagttaactgtgtgcacttttagatattaactacatttacaggcaaatcactgtaatgagaatggtactggaaaaatactgaatagacttgctaaatggcacatgcactacaagaggaaccttttgggttatttaatatgtacagaaaacattagaaaaaatttattacagaattctaattccagtatgaatagtggaaacccatctgtaaattagatggatgttggatggaaaatgacattgctaaatttgagaatttctttttacctactaatgtagattgctttgtataataaaacacagggtttggaaggttttgttacagggagcatggtctgttgaagatttttaaaatgtatttttctagattaacttctgtacatgaaatgtctaataaaactataagaggttt

SEQ ID NO: 26226 - DNA, 4914 bp, Homo sapiens
  source 1..4914: mol_type = unassigned DNA
agaggccagcctgcggggacgggccggccgcggccgtagccgtgtgaacgctcttcgggctcgcgtcgtcgacccgcagccgcggggcggactaagaagggagccgcctgctgcgaggccgccgggctcccggtttaaatgtgatactggtgtagatctccttgttctaagctatattcatccaacaagccataaagccataatgtggtataacatcctttttgagaggtgaatattattgaatgaaaatggctgacagaagtgggaagattattccaggacaagtgtatattgaggtggaatatgattatgaatatgaagcaaaggacagaaagattgtgataaaacaaggggagaggtacatcttggtgaaaaagaccaatgatgactggtggcaagtcaagccagatgaaaactccaaagcgttttatgtgccagcccagtatgtgaaggaggtcacgcgcaaagctctcatgccacctgttaagcaggtagctggtctgccaaataactccacgaaaataatgcagagtttgcatcttcagagatcaacagaaaatgtgaacaaattgcctgagctttcaagtttcggaaagccatcgtcatctgttcaaggaacaggtcttattcgtgatgccaatcagaattttggacccagttataatcaaggtcagactgtcaacctaagcctggacctgacccataataacggaaagtttaacaatgactcacattctcctaaagtttccagccagaataggacacgctcatttggtcattttcccggtccagagttcttggatgtagagaaaactagcttctcccaggaacaatcttgtgattccgcaggagaaggctctgaaagaatacatcaagattctgaatctggtgatgaacttagcagcagctccactgaacagataagggcaaccacacctccaaatcaaggaaggccagattctcctgtctatgctaaccttcaagaactgaaaatatcccagtctgctcttcccccacttcctgggagcccggcaattcagattaatggagaatgggaaactcataaagacagctcagggcgttgctattactataacagagggacacaggaaagaacttggaaacctcctcgttggactcgggatgcaagcatcagcaaaggagatttccaaaatccaggggatcaagagcttctttcatcggaagaaaactactacagcacttcttacagccagtcagatagtcagtgtggttctcctccaaggggttggtcagaagagttggatgaacgtgggcataccttatataccagtgactatactaatgaaaagtggctcaagcatgttgatgatcaaggtagacaatattactacagtgcagacggatctcggtcagaatgggaattgccaaagtataatgcttcatcccagcagcaaagagaaataattaaaagtaggagcctggacaggcggctgcaagaaccaatagtattaacaaagtggagacatagcaccattgtattggacactaatgataaggatcaagagaaatatggattattaaatgtaacaaaaattgctgaaaatgggaaaaaggttcgaaagaactggttgtcttcttgggcggtgttgcagggttcatctttactttttaccaaaactcaaggaagtagcacaagttggtttggcagtaatcagtccaaaccagagttcacagtggacctcaagggggcaacaattgagatggcttcaaaggataaatccagcaaaaagaatgtatttgagctgaaaactcgtcaaggaacagaactgctaattcagtctgacaatgacactgttattaatgattggtttaaagttcttagtagtacaatcaataatcaggcagtagaaactgatgaaggaattgaagaggagataccggattcaccaggaatagaaaagcatgataaagaaaaggaacaaaaggatcccaaaaagcttcgttcctttaaagtatctagcatagattcttcagaacagaaaaaaaccaagaaaaacttaaagaagtttcttacacgacgccccactttgcaagctgttcgtgaaaaaggttatattaaagatcaggtatttggatccaatctcgctaatctgtgtcagagagagaatggcacagtaccaaagtttgtgaagttatgtattgaacatgttgaagaacatggtttggatattgatgggatatacagagtaagtggcaacctcgcagtgatccagaaactaaggtttgcagtcaatcatgatgagaaattggacttgaatgacagtaaatgggaagatattcatgtcattactggagccctcaaaatgttttttcgagaattaccagaacctctttttacatttaatcattttaatgattttgttaatgcaattaagcaagaaccaagacagcgagtcgctgctgttaaggacctaatcagacagttgccaaagccaaaccaagacacaatgcagattcttttccgacatctcagaagagttatagaaaatggagagaaaaatcgaatgacctatcagagtatagcaattgtttttggtcccactctattaaaaccagaaaaagagactggtaatatagcagttcatactgtgtaccagaatcagattgtagaattaattcttctggaactgagttccatcttcggacgttgattcttactgaagacaacctgtggaatagaagctggattccatcagatttcaaatgtttatacacaatgtattttattttttggaccaagcagtgactctttgattttgcactttttttttgagggatcagaagggaaggggagagtcgagatgtgtgttaggccctcatatttgctgctttgttgcaagttgatataactgcgtgtaattatgaattcattttatcctgaatgtttgcatttcatactctgaatttcagtaaaaatcaaaacttaaaattctaaccagtcatatacactggataatttggtaagaaaactgtattttttttccctgaaattggataatgtactttcttctcaagattcatgacttgatagaacaatactttcagttatgttgcaaaggctcttgggcattttaaacaaaatgaagtatatccattttgaaacctgtgtatttctttttcggggtttctgcatgcagtggcagtcttaagtgccaaaattcattataaccccaaaataaccccttgatgaaggcttgctgtcttttactgtgttacacagcatccttactggatatcttagttgcttgtttgggcagcacactaatattacttaaaacactgtgatatactggagttttagttagcggaagtcagttcagggcattttagggctgtcttgctatactgaattgtagctaacaatcctaattatatctagtaccatactgagttattggtatgaccctgtggaaacacacattattttatgtaaatataggctaaagacttaatgtcctttagcttgtgtatataattgtgttgtatagtctcagagtacattctaaccctacatttctaatcattgttattggtaatcttttctgtgaatattaggtttcctccagaaatagtccgttatttgggaaagttaactgtgtgcacttttagatattaactacatttacaggcaaatcactgtaatgagaatggtactggaaaaatactgaatagacttgctaaatggcacatgcactacaagaggaaccttttgggttatttaatatgtacagaaaacattagaaaaaatttattacagaattctaattccagtatgaatagtggaaacccatctgtaaattagatggatgttggatggaaaatgacattgctaaatttgagaatttctttttacctactaatgtagattgctttgtataataaaacacagggtttggaaggttttgttacagggagcatggtctgttgaagatttttaaaatgtatttttctagattaacttctgtacatgaaatgtctaataaaactataagaggtttagagatttttccattggaaatgtgcattttggtttctaatttttttgttttttcatttactggcatactgttatacctcatttttaaaaatcaactgaatccaatatttcctgtggcaaataacactttcctcatttcataccttttctcctctcttccatgccaacatttctccacccacaacgtacactttttatttctccatcaatatttgaaagcgagtgatttgtgaccaggatttttttttcttagggttgcatttataatttacagattgccttccttgggaacaagtatttttttgtatgatctgtctaaaaacctctcacctgaattttgtggtagaaagtctgtatttgttgttgtgagcgtgttaaattgataacaaaccaaactacttgatagctaaagcagattgtttcgggtggggagaaaaagccctaaatcagaatgtttatatttgcctaaagatgtccttaataatacaatatgctttagatcttgcttatttagtgattgtataccaggaaaacaattagactcaaatcagtgatgttcttgttcttggtgttcatgaacatatatcaaagattaaaattgtcctgtgtttcttgtttcaaggtacgtgtgtgtgtgtgtgtgtgtgtgtgtgtgtgtgtgtgaagtcttaaatgttttattagtctacagctaatcagtttattgtaatattgtatgtacagtgagattaatgtcttgcgttttcatcctttgtgaattaaaaattctcacttgttttgtaataacaaagctagtaatattttcctgtcttgacagcttggttttatagtagaaaatatattaaaagctgaaataaattatcagtggaatttta

SEQ ID NO: 26227 - DNA, 4101 bp, Homo sapiens
  source 1..4101: mol_type = unassigned DNA
ggggacgggccggccgcggccgtagccgtgtgaacgctcttcgggctcgcgtcgtcgacccgcagccgcggggcggactaagaagggagccgcctgctgcgaggccgccgggctcccggtttaaatgtgatactggtgtagatctccttgttctaagctatattcatccaacaagccataaagccataatgtggtataacatcctttttgagaggtgaatattattgaatgaaaatggctgacagaagtgggaagattattccaggacaagtgtatattgaggtggaatatgattatgaatatgaagcaaaggacagaaagattgtgataaaacaaggggagaggtacatcttggtgaaaaagaccaatgatgactggtggcaagtcaagccagatgaaaactccaaagcgttttatgtgccagcccagtatgtgaaggaggtcacgcgcaaagctctcatgccacctgttaagcaggtagctggtctgccaaataactccacgaaaataatgcagagtttgcatcttcagagatcaacagaaaatgtgaacaaattgcctgagctttcaagtttcggaaagccatcgtcatctgttcaaggaacaggtcttattcgtgatgccaatcagaattttggacccagttataatcaaggtcagactgtcaacctaagcctggacctgacccataataacggaaagtttaacaatgactcacattctcctaaagtttccagccagaataggacacgctcatttggtcattttcccggtccagagttcttggatgtagagaaaactagcttctcccaggaacaatcttgtgattccgcaggagaaggctctgaaagaatacatcaagattctgaatctggtgatgaacttagcagcagctccactgaacagataagggcaaccacacctccaaatcaaggaaggccagattctcctgtctatgctaaccttcaagaactgaaaatatcccagtctgctcttcccccacttcctgggagcccggcaattcagattaatggagaatgggaaactcataaagacagctcagggcgttgctattactataacagagggacacaggaaagaacttggaaacctcctcgttggactcgggatgcaagcatcagcaaaggagatttccaaaatccaggggatcaagagcttctttcatcggaagaaaactactacagcacttcttacagccagtcagatagtcagtgtggttctcctccaaggggttggtcagaagagttggatgaacgtgggcataccttatataccagtgactatactaatgaaaagtggctcaagcatgttgatgatcaaggtagacaatattactacagtgcagacggatctcggtcagaatgggaattgccaaagtataatgcttcatcccagcagcaaagagaaataattaaaagtaggagcctggacaggcggctgcaagaaccaatagtattaacaaagtggagacatagcaccattgtattggacactaatgataaggaatctccaactgcctcaaaaccctgctttcctgaaaatgagtcttctccctcctcaccaaagcaccaagatacagatcaagagaaatatggattattaaatgtaacaaaaattgctgaaaatgggaaaaaggttcgaaagaactggttgtcttcttgggcggtgttgcagggttcatctttactttttaccaaaactcaaggaagtagcacaagttggtttggcagtaatcagtccaaaccagagttcacagtggacctcaagggggcaacaattgagatggcttcaaaggataaatccagcaaaaagaatgtatttgagctgaaaactcgtcaaggaacagaactgctaattcagtctgacaatgacactgttattaatgattggtttaaagttcttagtagtacaatcaataatcaggcagtagaaactgatgaaggaattgaagaggagataccggattcaccaggaatagaaaagcatgataaagaaaaggaacaaaaggatcccaaaaagcttcgttcctttaaagtatctagcatagattcttcagaacagaaaaaaaccaagaaaaacttaaagaagtttcttacacgacgccccactttgcaagctgttcgtgaaaaaggttatattaaagatcaggtatttggatccaatctcgctaatctgtgtcagagagagaatggcacagtaccaaagtttgtgaagttatgtattgaacatgttgaagaacatggtttggatattgatgggatatacagagtaagtggcaacctcgcagtgatccagaaactaaggtttgcagtcaatcatgatgagaaattggacttgaatgacagtaaatgggaagatattcatgtcattactggagccctcaaaatgttttttcgagaattaccagaacctctttttacatttaatcattttaatgattttgttaatgcaattaagcaagaaccaagacagcgagtcgctgctgttaaggacctaatcagacagttgccaaagccaaaccaagacacaatgcagattcttttccgacatctcagaagagttatagaaaatggagagaaaaatcgaatgacctatcagagtatagcaattgtttttggtcccactctattaaaaccagaaaaagagactggtaatatagcagttcatactgtgtaccagaatcagattgtagaattaattcttctggaactgagttccatcttcggacgttgattcttactgaagacaacctgtggaatagaagctggattccatcagatttcaaatgtttatacacaatgtattttattttttggaccaagcagtgactctttgattttgcactttttttttgagggatcagaagggaaggggagagtcgagatgtgtgttaggccctcatatttgctgctttgttgcaagttgatataactgcgtgtaattatgaattcattttatcctgaatgtttgcatttcatactctgaatttcagtaaaaatcaaaacttaaaattctaaccagtcatatacactggataatttggtaagaaaactgtattttttttccctgaaattggataatgtactttcttctcaagattcatgacttgatagaacaatactttcagttatgttgcaaaggctcttgggcattttaaacaaaatgaagtatatccattttgaaacctgtgtatttctttttcggggtttctgcatgcagtggcagtcttaagtgccaaaattcattataaccccaaaataaccccttgatgaaggcttgctgtcttttactgtgttacacagcatccttactggatatcttagttgcttgtttgggcagcacactaatattacttaaaacactgtgatatactggagttttagttagcggaagtcagttcagggcattttagggctgtcttgctatactgaattgtagctaacaatcctaattatatctagtaccatactgagttattggtatgaccctgtggaaacacacattattttatgtaaatataggctaaagacttaatgtcctttagcttgtgtatataattgtgttgtatagtctcagagtacattctaaccctacatttctaatcattgttattggtaatcttttctgtgaatattaggtttcctccagaaatagtccgttatttgggaaagttaactgtgtgcacttttagatattaactacatttacaggcaaatcactgtaatgagaatggtactggaaaaatactgaatagacttgctaaatggcacatgcactacaagaggaaccttttgggttatttaatatgtacagaaaacattagaaaaaatttattacagaattctaattccagtatgaatagtggaaacccatctgtaaattagatggatgttggatggaaaatgacattgctaaatttgagaatttctttttacctactaatgtagattgctttgtataataaaacacagggtttggaaggttttgttacagggagcatggtctgttgaagatttttaaaatgtatttttctagattaacttctgtacatgaaatgtctaataaaactataagaggttt

SEQ ID NO: 26228 - DNA, 586 bp, Homo sapiens
  source 1..586: mol_type = unassigned DNA
cagcacttcttacagccagtcagatagtcagtgtggttctcctccaaggggttggtcagaagagttggatgaacgtgggcataccttatataccagtgactatactaatgaaaagtggctcaagcatgttgatgatcaaggtagacaatattactacagtgcagacggatctcggtcagaatgggaattgccaaagtataatgcttcatcccagcagcaaagagaaataattaaaagtaggagcctggacaggcggctgcaagaaccaatagtattaacaaagtggagacatagcaccattgtattggacactaatgataaggaatctccaactgcctcaaaaccctgctttcctgaaaatgagtcttctccctcctcaccaaagcaccaagatacagatcaagagaaatatggattattaaatgtaacaaaaattgctgaaaatgggaaaaaggttcgaaagaactggttgtcttcttgggcggtgttgcagggttcatctttactttttaccaaaactcaaggaagtagcacaagttggtttggcagtaatcagtccaaaccagagttcacagtggacctcaag

SEQ ID NO: 26229 - DNA, 3480 bp, Homo sapiens
  source 1..3480: mol_type = unassigned DNA
cgccgtttgggccgggaagcgatgtagtagctgccaggctgtcccccgccctgcccggcccgagccccgcgggccgccgccgccaccgccgccatgaagaagcagttcaaccgcatgaagcagctggctaaccagaccgtgggcagagctgagaaaacagaagtccttagtgaagatctattacagattgagagacgcctggacacggtgcggtcaatatgccaccattcccataagcgcttggtggcatgtttccagggccagcatggcaccgatgccgagaggagacacaaaaaactgcctctgacagctcttgctcaaaatatgcaagaagcatcgactcagctggaagactctctcctggggaagatgctggagacgtgtggagatgctgagaatcagctggctctcgagctctcccagcacgaagtctttgttgagaaggagatcgtggaccctctgtacggcatagctgaggtggagattcccaacatccagaagcagaggaagcagcttgcaagattggtgttagactgggattcagtcagagccaggtggaaccaagctcacaaatcctcaggaaccaactttcaggggcttccatcaaaaatagatactctaaaggaagagatggatgaagctggaaataaagtagaacagtgcaaggatcaacttgcagcagacatgtacaactttatggccaaagaaggggagtatggcaaattctttgttacgttattagaagcccaagcagattaccatagaaaagcattagcagtcttagaaaagaccctccccgaaatgcgagcccatcaagataagtgggcggaaaaaccagcctttgggactcccctagaagaacacctgaagaggagcgggcgcgagattgcgctgcccattgaagcctgtgtcatgctgcttctggagacaggcatgaaggaggagggccttttccgaattggggctggggcctccaagttaaagaagctgaaagctgctttggactgttctacttctcacctggatgagttctattcagacccccatgctgtagcaggtgctttaaaatcctatttacgggaattgcctgaacctttgatgacttttaatctgtatgaagaatggacacaagttgcaagtgtgcaggatcaagacaaaaaacttcaagacttgtggagaacatgtcagaagttgccaccacaaaattttgttaactttagatatttgatcaagttccttgcaaagcttgctcagaccagcgatgtgaataaaatgactcccagcaacattgcgattgtgttaggccctaacttgttatgggccagaaatgaaggaacacttgctgaaatggcagcagccacatccgtccatgtggttgcagtgattgaacccatcattcagcatgccgactggttcttccctgaagaggtggaatttaatgtatcagaagcatttgtacctctcaccaccccgagttctaatcactcattccacactggaaacgactctgactcggggaccctggagaggaagcggcctgctagcatggcggtgatggaaggagacttggtgaagaaggaaagctttggtgtgaagcttatggacttccaggcccaccggcggggtggcactctaaatagaaagcacatatcccccgctttccagccgccacttccgcccacagatggcagcaccgtggtgcccgctggcccagagccccctccccagagctctagggctgaaagcagctctgggggtgggactgtcccctcttccgcgggcatactggagcaggggccgagcccaggcgacggcagtcctcccaaaccgaaggaccctgtatctgcagctgtgccagcaccagggagaaacaacagtcagatagcatctggccaaaatcagccccaggcagctgctggctcccaccagctctccatgggccaacctcacaatgctgcagggcccagcccgcatacactgcgccgagctgttaaaaaacccgctccagcacccccgaaaccgggcaacccacctcctggccaccccgggggccagagttcttcaggaacatctcagcatccacccagtctgtcaccaaagccacccacccgaagcccctctcctcccacccagcacacgggccagcctccaggccagccctccgccccctcccagctctcagcaccccggaggtactccagcagcttgtctccaatccaagctcccaatcacccaccgccgcagccccctacgcaggccacgccactgatgcacaccaaacccaatagccagggccctcccaaccccatggcattgcccagtgagcatggacttgagcagccatctcacacccctccccagactccaacgccccccagtactccgcccctaggaaaacagaaccccagtctgccagctcctcagaccctggcagggggtaaccctgaaactgcacagccacatgctggaaccttaccgagaccgagaccagtaccaaagccaaggaaccggcccagcgtgcccccacccccccaacctcctggtgtccactcagctggggacagcagcctcaccaacacagcaccaacagcttccaagatagtaacagactccaattccagggtttcagaaccgcatcgcagcatctttcctgaaatgcactcagactcagccagcaaagacgtgcctggccgcatcctgctggatatagacaatgataccgagagcactgccctgtgaagaaagccctttcccagccctccaccacttccaccctggcgagtggagcaggggcaggcgaacctctttctttgcagaccgaacagtgaaaagctttcagtggaggacaaaggagggcctcactgtgcgggacctggccttctgcacggcccaaggagaacctggaggccaccactaaagctgaatgacctgtgtcttgaagaagttggctttctttacatgggaaggaaatcatgccaaaaaaatccaaaacaaagaagtacctggagtggagagagtattcctgctgaaacgcgcataggaagcttttgtccctgctgttaatgcgggcagcacctacagcaacttggaatgagtaagaagcagtgcgttaactatctatttaataaaatgcgctcattatgcaagtcgcctactctctgctacctggacgttcattcttatgtattaggagggaggctgcgctccttcagacttgctgcagaatcattttgtatcatgtatggtctgtgtctccccagtcccctcagaaccatgcccatggatggtgactgctggctctgtcacctcatcaaactggatgtgacccatgccgcctcgttggattgtcggaatgtagacagaaatgtactgttcttttttttttttttaaacaatgtaattgctacttgataaggaccgaacattattctagtttcatgtttaatttgaattaaatatattctgtggtttatatgaaaa

SEQ ID NO: 26230 - DNA, 3246 bp, Homo sapiens
  source 1..3246: mol_type = unassigned DNA
cgccgtttgggccgggaagcgatgtagtagctgccaggctgtcccccgccctgcccggcccgagccccgcgggccgccgccgccaccgccgccatgaagaagcagttcaaccgcatgaagcagctggctaaccagaccgtgggcagagctgagaaaacagaagtccttagtgaagatctattacagattgagagacgcctggacacggtgcggtcaatatgccaccattcccataagcgcttggtggcatgtttccagggccagcatggcaccgatgccgagaggagacacaaaaaactgcctctgacagctcttgctcaaaatatgcaagaagcatcgactcagctggaagactctctcctggggaagatgctggagacgtgtggagatgctgagaatcagctggctctcgagctctcccagcacgaagtctttgttgagaaggagatcgtggaccctctgtacggcatagctgaggtggagattcccaacatccagaagcagaggaagcagcttgcaagattggtgttagactgggattcagtcagagccaggtggaaccaagctcacaaatcctcaggaaccaactttcaggggcttccatcaaaaatagatactctaaaggaagagatggatgaagctggaaataaagtagaacagtgcaaggatcaacttgcagcagacatgtacaactttatggccaaagaaggggagtatggcaaattctttgttacgttattagaagcccaagcagattaccatagaaaagcattagcagtcttagaaaagaccctccccgaaatgcgagcccatcaagataagtgggcggaaaaaccagcctttgggactcccctagaagaacacctgaagaggagcgggcgcgagattgcgctgcccattgaagcctgtgtcatgctgcttctggagacaggcatgaaggaggagggccttttccgaattggggctggggcctccaagttaaagaagctgaaagctgctttggactgttctacttctcacctggatgagttctattcagacccccatgctgtagcaggtgctttaaaatcctatttacgggaattgcctgaacctttgatgacttttaatctgtatgaagaatggacacaagttgcaagtgtgcaggatcaagacaaaaaacttcaagacttgtggagaacatgtcagaagttgccaccacaaaattttgttaactttagatatttgatcaagttccttgcaaagcttgctcagaccagcgatgtgaataaaatgactcccagcaacattgcgattgtgttaggccctaacttgttatgggccagaaatgaaggaacacttgctgaaatggcagcagccacatccgtccatgtggttgcagtgattgaacccatcattcagcatgccgactggttcttccctgaagaggtggaatttaatgtatcagaagcatttgtacctctcaccaccccgagttctaatcactcattccacactggaaacgactctgactcggggaccctggagaggaagcggcctgctagcatggcggtgatggaaggagacttggtgaagaaggaaagtcctcccaaaccgaaggaccctgtatctgcagctgtgccagcaccagggagaaacaacagtcagatagcatctggccaaaatcagccccaggcagctgctggctcccaccagctctccatgggccaacctcacaatgctgcagggcccagcccgcatacactgcgccgagctgttaaaaaacccgctccagcacccccgaaaccgggcaacccacctcctggccaccccgggggccagagttcttcaggaacatctcagcatccacccagtctgtcaccaaagccacccacccgaagcccctctcctcccacccagcacacgggccagcctccaggccagccctccgccccctcccagctctcagcaccccggaggtactccagcagcttgtctccaatccaagctcccaatcacccaccgccgcagccccctacgcaggccacgccactgatgcacaccaaacccaatagccagggccctcccaaccccatggcattgcccagtgagcatggacttgagcagccatctcacacccctccccagactccaacgccccccagtactccgcccctaggaaaacagaaccccagtctgccagctcctcagaccctggcagggggtaaccctgaaactgcacagccacatgctggaaccttaccgagaccgagaccagtaccaaagccaaggaaccggcccagcgtgcccccacccccccaacctcctggtgtccactcagctggggacagcagcctcaccaacacagcaccaacagcttccaagatagtaacagactccaattccagggtttcagaaccgcatcgcagcatctttcctgaaatgcactcagactcagccagcaaagacgtgcctggccgcatcctgctggatatagacaatgataccgagagcactgccctgtgaagaaagccctttcccagccctccaccacttccaccctggcgagtggagcaggggcaggcgaacctctttctttgcagaccgaacagtgaaaagctttcagtggaggacaaaggagggcctcactgtgcgggacctggccttctgcacggcccaaggagaacctggaggccaccactaaagctgaatgacctgtgtcttgaagaagttggctttctttacatgggaaggaaatcatgccaaaaaaatccaaaacaaagaagtacctggagtggagagagtattcctgctgaaacgcgcataggaagcttttgtccctgctgttaatgcgggcagcacctacagcaacttggaatgagtaagaagcagtgcgttaactatctatttaataaaatgcgctcattatgcaagtcgcctactctctgctacctggacgttcattcttatgtattaggagggaggctgcgctccttcagacttgctgcagaatcattttgtatcatgtatggtctgtgtctccccagtcccctcagaaccatgcccatggatggtgactgctggctctgtcacctcatcaaactggatgtgacccatgccgcctcgttggattgtcggaatgtagacagaaatgtactgttcttttttttttttttaaacaatgtaattgctacttgataaggaccgaacattattctagtttcatgtttaatttgaattaaatatattctgtggtttatatgaaaa

SEQ ID NO: 26231 - DNA, 3398 bp, Homo sapiens
  source 1..3398: mol_type = unassigned DNA
cgccgtttgggccgggaagcgatgtagtagctgccaggctgtcccccgccctgcccggcccgagccccgcgggccgccgccgccaccgccgccatgaagaagcagttcaaccgcatgaagcagctggctaaccagaccgtgggcagagctgagaaaacagaagtccttagtgaagatctattacagattgagagacgcctggacacggtgcggtcaatatgccaccattcccataagcgcttggtggcatgtttccagggccagcatggcaccgatgccgagaggagacacaaaaaactgcctctgacagctcttgctcaaaatatgcaagaagcatcgactcagctggaagactctctcctggggaagatgctggagacgtgtggagatgctgagaatcagctggctctcgagctctcccagcacgaagtctttgttgagaaggagatcgtggaccctctgtacggcatagctgaggtggagattcccaacatccagaagcagaggaagcagcttgcaagattggtgttagactgggattcagtcagagccaggtggaaccaagctcacaaatcctcaggaaccaactttcaggggcttccatcaaaaatagatactctaaaggaagagatggatgaagctggaaataaagtagaacagtgcaaggatcaacttgcagcagacatgtacaactttatggccaaagaaggggagtatggcaaattctttgttacgataagtgggcggaaaaaccagcctttgggactcccctagaagaacacctgaagaggagcgggcgcgagattgcgctgcccattgaagcctgtgtcatgctgcttctggagacaggcatgaaggaggagggccttttccgaattggggctggggcctccaagttaaagaagctgaaagctgctttggactgttctacttctcacctggatgagttctattcagacccccatgctgtagcaggtgctttaaaatcctatttacgggaattgcctgaacctttgatgacttttaatctgtatgaagaatggacacaagttgcaagtgtgcaggatcaagacaaaaaacttcaagacttgtggagaacatgtcagaagttgccaccacaaaattttgttaactttagatatttgatcaagttccttgcaaagcttgctcagaccagcgatgtgaataaaatgactcccagcaacattgcgattgtgttaggccctaacttgttatgggccagaaatgaaggaacacttgctgaaatggcagcagccacatccgtccatgtggttgcagtgattgaacccatcattcagcatgccgactggttcttccctgaagaggtggaatttaatgtatcagaagcatttgtacctctcaccaccccgagttctaatcactcattccacactggaaacgactctgactcggggaccctggagaggaagcggcctgctagcatggcggtgatggaaggagacttggtgaagaaggaaagctttggtgtgaagcttatggacttccaggcccaccggcggggtggcactctaaatagaaagcacatatcccccgctttccagccgccacttccgcccacagatggcagcaccgtggtgcccgctggcccagagccccctccccagagctctagggctgaaagcagctctgggggtgggactgtcccctcttccgcgggcatactggagcaggggccgagcccaggcgacggcagtcctcccaaaccgaaggaccctgtatctgcagctgtgccagcaccagggagaaacaacagtcagatagcatctggccaaaatcagccccaggcagctgctggctcccaccagctctccatgggccaacctcacaatgctgcagggcccagcccgcatacactgcgccgagctgttaaaaaacccgctccagcacccccgaaaccgggcaacccacctcctggccaccccgggggccagagttcttcaggaacatctcagcatccacccagtctgtcaccaaagccacccacccgaagcccctctcctcccacccagcacacgggccagcctccaggccagccctccgccccctcccagctctcagcaccccggaggtactccagcagcttgtctccaatccaagctcccaatcacccaccgccgcagccccctacgcaggccacgccactgatgcacaccaaacccaatagccagggccctcccaaccccatggcattgcccagtgagcatggacttgagcagccatctcacacccctccccagactccaacgccccccagtactccgcccctaggaaaacagaaccccagtctgccagctcctcagaccctggcagggggtaaccctgaaactgcacagccacatgctggaaccttaccgagaccgagaccagtaccaaagccaaggaaccggcccagcgtgcccccacccccccaacctcctggtgtccactcagctggggacagcagcctcaccaacacagcaccaacagcttccaagatagtaacagactccaattccagggtttcagaaccgcatcgcagcatctttcctgaaatgcactcagactcagccagcaaagacgtgcctggccgcatcctgctggatatagacaatgataccgagagcactgccctgtgaagaaagccctttcccagccctccaccacttccaccctggcgagtggagcaggggcaggcgaacctctttctttgcagaccgaacagtgaaaagctttcagtggaggacaaaggagggcctcactgtgcgggacctggccttctgcacggcccaaggagaacctggaggccaccactaaagctgaatgacctgtgtcttgaagaagttggctttctttacatgggaaggaaatcatgccaaaaaaatccaaaacaaagaagtacctggagtggagagagtattcctgctgaaacgcgcataggaagcttttgtccctgctgttaatgcgggcagcacctacagcaacttggaatgagtaagaagcagtgcgttaactatctatttaataaaatgcgctcattatgcaagtcgcctactctctgctacctggacgttcattcttatgtattaggagggaggctgcgctccttcagacttgctgcagaatcattttgtatcatgtatggtctgtgtctccccagtcccctcagaaccatgcccatggatggtgactgctggctctgtcacctcatcaaactggatgtgacccatgccgcctcgttggattgtcggaatgtagacagaaatgtactgttcttttttttttttttaaacaatgtaattgctacttgataaggaccgaacattattctagtttcatgtttaatttgaattaaatatattctgtggtttatatgaaaa

SEQ ID NO: 26232 - DNA, 2613 bp, Homo sapiens
  source 1..2613: mol_type = unassigned DNA
cgccgtttgggccgggaagcgatgtagtagctgccaggctgtcccccgccctgcccggcccgagccccgcgggccgccgccgccaccgccgccatgaagaagcagttcaaccgcatgaagcagctggctaaccagaccgtgggcagagctgagaaaacagaagtccttagtgaagatctattacagattgagagacgcctggacacggtgcggtcaatatgccaccattcccataagcgcttggtggcatgtttccagggccagcatggcaccgatgccgagaggagacacaaaaaactgcctctgacagctcttgctcaaaatatgcaagaagcatcgactcagctggaagactctctcctggggaagatgctggagacgtgtggagatgctgagaatcagctggctctcgagctctcccagcacgaagtctttgttgagaaggagatcgtggaccctctgtacggcatagctgaggtggagattcccaacatccagaagcagaggaagcagcttgcaagattggtgttagactgggattcagtcagagccaggtggaaccaagctcacaaatcctcaggaaccaactttcaggggcttccatcaaaaatagatactctaaaggaagagatggatgaagctggaaataaagtagaacagtgcaaggatcaacttgcagcagacatgtacaactttatggccaaagaaggggagtatggcaaattctttgttacgttattagaagcccaagcagattaccatagaaaagcattagcagtcttagaaaagaccctccccgaaatgcgagcccatcaagataagtgggcggaaaaaccagcctttgggactcccctagaagaacacctgaagaggagcgggcgcgagattgcgctgcccattgaagcctgtgtcatgctgcttctggagacaggcatgaaggaggagggccttttccgaattggggctggggcctccaagttaaagaagctgaaagctgctttggactgttctacttctcacctggatgagttctattcagacccccatgctgtagcaggtgctttaaaatcctatttacgggaattgcctgaacctttgatgacttttaatctgtatgaagaatggacacaagttgcaagtgtgcaggatcaagacaaaaaacttcaagacttgtggagaacatgtcagaagttgccaccacaaaattttgttaactttagatatttgatcaagttccttgcaaagcttgctcagaccagcgatgtgaataaaatgactcccagcaacattgcgattgtgttaggccctaacttgttatgggccagaaatgaaggaacacttgctgaaatggcagcagccacatccgtccatgtggttgcagtgattgaacccatcattcagcatgccgactggttcttccctgaagaggtggaatttaatgtatcagaagcatttgtacctctcaccaccccgagttctaatcactcattccacactggaaacgactctgactcggggaccctggagaggaagcggcctgctagcatggcggtgatggaaggagacttggtgaagaaggaaagctttggtgtgaagcttatggacttccaggcccaccggcggggtggcactctaaatagaaagcacatatcccccgctttccagccgccacttccgcccacagatggcagcaccgtggtgcccgctggcccagagccccctccccagagctctagggctgaaagcagctctgggggtgggactgtcccctcttccgcgggcatactggagcaggggccgagcccaggcgacggcagtcctcccaaaccgaaggaccctgtatctgcagctgtgccagcaccagggagaaacaacagtcagatagcatctggccaaaatcagccccaggcagctgctggctcccaccagctctccatgggccaacctcacaatgctgcagggcccagcccgcatacactgcgccgagctgttaaaaaacccgctccagcacccccgaaaccgggcaacccacctcctggccaccccgggggccagagttcttcaggaacatctcagcatccacccagtctgtcaccaaagccacccacccgaagcccctctcctcccacccagcacacgggccagcctccaggccagccctccgccccctcccagctctcagcaccccggaggtactccagcagcttgtctccaatccaagctcccaatcacccaccgccgcagccccctacgcaggccacgccactgatgcacaccaaacccaatagccagggccctcccaaccccatggcattgcccagtgagcatggacttgagcagccatctcacacccctccccagactccaacgccccccagtactccgcccctaggaaaacagaaccccagtctgccagctcctcagaccctggcagggggtaaccctgaaactgcacagccacatgctggaaccttaccgagaccgagaccagtaccaaagccaaggaaccggcccagcgtgcccccacccccccaacctcctggtgtccactcagctggggacagcagcctcaccaacacagcaccaacagcttccaagatagtaacaggtgtc

SEQ ID NO: 26233 - DNA, 3498 bp, Homo sapiens
  source 1..3498: mol_type = unassigned DNA
aatgctaatgagcgagttgccaggcgagacaggaacttctttccccttctctgtgtcaggatcgcagaaagtatgtcccttctctcaccatgagctggctctccagttcccagggagtggtactaacagcctaccaccccagcggcaaggaccagaccgtcgggaacagccatgcaaaggcaggggaggaagccacctcgagtcgcagatatggccagtacactatgaaccaggaaagcaccaccatcaaagttatggagaagcctccatttgatcgatcaatttcccaggattctttggatgaactatctatggaagactattggatagaactagaaaacatcaagaaatctagtgaaaacagccaagaagatcaagaggtggttgttgtcaaagagcctgatgagggagaattggaagaagagtggcttaaagaggccggtttatccaatctcttcggagagtctgctggagatccacaggaaagcattgtgtttttatcaacattgacgcggacccaggcagcagcagttcagaagcgagtagagacggtctcccagaccttgaggaaaaaaaacaaacagtaccagattcctgacgtcagagacatatttgctcaacagagagaatcaaaagaaacagctccaggtggcactgaatcgcagtcacttagaacaaatgaaaacaaataccaaggaagagatgacgaggcatctaaccttgttggtgaagagaagctgatcccacctgaggagacgcctgcccctgaaacagacatcaacctggaggtatcatttgccgagcaagcactcaatcagaaagagagctccaaggagaaaatccagaagagcaaaggcgatgatgccacattacctagtttcagattgccaaaagacaaaacgggtaccacaaggattggtgacctcgcaccccaggacatgaagaaagtttgccatttagccctaattgagctgactgccctctatgatgtattgggtattgagctgaaacaacaaaaagctgtgaaaatcaaaacaaaagattctggtcttttttgcgttccattgacagcgctattagaacaagatcagaggaaagtaccaggaatgcgaatacccttgatctttcaaaaactgatttctcgaattgaagagagaggtttggaaacagaaggcctcttacggatccctggagctgccattagaatcaagaatctttgccaagaactagaagcaaagttttatgaagggacttttaattgggaaagtgtcaaacagcatgatgccgccagcctgctgaagctcttcattcgggagttgccccagccactgctcagtgtggagtatctcaaagcctttcaggctgtccagaatcttccaaccaagaagcagcaactacaggctttgaaccttcttgtcatcctcctacctgatgcaaacagggacacactgaaggcccttcttgaatttctccaaagagtaatagataataaagaaaaaaataaaatgacagtcatgaatgtagcaatggtcatggccccgaatctctttatgtgtcatgcattgggattgaagtccagtgaacagcgagaatttgtaatggcagctgggacagcaaataccatgcacttattgattaagtaccaaaaacttctgtggacaattcccaagtttattgtaaaccaagtgaggaagcaaaacacggaaaatcataaaaaggataaaagagccatgaagaaattgctgaagaaaatggcttatgaccgagaaaaatatgaaaagcaagataagagtacaaatgatgctgacgttcctcagggagtgattcgagtgcaagctccccatctttcgaaagtttccatggcaatacagctaactgaagaactaaaagccagtgatgtacttgccaggtttctcagccaagaaagtggggttgcccagactctcaagaaaggagaagtttttttgtatgaaattggaggaaatattggggaacgctgccttgatgatgacacttacatgaaggatttatatcagcttaacccaaatgctgagtgggttataaagtcaaagccattgtagaagacttaacaagctgcagataaccatgtggacttctgtcataattcttgctgagtcaagagtgtaaataaaagaaatggcaggactcatattattcagttgtacccaagtatttaaaaatgactctcttaagccttaaaaagtcatagatttgtgctgctgccagaattatattaattattattaatgttattattagaaaaaaaatttctggagtgagagtaaagaggcttaattagtttgtgggcagttttcatatgctctgtgaaatgtgtccagatgtgacatagtttttttttttaatatgtggaaatgtcttctcttcccattcttttctcctaaaatcatatatactgtaatatatgctctctcacctctattacctcctcacatctaccctttcccagttaggtttgctttttgaccaaaaagataacaaataccaggtatggcaagttgtgaagacagcacattaaaacatacctaatttcacagtattcctgtcacgacagaatgttagtattcatctctttgaatcatttgctcaaataataacattccaccttttcctgctgtatcacaggaagtgatttgcattttttttcagttcatctgacttatgttcacagaaccgtatcagcgaccaagaaaataggactgtcagaagctgccagttattactgaaccattaaatacttatatactaagaataaataaaatatacccatgtgaaataataattggattatggataacaagagagtgaaagccaaagcactttctgtctactgtactcttctaaatggaattttaaaagtcatagctggctttacgtgttgtcattattagcattataaatatgcatgatagtataatccagtaatggttgaagaatgtattttacttaaagagggatttttttttttaagtcctgaataagtctactggaagaattattcttctgggtgaaaaagcttttgtttgtgttcttattttaaataatcggagtcaatttattaaaatgttcttgaaagtactattcccagggattttaatgcacaaaccatattgtgacaagagatgagcctctgtactgtaaataagaaatgaagtagagaaatgttaaatattttatgagtttagaatatagtaaataaaaggtgatgtaaatgaatgctgcacaaacggtgttcatgatacttttagtagtactttaggaaaaactacacattctcagaagctcttgatgtctctaatgaagggggggaatgctgttaatgagaacagtcataaatttttagcatataattacaagaacagcctgtggatatgatcacttaaatgattttgtggtgattcgtgccattgcttttttatttaaaagaaaattttgtaattaaatgcctttttctaaatt

SEQ ID NO: 26234 - DNA, 4260 bp, Homo sapiens
  source 1..4260: mol_type = unassigned DNA
tcgcagatatggccagtacactatgaaccaggaaagcaccaccatcaaagttatggagaagcctccatttgatcgatcaatttcccaggattctttggatgaactatctatggaagactattggatagaactagaaaacatcaagaaatctagtgaaaacagccaagaagatcaagaggtggttgttgtcaaagagcctgatgagggagaattggaagaagagtggcttaaagaggccggtttatccaatctcttcggagagtctgctggagatccacaggaaagcattgtgtttttatcaacattgacgcggacccaggcagcagcagttcagaagcgagtagagacggtctcccagaccttgaggaaaaaaaacaaacagtaccagattcctgacgtcagagacatatttgctcaacagagagaatcaaaagaaacagctccaggtggcactgaatcgcagtcacttagaacaaatgaaaacaaataccaaggaagagatgacgaggcatctaaccttgttggtgaagagaagctgatcccacctgaggagacgcctgcccctgaaacagacatcaacctggaggtatcatttgccgagcaagcactcaatcagaaagagagctccaaggagaaaatccagaagagcaaaggcgatgatgccacattacctagtttcagattgccaaaagacaaaacgggtaccacaaggattggtgacctcgcaccccaggacatgaagaaagtttgccatttagccctaattgagctgactgccctctatgatgtattgggtattgagctgaaacaacaaaaagctgtgaaaatcaaaacaaaagattctggtcttttttgcgttccattgacagcgctattagaacaagatcagaggaaagtaccaggaatgcgaatacccttgatctttcaaaaactgatttctcgaattgaagagagaggtttggaaacagaaggcctcttacggatccctggagctgccattagaatcaagaatctttgccaagaactagaagcaaagttttatgaagggacttttaattgggaaagtgtcaaacagcatgatgccgccagcctgctgaagctcttcattcgggagttgccccagccactgctcagtgtggagtatctcaaagcctttcaggctgtccagaatcttccaaccaagaagcagcaactacaggctttgaaccttcttgtcatcctcctacctgatgcaaacagggacacactgaaggcccttcttgaatttctccaaagagtaatagataataaagaaaaaaataaaatgacagtcatgaatgtagcaatggtcatggccccgaatctctttatgtgtcatgcattgggattgaagtccagtgaacagcgagaatttgtaatggcagctgggacagcaaataccatgcacttattgattaagtaccaaaaacttctgtggacaattcccaagtttattgtaaaccaagtgaggaagcaaaacacggaaaatcataaaaaggataaaagagccatgaagaaattgctgaagaaaatggcttatgaccgagaaaaatatgaaaagcaagataagagtacaaatgatgctgacgttcctcagggagtgattcgagtgcaagctccccatctttcgaaagtttccatggcaatacagctaactgaagaactaaaagccagtgatgtacttgccaggtttctcagccaagaaagtggggttgcccagactctcaagaaaggagaagtttttttgtatgaaattggaggaaatattggggaacgctgccttgatgatgacacttacatgaaggatttatatcagcttaacccaaatgctgagtgggttataaagtcaaagccattgtagaagacttaacaagctgcagataaccatgtggacttctgtcataattcttgctgagtcaagagtgtaaataaaagaaatggcaggactcatattattcagttgtacccaagtatttaaaaatgactctcttaagccttaaaaagtcatagatttgtgctgctgccagaattatattaattattattaatgttattattagaaaaaaaatttctggagtgagagtaaagaggcttaattagtttgtgggcagttttcatatgctctgtgaaatgtgtccagatgtgacatagtttttttttttaatatgtggaaatgtcttctcttcccattcttttctcctaaaatcatatatactgtaatatatgctctctcacctctattacctcctcacatctaccctttcccagttaggtttgctttttgaccaaaaagataacaaataccaggtatggcaagttgtgaagacagcacattaaaacatacctaatttcacagtattcctgtcacgacagaatgttagtattcatctctttgaatcatttgctcaaataataacattccaccttttcctgctgtatcacaggaagtgatttgcattttttttcagttcatctgacttatgttcacagaaccgtatcagcgaccaagaaaataggactgtcagaagctgccagttattactgaaccattaaatacttatatactaagaataaataaaatatacccatgtgaaataataattggattatggataacaagagagtgaaagccaaagcactttctgtctactgtactcttctaaatggaattttaaaagtcatagctggctttacgtgttgtcattattagcattataaatatgcatgatagtataatccagtaatggttgaagaatgtattttacttaaagagggatttttttttttaagtcctgaataagtctactggaagaattattcttctgggtgaaaaagcttttgtttgtgttcttattttaaataatcggagtcaatttattaaaatgttcttgaaagtactattcccagggattttaatgcacaaaccatattgtgacaagagatgagcctctgtactgtaaataagaaatgaagtagagaaatgttaaatattttatgagtttagaatatagtaaataaaaggtgatgtaaatgaatgctgcacaaacggtgttcatgatacttttagtagtactttaggaaaaactacacattctcagaagctcttgatgtctctaatgaagggggggaatgctgttaatgagaacagtcataaatttttagcatataattacaagaacagcctgtggatatgatcacttaaatgattttgtggtgattcgtgccattgcttttttatttaaaagaaaattttgtaattaaatgcctttttctaaattatcttctcttggaatcattacttttaatcctatgtgtttatgagtatttttgctttttttttattaatattgagaaatggacttttttgttattaaaagtcacctctattttctattttctttgtaatttttaaagtaggaagatgtcagagatgtaaatatgttttcgtctttagtttttttccttttacaaatttttattcttcaggattttcaaaatacagtttagtctgtttctttgacaatatgtattaatttcccaattagcaaaatggtacttattagtgggttgaaaacaattaataatataaaagaaaaattaagtgcttaaaacattttaggagtatacaacttcaaaaaaaaagatagcagtgaggataatgatttaagtaaaaggttgtctgaagcatatgccaactaaatttcgcaacgtttgctacctacctgaaaaggagggtcaggagggagacacaacatatttttgatcatgaaaaagtatcttaattttaaaaaagtgaaaatgccattttattttgaatcccttttagaactcacgacccaagttcatcaatgttgaataatatcacgtttaaataacaaaaaaatatggactttaaaaaatctcaaattttttagagacagggtcttgctctgttttccagattggagtacagcagtgcattcgcggctaactgcagcctcaagcactggggctcaagcaaacctcctgcctcagcctcgtgagtagctaggaccacaggtgcatgccaccatgcctggctctaaagagaaaaaaaacttgataccatagagccttgaatataaatatcctgatgttaacctactgcttttgctgtgattttttttccttagtgagttttaaatctcaggctagatttttatttgtttttctgtgtgtgtatgagacaaaataaaaataaatatatttgccttgagtttaaaa

SEQ ID NO: 26235 - DNA, 1514 bp, Homo sapiens
  source 1..1514: mol_type = unassigned DNA
ggggcggtgaaagaagtttgctgacgaagatggcgactgaggcacagagtgaaggggaggtgccagcccgcgaatccggccggagtgatgccatctgcagttttgtgatctgcaatgattcttcccttcgaggtcagcccattatctttaatcctgacttttttgtggagaaactccgacatgagaaacctgagattttcactgagttggtggtcagcaatatcacaaggctcatcgatttacctggaactgagttggctcagctgatgggggaagtggaccttaagttgcctggcggggctggcccagcatcaggattcttccggtctctcatgtctctcaagcgaaaggaaaaaggagtgatatttgggtccccactgacggaggaaggcattgcccagatataccaactgattgagtatctacacaaaaacttgcgagtagagggtttgtttagagtaccgggtaatagtgtccgacagcagattttaagggatgctctcaataatggaactgacattgacttggaatcaggggaatttcactcaaatgatgttgccactttgctgaagatgtttctaggagagttgccggagcctctgctgacacataaacacttcaatgcacacctcaaaatcgctgatttgatgcagtttgatgataaaggaaacaagaccaatataccagacaaggaccggcaaattgaggctctccagttgctcttcctcattctccctcctcctaatcgtaatttgctgaagttattgcttgatctcctataccagacagcaaagaaacaagacaagaacaagatgtcagcctataaccttgcccttatgtttgcaccccatgtcctgtggccaaaaaatgtcactgcaaatgaccttcaggagaatatcacaaagttaaacagtgggatggcttttatgattaaacactcccagaaactttttaaggctcctgcttacattcgggagtgtgcgagattgcactatttgggatccagaactcaggcatcaaaggatgaccttgacctcatagcttcatgtcatactaagtcctttcagctggcaaagtctcagaaacggaaccgggtagattcctgccctcaccaggaggagacccagcaccatacggaagaggcactgagagagctgtttcaacacgttcatgatatgccagagtcagcaaagaagaaacaacttattagacagtttaataagcaatcattgacccagacaccagggcgagaaccttctacttcccaggtacaaaagagggctcgttcgcgctccttcagtgggcttattaagcggaaggtcctgggaaatcagatgatgtcagaaaagaaaaagaagaaccctactccagaatctgtggccattggtgaattgaagggaaccagcaaagaaaataggaacttattattttctggctctccagctgtcacgatgacaccaacaagattgaagtggtctgaagggaagaaagaggggaaaaaagtattcttataa

SEQ ID NO: 26236 - DNA, 1488 bp, Homo sapiens
  source 1..1488: mol_type = unassigned DNA
aagctttcttcctgtctcttcgatttaccaatgcctcatcagaaactttcagcacttattgatgccatctgcagttttgtgatctgcaatgattcttcccttcgaggtcagcccattatctttaatcctgacttttttgtggagaaactccgacatgagaaacctgagattttcactgagttggtggtcagcaatatcacaaggctcatcgatttacctggaactgagttggctcagctgatgggggaagtggaccttaagttgcctggcggggctggcccagcatcaggattcttccggtctctcatgtctctcaagcgaaaggaaaaaggagtgatatttgggtccccactgacggaggaaggcattgcccagatataccaactgattgagtatctacacaaaaacttgcgagtagagggtttgtttagagtaccgggtaatagtgtccgacagcagattttaagggatgctctcaataatggaactgacattgacttggaatcaggggaatttcactcaaatgatgttgccactttgctgaagatgtttctaggagagttgccggagcctctgctgacacataaacacttcaatgcacacctcaaaatcgctgatttgatgcagtttgatgataaaggaaacaagaccaatataccagacaaggaccggcaaattgaggctctccagttgctcttcctcattctccctcctcctaatcgtaatttgctgaagttattgcttgatctcctataccagacagcaaagaaacaagacaagaacaagatgtcagcctataaccttgcccttatgtttgcaccccatgtcctgtggccaaaaaatgtcactgcaaatgaccttcaggagaatatcacaaagttaaacagtgggatggcttttatgattaaacactcccagaaactttttaaggctcctgcttacattcgggagtgtgcgagattgcactatttgggatccagaactcaggcatcaaaggatgaccttgacctcatagcttcatgtcatactaagtcctttcagctggcaaagtctcagaaacggaaccgggtagattcctgccctcaccaggaggagacccagcaccatacggaagaggcactgagagagctgtttcaacacgttcatgatatgccagagtcagcaaagaagaaacaacttattagacagtttaataagcaatcattgacccagacaccagggcgagaaccttctacttcccaggtacaaaagagggctcgttcgcgctccttcagtgggcttattaagcggaaggtcctgggaaatcagatgatgtcagaaaagaaaaagaagaaccctactccagaatctgtggccattggtgaattgaagggaaccagcaaagaaaataggaacttattattttctggctctccagctgtcacgatgacaccaacaagattgaagtggtctgaagggaagaaagaggggaaaaaagtattcttataa

SEQ ID NO: 26237 - DNA, 1427 bp, Homo sapiens
  source 1..1427: mol_type = unassigned DNA
ggggcggtgaaagaagtttgctgacgaagatggcgactgaggcacagagtgaaggggaggtgccagcccgcgaatccggccggagtgatgccatctgcagttttgtgatctgcaatgattcttcccttcgaggtcagcccattatctttaatcctgacttttttgtggagaaactccgacatgagaaacctgagattttcactgagttggtggtcagcaatatcacaaggctcatcgatttacctggaactgagttggctcagctgatgggggaagtggaccttaagttgcctggcggggctggcccagcatcaggattcttccggtctctcatgtctctcaagcgaaaggaaaaaggagtgatatttgggtccccactgacggaggaaggcattgcccagatataccaactgattgagtatctacacaaaaacttgcgagtagagggtttgtttagagtaccgggtaatagtgtccgacagcagattttaagggatgctctcaataatggaactgacattgacttggaatcaggggaatttcactcaaatgatgttgccactttgctgaagatgtttctaggagagttgccggagcctctgctgacacataaacacttcaatgcacacctcaaaatcgctgatttgatgcagtttgatgataaaggaaacaagaccaatataccagacaaggaccggcaaattgaggctctccagttgctcttcctcattctccctcctcctaatcgtaatttgctgaagttattgcttgatctcctataccagacagcaaagaaacaagacaagaacaagatgtcagcctataaccttgcccttatgtttgcaccccatgtcctgtggccaaaaaatgctcctgcttacattcgggagtgtgcgagattgcactatttgggatccagaactcaggcatcaaaggatgaccttgacctcatagcttcatgtcatactaagtcctttcagctggcaaagtctcagaaacggaaccgggtagattcctgccctcaccaggaggagacccagcaccatacggaagaggcactgagagagctgtttcaacacgttcatgatatgccagagtcagcaaagaagaaacaacttattagacagtttaataagcaatcattgacccagacaccagggcgagaaccttctacttcccaggtacaaaagagggctcgttcgcgctccttcagtgggcttattaagcggaaggtcctgggaaatcagatgatgtcagaaaagaaaaagaagaaccctactccagaatctgtggccattggtgaattgaagggaaccagcaaagaaaataggaacttattattttctggctctccagctgtcacgatgacaccaacaagattgaagtggtctgaagggaagaaagaggggaaaaaagcatttgtttga

SEQ ID NO: 26238 - DNA, 5463 bp, Homo sapiens
  source 1..5463: mol_type = unassigned DNA
ggggcggtgaaagaagtttgctgacgaagatggcgactgaggcacagagtgaaggggaggtgccagcccgcgaatccggccggagtgatgccatctgcagttttgtgatctgcaatgattcttcccttcgaggtcagcccattatctttaatcctgacttttttgtggagaaactccgacatgagaaacctgagattttcactgagttggtggtcagcaatatcacaaggctcatcgatttacctggaactgagttggctcagctgatgggggaagtggaccttaagttgcctggcggggctggcccagcatcaggattcttccggtctctcatgtctctcaagcgaaaggaaaaaggagtgatatttgggtccccactgacggaggaaggcattgcccagatataccaactgattgagtatctacacaaaaacttgcgagtagagggtttgtttagagtaccgggtaatagtgtccgacagcagattttaagggatgctctcaataatggaactgacattgacttggaatcaggggaatttcactcaaatgatgttgccactttgctgaagatgtttctaggagagttgccggagcctctgctgacacataaacacttcaatgcacacctcaaaatcgctgatttgatgcagtttgatgataaaggaaacaagaccaatataccagacaaggaccggcaaattgaggctctccagttgctcttcctcattctccctcctcctaatcgtaatttgctgaagttattgcttgatctcctataccagacagcaaagaaacaagacaagaacaagatgtcagcctataaccttgcccttatgtttgcaccccatgtcctgtggccaaaaaatgtcactgcaaatgaccttcaggagaatatcacaaagttaaacagtgggatggcttttatgattaaacactcccagaaactttttaaggctcctgcttacattcgggagtgtgcgagattgcactatttgggatccagaactcaggcatcaaaggatgaccttgacctcatagcttcatgtcatactaagtcctttcagctggcaaagtctcagaaacggaaccgggtagattcctgccctcaccaggaggagacccagcaccatacggaagaggcactgagagagctgtttcaacacgttcatgatatgccagagtcagcaaagaagaaacaacttattagacagtttaataagcaatcattgacccagacaccagggcgagaaccttctacttcccaggtacaaaagagggctcgttcgcgctccttcagtgggcttattaagcggaaggtcctgggaaatcagatgatgtcagaaaagaaaaagaagaaccctactccagaatctgtggccattggtgaattgaagggaaccagcaaagaaaataggaacttattattttctggctctccagctgtcacgatgacaccaacaagattgaagtggtctgaagggaagaaagaggggaaaaaaggatttctctgaaggatccagagttgtctcctatggtccatgcagaattttctgtttagtgggcaggtgttattcctgcccacagcaaagcttggacttgcagcttgcttgctgcattttgaattgtcaaagccaactaataccgtgacccgactgatacctctaaccccactcactggatgatgtttgcaagctgtgccttctgagagagtgcttaggccctgtctctcttttttaatattatggggaaaccactaactatccaaccagcttatacagcacactaaggtgggcttcagtgctcactcaatgtgtttaggcagattccacttttgaaaaaaaatatgaaatgtgtgctcaactgccagtaattttttaaaaagcactgtcccagtggattgatgttgtttttaatggatattttgggtttttctctgttttgatagtattgggtatttggttgtttttgtttgtttatttctttgttttaaaagccatgtttttggttgggctctaagctagatatctttccctctttttcactttgagctttgggaaaactctttatcttatgaggctgtattcctcaatacctaatttgtgtccaaagaatttatagcttttctggacattttttattatttcttgggtgtgacatcagagtatttgacctgcagtattgaaaaaggagaattcagaatgatacagtattttaacaaatcttaattattaaactcttttccttccttccatttctccctcccttgtccatctctctctctctttccctttcctcagtgatgtgaaaataattgtgttttgctgaacttgttatcttcattcaatttcctcttgactaaaacatctctggtgccaacgtaatacttctgaaccaaatcactgtgactcaaggaaagtcactgacagcataagagaagtttgctaaaatatttgtatgtgggggaagctctggagtgtgcctaggagggggctggctgcctttatgtcccaggatgactctttatgggtgggattacattgcaccctctgagggtgcaggctagaccgtctcctgagaggaagttaggatcagaaagaagaagcaagcagcaacctctgcagggctgacaggatttaaaggagagaatgttcttatttggaagcagctgtggcttgtcaccaatgttcaaggagtgttactgttccgccctctctttgtcagaagggacacaggtggtaatttggagatggggccagagcttctggcttttggatttggtgtgttcacttgtgttggatagagcagtggcatggctttgacctagtatgaactggtgtctgcccagagagcagcatgtagcaggggggaatgctcaggtttgtgcctggctctgtggagctgtacaacccttctcaccctgtgggttggagccgagtcaggccactatggggaagcagttgccccacaaaatgtggtttgctgacctatttctaaactgttgaatatgctgcaccattgctgaaatgaaagatgactctgggggagcagagcttggccttgtgcccagctggcagccccctctgccagcctttctgctgcttttgctgctgtaacagcaatagtggagaaaaatgtaaaatttggtcttccagcttaatgcagtgtgaacaatagatggttaggaaaacaaaactgcttagaagcccctttctctagagcagttttatgtcatttgtaaaaacacatattagcaaattcgtttgcgtaggtttctattaaatatttgactttttttttcttattaagaaaatgaaatcccttacaccagatatcagttaattcaaacagaaaaccctttgggtatcaccaaattgaaatggtattcttccttaactcttccttctttcctttatttgtttagacgtgcttcatcccgaagtggtgctatggtctgttaaacagggctggcatcaggtagagggagcagagtggtgacctgatagctcctgtcatcgtgttagtttttgattctatttaagggaagtagctgagatttagacggatgtagatgctctttgggtgaatggaatcataagcaaaggttgtgttctggggtgaggatcatgagagagatatttatcacatgcacatgcctttatatagctggtctccttgggtggtttatgtgtgttttgtttatttattgaatatgttttcccttgctttaggggttttataggtcatttttcttaatagaagctgtgatcgacttagaatccaaatttgaggagtaagcagcataaccttctaccttgtaatatgtaactattctaatccagtggaatcttacggaaaacacagagaaaaccccttttatcatttgccacagaaggctgctgtctcccttctgatttggtgggcaggtattgtttttgagccagtatttaacagagttttttaatctataagattttttttgaatctatttcattgtgtttgtttttcatgttggaacaatctctctggaagtgcctcttcttgtggcttttacaacttcatttctttctggggtcacctgtgatgggctttgatgtggtgtcaatttggggccttgtgtttgtgccagagggatacacatattaaactgcaggccaccttcctggtccagactgtactgtgtgaaccccactgactaaattagtgagaaccataggcgttggaatttctcaccttttacaatgatagacttttgcattgggaccaatgaatctggtgtgaaaaaccctgctgtagtagtgaaagagcatcaggagatactgactgtacctgagggccaaaacaggagcaggtaacgaaccgtaaaaaaaggagcaggtaatgaatcgtaaccaaaactacagttgatcctccgcaaaggaaagctctttacccagaatgtccttccagagtcattcaggaaggacaagggaacacccttgggaaatgggctagtggagggctgttgactgcagtgacacctgggtgctccggaggtatctgttctgttgacctgtaaggaagcagtcgatcctagagtgtcagaacagagccattctctcctcctgagtaggaacgtttctgttcagtttccctcacagcagcctgtgttagcatgcagttgaaaatactgccgtctaggagaacctgtggtcactgggaacgtgccccacagtgactggccatgcaaccaggtgatttttaggaatagatgtctctagactctgtctcctttcctacaaggcctcacacagatgcttgaggctaatggcccccattctgaggtcatttttgtgtagaactcctttccccaggagagagccttatctctgccctcctttaccctgaaggcttcaaacggaagacaggacctagatctaaacctagatactagcattttgtgggattgtctagaatttggggaagatttgggttcctaagatgcacaagcgttttacaccagtggtgattaactcaactaaaacccactgtaggaagttagcttccccagacagctaatgccgagatcttctaccagcgtagagttgacagaagcaggccagcgaggaggtgtgggacataatagcctgagtgcttgggttaccatggagactggagtgtgtgaggccacagcctgtgctaaagagccatggagccctcccctggccatgtctggggacagatagaacctgttgggggaaatattccctcaccccagggttctttctgcagagcaagggttgcctttgtcctatccctgagcttgctcaacaagagaaacaaggtttcttaagtgttttggttaaagttttcattcttatttgactatgtatatgtaattgtaaagaaacgatcctatgcattgtctttcttttatattcttgtaatattctgaaattaaaattgttttgtttcatatccaga

SEQ ID NO: 26239 - DNA, 2301 bp, Homo sapiens
  source 1..2301: mol_type = unassigned DNA
aagctttcttcctgtctcttcgatttaccaatgcctcatcagaaactttcagcacttattgatgccatctgcagttttgtgatctgcaatgattcttcccttcgaggtcagcccattatctttaatcctgacttttttgtggagaaactccgacatgagaaacctgagattttcactgagttggtggtcagcaatatcacaaggctcatcgatttacctggaactgagttggctcagctgatgggggaagtggaccttaagttgcctggcggggctggcccagcatcaggattcttccggtctctcatgtctctcaagcgaaaggaaaaaggagtgatatttgggtccccactgacggaggaaggcattgcccagatataccaactgattgagtatctacacaaaaacttgcgagtagagggtttgtttagagtaccgggtaatagtgtccgacagcagattttaagggatgctctcaataatggaactgacattgacttggaatcaggggaatttcactcaaatgatgttgccactttgctgaagatgtttctaggagagttgccggagcctctgctgacacataaacacttcaatgcacacctcaaaatcgctgatttgatgcagtttgatgataaaggaaacaagaccaatataccagacaaggaccggcaaattgaggctctccagttgctcttcctcattctccctcctcctaatcgtaatttgctgaagttattgcttgatctcctataccagacagcaaagaaacaagacaagaacaagatgtcagcctataaccttgcccttatgtttgcaccccatgtcctgtggccaaaaaatgtcactgcaaatgaccttcaggagaatatcacaaagttaaacagtgggatggcttttatgattaaacactcccagaaactttttaaggctcctgcttacattcgggagtgtgcgagattgcactatttgggatccagaactcaggcatcaaaggatgaccttgacctcatagcttcatgtcatactaagtcctttcagctggcaaagtctcagaaacggaaccgggtagattcctgccctcaccaggaggagacccagcaccatacggaagaggcactgagagagctgtttcaacacgttcatgatatgccagagtcagcaaagaagaaacaacttattagacagtttaataagcaatcattgacccagacaccagggcgagaaccttctacttcccaggtacaaaagagggctcgttcgcgctccttcagtgggcttattaagcggaaggtcctgggaaatcagatgatgtcagaaaagaaaaagaagaaccctactccagaatctgtggccattggtgaattgaagggaaccagcaaagaaaataggaacttattattttctggctctccagctgtcacgatgacaccaacaagattgaagtggtctgaagggaagaaagaggggaaaaaaggatttctctgaaggatccagagttgtctcctatggtccatgcagaattttctgtttagtgggcaggtgttattcctgcccacagcaaagcttggacttgcagcttgcttgctgcattttgaattgtcaaagccaactaataccgtgacccgactgatacctctaaccccactcactggatgatgtttgcaagctgtgccttctgagagagtgcttaggccctgtctctcttttttaatattatggggaaaccactaactatccaaccagcttatacagcacactaaggtgggcttcagtgctcactcaatgtgtttaggcagattccacttttgaaaaaaaatatgaaatgtgtgctcaactgccagtaattttttaaaaagcactgtcccagtggattgatgttgtttttaatggatattttgggtttttctctgttttgatagtattgggtatttggttgtttttgtttgtttatttctttgttttaaaagccatgtttttggttgggctctaagctagatatctttccctctttttcactttgagctttgggaaaactctttatcttatgaggctgtattcctcaatacctaatttgtgtccaaagaatttatagcttttctggacattttttattatttcttgggtgtgacatcagagtatttgacctgcagtattgaaaaaggagaattcagaatgatacagtattttaacaaatcttaattattaaactcttttccttccttccatttctccctcccttgtccatctctctctctctttccctttcctcagtgatgtgaaaataattgtgttttgctg

SEQ ID NO: 26240 - DNA, 1901 bp, Homo sapiens
  source 1..1901: mol_type = unassigned DNA
aaaggagagtttctttgtcacaacaaacaaggggaaagctttcttcctgtctcttcgatttaccaatgcctcatcagaaaacttgcgagtagagggtttgtttagagtaccgggtaatagtgtccgacagcagattttaagggatgctctcaataatggaactgacattgacttggaatcaggggaatttcactcaaatgatgttgccactttgctgaagatgtttctaggagagttgccggagcctctgctgacacataaacacttcaatgcacacctcaaaatcgctgatttgatgcagtttgatgataaaggaaacaagaccaatataccagacaaggaccggcaaattgaggctctccagttgctcttcctcattctccctcctcctaatcgtaatttgctgaagttattgcttgatctcctataccagacagcaaagaaacaagacaagaacaagatgtcagcctataaccttgcccttatgtttgcaccccatgtcctgtggccaaaaaatgtcactgcaaatgaccttcaggagaatatcacaaagttaaacagtgggatggcttttatgattaaacactcccagaaactttttaaggctcctgcttacattcgggagtgtgcgagattgcactatttgggatccagaactcaggcatcaaaggatgaccttgacctcatagcttcatgtcatactaagtcctttcagctggcaaagtctcagaaacggaaccgggtagattcctgccctcaccaggaggagacccagcaccatacggaagaggcactgagagagctgtttcaacacgttcatgatatgccagagtcagcaaagaagaaacaacttattagacagtttaataagcaatcattgacccagacaccagggcgagaaccttctacttcccaggtacaaaagagggctcgttcgcgctccttcagtgggcttattaagcggaaggtcctgggaaatcagatgatgtcagaaaagaaaaagaagaaccctactccagaatctgtggccattggtgaattgaagggaaccagcaaagaaaataggaacttattattttctggctctccagctgtcacgatgacaccaacaagattgaagtggtctgaagggaagaaagaggggaaaaaaggatttctctgaaggatccagagttgtctcctatggtccatgcagaattttctgtttagtgggcaggtgttattcctgcccacagcaaagcttggacttgcagcttgcttgctgcattttgaattgtcaaagccaactaataccgtgacccgactgatacctctaaccccactcactggatgatgtttgcaagctgtgccttctgagagagtgcttaggccctgtctctcttttttaatattatggggaaaccactaactatccaaccagcttatacagcacactaaggtgggcttcagtgctcactcaatgtgtttaggcagattccacttttgaaaaaaaatatgaaatgtgtgctcaactgccagtaattttttaaaaagcactgtcccagtggattgatgttgtttttaatggatattttgggtttttctctgttttgatagtattgggtatttggttgtttttgtttgtttatttctttgttttaaaagccatgtttttggttgggctctaagctagatatctttccctctttttcactttgagctttgggaaaactctttatcttatgaggctgtattcctcaatacctaatttgtgtccaaagaatttatagcttttctggacattttttattatttcttgggtgtgacatcagagtatttgacctgcagtattgaaaaaggagaattcagaatgatacagtattttaacaaatcttaattattaaactcttttccttccttcc

SEQ ID NO: 26241 - DNA, 8956 bp, Homo sapiens
  source 1..8956: mol_type = unassigned DNA
atggcgactgaggcacagagtgaaggggaggtgccagcccgcgaatccggccggagtgatgccatctgcagttttgtgatctgcaatgattcttcccttcgaggtcagcccattatctttaatcctgacttttttgtggagaaactccgacatgagaaacctgagattttcactgagttggtggtcagcaatatcacaaggctcatcgatttacctggaactgagttggctcagctgatgggggaagtggaccttaagttgcctggcggggctggcccagcatcaggattcttccggtctctcatgtctctcaagcgaaaggaaaaaggagtgatatttgggtccccactgacggaggaaggcattgcccagatataccaactgattgagtatctacacaaaaacttgcgagtagagggtttgtttagagtaccgggtaatagtgtccgacagcagattttaagggatgctctcaataatggaactgacattgacttggaatcaggggaatttcactcaaatgatgttgccactttgctgaagatgtttctaggagagttgccggagcctctgctgacacataaacacttcaatgcacacctcaaaatcgctgatttgatgcagtttgatgataaaggaaacaagaccaatataccagacaaggaccggcaaattgaggctctccagttgctcttcctcattctccctcctcctaatcgtaatttgctgaagttattgcttgatctcctataccagacagcaaagaaacaagacaagaacaagatgtcagcctataaccttgcccttatgtttgcaccccatgtcctgtggccaaaaaatgtcactgcaaatgaccttcaggagaatatcacaaagttaaacagtgggatggcttttatgattaaacactcccagaaactttttaaggctcctgcttacattcgggagtgtgcgagattgcactatttgggatccagaactcaggcatcaaaggatgaccttgacctcatagcttcatgtcatactaagtcctttcagctggcaaagtctcagaaacggaaccgggtagattcctgccctcaccaggaggagacccagcaccatacggaagaggcactgagagagctgtttcaacacgttcatgatatgccagagtcagcaaagaagaaacaacttattagacagtttaataagcaatcattgacccagacaccagggcgagaaccttctacttcccaggtacaaaagagggctcgttcgcgctccttcagtgggcttattaagcggaaggtcctgggaaatcagatgatgtcagaaaagaaaaagaagaaccctactccagaatctgtggccattggtgaattgaagggaaccagcaaagaaaataggaacttattattttctggctctccagctgtcacgatgacaccaacaagattgaagtggtctgaagggaagaaagaggggaaaaaagggaactcaatggcaacaacatcactcggatccataagaatgactttgcggggctcaagcagctgcgggtgctgcagctgatggagaaccagattggagcagtggaacgtggtgcttttgatgacatgaaggagctggagcggctgcgactgaaccgaaaccagctgcacatgttaccggaactgctgttccagaacaaccaggctttgtcaagactggacttgagtgagaacgccatccaggccatccccaggaaagcttttcggggagctacggaccttaaaaatttacagctggacaagaaccagatcagctgcattgaggaaggggccttccgtgctctgcgggggctggaggtgctgaccctgaacaacaacaatatcaccaccatccccgtgtccagcttcaaccatatgcccaagctacggaccttccgcctgcactccaaccacctgttttgcgactgccacctggcctggctctcgcagtggctgaggcagcggccaaccatcgggctcttcacccagtgctcgggcccagccagcctgcgtggcctcaatgtggcagaggtccagaagagtgagttcagctgctcaggccagggagaagcggggcgcgtgcccacctgcaccctgtcctccggctcctgcccggccatgtgcacctgcagcaatggcatcgtggactgtcgtggaaaaggcctcactgccatcccggccaacctgcccgagaccatgacggagatacgcctggagctgaacggcatcaagtccatccctcctggagccttctcaccctacagaaagctacggaggatagacctgagcaacaatcagatcgctgagattgcacccgacgccttccagggcctccgctccctgaactcgctggtcctctatggaaacaagatcacagacctcccccgtggtgtgtttggaggcctatacaccctacagctcctgctcctgaatgccaacaagatcaactgcatccggcccgatgccttccaggacctgcagaacctctcactgctctccctgtatgacaacaagatccagagcctcgccaagggcactttcacctccctgcgggccatccagactctgcacctggcgcagaaccctttcatttgcgactgtaacctcaagtggctggcagacttcctgcgcaccaatcccatcgagacgagtggtgcccgctgtgccagtccccggcgcctcgccaacaagcgcatcgggcagatcaagagcaagaagttccggtgctcagccaaagagcagtacttcattccaggcacggaggattaccagctgaacagcgagtgcaacagcgacgtggtctgtccccacaagtgccgctgtgaggccaacgtggtggagtgctccagcctgaagctcaccaagatccctgagcgcatcccccagtccacggcagaactgcgattgaataacaatgagatttccatcctggaggccactgggatgtttaaaaaacttacacatctgaagaaaatcaatctgagcaacaacaaggtgtcagaaattgaagatggggccttcgagggcgcagcctctgtgagcgagctgcacctaactgccaaccagctggagtccatccggagcggcatgttccggggtctggatggcttgaggaccctaatgctgcggaacaaccgcatcagctgcatccacaacgacagcttcacgggcctgcgcaacgtccggctcctctcgctctacgacaaccagatcaccaccgtatccccaggagccttcgacaccctccagtccctctccacactgaatctcctggccaaccctttcaactgcaactgccagctggcctggctaggaggctggctacggaagcgcaagatcgtgacggggaacccgcgatgccagaaccctgactttttgcggcagattcccctgcaggacgtggccttccctgacttcaggtgtgaggaaggccaggaggaggggggctgcctgccccgcccacagtgcccacaggagtgcgcctgcctggacaccgtggtccgatgcagcaacaagcacctgcgggccctgcccaagggcattcccaagaatgtcacagaactctatttggacgggaaccagttcacgctggttccgggacagctgtctaccttcaagtacctgcagctcgtggacctgagcaacaacaagatcagttccttaagcaattcctccttcaccaacatgagccagctgaccactctgatcctcagctacaatgccctgcagtgcatcccgcctttggccttccagggactccgctccctgcgcctgctgtctctccacggcaatgacatctccaccctccaagagggcatctttgcagacgtgacctccctgtctcacctggccattggtgccaaccccctatactgtgactgccacctccgctggctgtccagctgggtgaagactggctacaaggaaccgggcattgctcgttgtgctgggccccaggacatggagggcaagctgctcctcaccacgcctgccaagaagtttgaatgccaaggtcctccaacgctggctgtccaggccaagtgtgatctctgcttgtccagtccgtgccagaaccagggcacctgccacaacgacccccttgaggtgtacaggtgcgcctgccccagcggctataagggtcgagactgtgaggtgtccctggacagctgttccagtggcccctgtgaaaatgggggcacctgccatgcacaggagggcgaggatgccccgttcacgtgctcctgtcccaccggctttgaaggaccaacctgtggggtgaacacagatgactgtgtggatcatgcctgtgccaatgggggcgtctgtgtggatggtgtgggcaactacacctgccagtgccccctgcagtatgagggaaaggcctgtgagcagctggtggacttgtgctctccggatctgaacccatgtcaacacgaggcccagtgtgtgggcaccccggatgggcccaggtgtgagtgcatgccaggttatgcaggtgacaactgcagtgagaaccaggatgactgcagggaccaccgctgccagaatggggcccagtgtatggatgaagtcaacagctactcctgcctctgtgctgagggctacagtggacagctctgtgagatccctccccatctgcctgcccccaagagcccctgtgaggggactgagtgccagaatggggccaactgtgtggaccagggcaacaggcctgtgtgccagtgcctcccaggcttcggtggccctgagtgtgagaagttgctcagtgtcaactttgtggatcgggacacttacctgcagttcactgacctgcaaaactggccacgggccaacatcacgttgcaggtctccacggcagaggacaatgggatccttctgtacaacggggacaacgaccacattgcagttgagctgtaccagggccatgtgcgtgtcagctacgacccaggcagctaccccagctctgccatctacagtgctgagacgatcaacgatgggcaattccacaccgttgagctggttgcctttgaccagatggtgaatctctccattgatggcgggagccccatgaccatggacaactttggcaaacattacacgctcaacagcgaggcgccactctatgtgggagggatgcccgtggatgtcaactcagctgccttccgcctgtggcagatcctcaacggcaccggcttccacggttgcatccgaaacctgtacatcaacaacgagctgcaggacttcaccaagacgcagatgaagccaggcgtggtgccaggctgcgaaccctgccgcaagctctactgcctgcatggcatctgccagcccaatgccaccccagggcccatgtgccactgcgaggctggctgggtgggcctgcactgtgaccagcccgctgacggcccctgccatggccacaagtgtgtccatgggcaatgcgtgcccctcgacgctctttcctacagctgccagtgccaggatgggtactcgggggcactgtgcaaccaggccggggccctggcagagccctgcagaggcctgcagtgcctgcatggccactgccaggcctcaggcaccaagggggcacactgtgtgtgtgaccccggcttttcgggcgagctgtgtgagcaagagtccgagtgccggggggaccctgtccgggactttcaccaggtccagaggggctatgccatctgccagaccacgcgccccctgtcatgggtggagtgccggggctcgtgcccaggccagggctgctgccagggccttcggctgaagcggaggaagttcacctttgagtgcagcgatgggacctcttttgccgaggaggtggaaaagcccaccaagtgtggctgtgccctctgcgcatagcgctgggcgtggacaggccggtgagggcgggcaaggggccccagccgctgcagcagcggagacagtcgccagcagctgggctggggtgcaggtcatcacaggacggctcctgggcagctgggccctcctgggtggggtggtgccagagcagccttttaaaagcaaattgcgccatagctgggggcagcgggggtgggcgaggcctgagctgcgggctgccctctccggaagtgccttgcacaaataggcgcttaataaatatttgttgagtgaatgtgtgcgtgaggtcaggccaagaagtgcagaacgatgacacccctccttacctgctatctgaatctggagaagaaaaatgacagccttccaaaccaacccttccctttggcctgtggcccaggctggcttggaactgggtctgtggccccagaagcctcttacccctctgcgggcaaccatgaagtactgtcagcctccccgggaagccagcctggttcattctgctgctacagaatctgctggtggtaggccaggctctggagcgggggtgccgcctcctgctggccagggagggtcggacccttgccccctgggctgactggcagctctgcagccacggcttgggaacgaggctgtgggtggaggtggttcttaggaccaggcctctgaatcctaaagttctagcatgactactgtagctgcgagggcttatgtggaggaaacagtcacaggggctgctcagggtggcagaccccactaaagagggcagagggttctttgctctagataaacaaacatcatctgcctccagacactggccacagtaggagtattggtcctgggcttccccagccaccagtcagccacaagctgtcggtgacctattggtagagggactgggtgtgagggtctgggccagggtgcttgacctgggagcagctggttcagagtccttcacaccgcaggccagtagggagcagtggaagggacagtgctccaggcattgggaagtccctgctggctctatcactcggggcaaacttctccccacctgggccttgggttcttcagctataaaatggccagaggtggggggcgggatgactaaaggaacagtgcagactcccccactgtggtcttgggaggccagaggagttagaagacctatctatctatctatctatctacattgatcacatcaaaagtatttatgtgcctaacccggggctggggattgtggacgttctggcctaatggacagatgtgaactcatcccagagcatcgcaggaatgaccaggatgcccgggaagagttgagctgagtgggggctccagccacagacagcggcccaggccagggagttgctggcaacgaaggagccagtggtggaagaagaagaggccctgaatatacgattgcctgcccacgttgtcttctcttccatacacagtgaaaatgtagaaagatggtttgtgaggccaaactgtgaatgggctaaagggaggcaaagttgcactctccttccccagagggctcaccaagagggcacacccccgggggttctggtgggcaacgggggtgagcatgtccctgccctggctccctccatctgtgaccaggaggcatggctgggtgtatgttcaggtgaggctcagagtggcattgtgtccctgtcccctgcccagggcagtgaggggagcccttgatgctgattagaaggctagaactggggtagaggtgcctggcatgtctcatgccatggggactcaatctagcaactgtgagtcctggggtccctgtgatgggaagagggcagtgccctgcccaatgtggcaggtgtcctcatggcaggatctgcccctcaccagggggctgggatctacttgcttggagctctgagcaaggccacaatgcccgcccccacccccaagtagactgcagcctgggcctcatggggcttctcccaggcccacatggcatccctctctgagtttccaggccaccgtgggaccctgcagagcatctgcaccgggctggatagggcagaaaagctcaagggcagctagcttgcctcttccctggaagaaaggtgctctgggactcaccaaccctgagaaagatagctttcctggccaccaccattccccaccaccctggagaagccaattcccaggcttgaagggcactggctggcaggaggcctcttcattctgcaggaggtggaaaggacacctgtagacaggtgatgctcacccctcacctggcgccatggggctgggaggtgagcggctggcatgtttgttcctagggagcaccatgtgagcttaaggctcccctgaccggccccaccacatggcccagcctcctagcacagcagcgctgacctcagtgcagtctgaggattggaatccaccatgagatgatgtgagagctgtgtgccccaggatcaactttttctccaacttggccatcagccagcgagttgctaaggacctgagtcagcactcacgttgcctattcacactccgcttgaaagtccggaaggtggctactgcaaaatcacccctctgagaagtcctctctccacatcttgtccccctttgtgaagacccctagttcgctctgcattttaggcatgaagagatacagcagggtgcgtccggagggagctgtggccttgcaacaccactggcaacagggccggggctcccggtgaaggtgtcaggaagtggaaaaggctggactttgtctcctctttgcctgctggtagcctaaccgcaaaagtatctctttatacagaatacttacagattctaatatatatttgtatttcattttgttacagtatttttatatgttaaagtcaacatccagcgtcttgttttgcctttcagatgctatgtggtcgtggcacgttttgttgggggtttctgtagtcgtcttgtttggatcaactcctagaggctggtttagaacaggcccatgagggagctgcacctgccctggaagtattgttttagactatgtcgatattgtctgttgtcttccatgtgaacatgacattgagtcactctgc

SEQ ID NO: 26242 - DNA, 4210 bp, Homo sapiens
  source 1..4210: mol_type = unassigned DNA
atcaatatgacaacatgattttgtctttatatcagtaagcagcttctactatgttttcctattttctgctagctacagtttacaaaggatgtcacagcactggcatattctcaagatgcctacctgaaaggcaacgaagcttatagcggcaatgcccgcaatatacctgaacctccaccaatctgctatccctggctgccatctgccccatcagccatggcacagccagttgaaatatctcctcctgactcatcattgagcaaacagcaaaccagtacaccagtactgacacaacctggtagggcctatagaatggaaatacaagtgcctccatcaccaacagatgttgcaaaatcaaacacagcagtgtgtgtttgcaatgaaagtgtaaggactgtcattgtgccttctgagaaggttgtagatttgttatccaatagaaacaaccatacaggtccttcacatagaactgaagaagtgaggtatggcgtgagtgagcagacctctttaaaaacagtgtcaagaaccacatcaccaccattatcaattcccaccactcatctaattcatcagcctgcaggctccagatcactggaaccttctggaattttacttaagtctggaaattacagtggacattctgatggaatctcaagcagcagatctcaagctgtggaggctccctctgtatctgttaatcactattcgccaaattcccatcagcacatagactggaaaaactataaaacttacaaagagtatattgataacagacgattgcacataggttgtcggacaatacaagaaagattagatagtttaagagcagcatctcaaagcacgacagattataaccaggtcgtccccaaccgcactactttgcagggacgacgtcgaagcacctctcatgatcgagtgccccagtctgtccagatacggcaacgcagtgtgtcccaagaaagactggaagattctgtgctaatgaagtattgtccaagaagtgcatctcaaggagcactgacgtctccatctgttagttttagtaatcatagaactcgttcatgggattatattgagggacaggatgaaaccttagaaaatgtcaattctggaactccaatacctgattccaatggagagaaaaaacagacttacaagtggagtgggtttactgaacaggatgatagacgaggtatttgtgaaagacctaggcagcaagaaattcataaatcttttcgaggttccaattttactgtggctccaagcgttgttaattctgataacaggcgaatgagtggtagaggagtgggatctgtgtcgcagtttaaaaaaattccaccagatctaaaaacattgcagtcaaacagaaattttcagactacttgtggaatgtcactgcctcggggtatttcacaagacaggtcacctcttgtgaaagtccgaagtaattctctgaaagctccttccacgcatgtcacaaaaccatcatttagccagaaatcatttgtttctatcaaagaccaaagaccagtaaatcacttgcatcagaacagtctgttgaatcagcagacatgggtaaggactgacagtgcccccgatcagcaagtggagactgggaaatccccctctttatctggagcctctgccaagcctgcccctcagtcgagtgaaaacgctggtacttcagatttagaactacctgtcagtcaaaggaatcaagatttaagtttacaagaggctgaaactgagcaatcagatactttagataataaagaagctgtcatcctaagggaaaaacctccatctggacgccagacaccgcagcctttaaggcatcagtcttacatcttggcagtaaatgaccaggagaccgggtcagacactacctgctggctgcccaatgatgcacgtcgagaggtccacataaaaagaatggaggaaagaaaagcctcgagtaccagtccgcctggcgattctttggcttccatcccatttatagatgaaccaactagccctagcattgatcatgatattgcacatatccctgcctctgctgttatatcagcctctacctctcaggtcccctccatagcaacagttcctccttgcctcacaacttcagctccattaattcgccgtcagctctcacatgaccacgaatctgttggccctcctagcctggatgctcagcccaactcaaagacagaaagatcaaaatcatatgatgagggtctggatgattacagagaagatgcaaaattgtcctttaagcacgtatctagtctgaagggaatcaagatcgcagacagccaaaagtcatcagaagactctgggtccagaaaagattcttcctcagaggtcttcagtgatgctgccaaggaagggtggcttcatttccgaccccttgtcaccgataagggcaagcgagttggtggaagtattcggccatggaaacagatgtatgttgtccttcggggtcattcactttacctgtacaaagataaaagagagcagacgactccgtctgaggaagagcagcccatcagtgttaatgcttgcttgatagacatctcttacagtgagaccaagaggaaaaatgtgtttcgactcaccacgtccgactgtgaatgcctgtttcaggctgaagacagagatgatatgctagcttggatcaagacgatccaggagagcagcaacctaaacgaagaggacactggagtcactaacagggatctaattagtcgaagaataaaagaatacaacaatctgatgagcaaagcagaacagttgccaaaaacacctcgccagagtctcagcatcaggcaaactttgcttggtgctaaatcagagccaaagactcaaagcccacactctccgaaggaagagtcggaaaggaaacttctcagtaaagatgataccagtcccccaaaagacaaaggcacatggagaaaaggcattccaagtatcatgagaaagacatttgagaaaaagccaactgctacaggaactttcggcgtccgactagatgactgcccaccagctcatactaatcggtatattccattaatagttgacatatgttgcaaattagttgaagaaagaggtcttgaatatacaggtatttatagagttcctggaaataatgcagccatctcaagtatgcaagaagaactcaacaagggaatggctgatattgatatacaagatgataaatggcgagatttgaatgtgataagcagtttactaaaatccttcttcagaaaactccctgagcctctcttcacaaatgataaatatgctgattttattgaagccaatcgtaaagaagatcctctagatcgtctgaaaacattaaaaagactaattcacgatttgcctgaacatcattatgaaacacttaagttcctttcagctcatctgaagacagtggcagaaaattcagaaaaaaataagatggaaccaagaaacctagcaatagtgtttggtcccacccttgttcgaacatcagaagacaacatgacccacatggtcacccacatgcctgaccagtacaagattgtagaaacgctcatccagcaccatgactggtttttcacagaagaaggtgctgaagagcctcttacaacagtgcaggaggaaagcacagtagactcccagccagtgccaaacatagatcatttactcaccaacattggaaggacaggagtctccccaggagatgtatcaggcgaagtgggaggagtctatcacacggtaatgtcactagtggattctgtgatgtccctgatggacagctggaactgtaggaagaaggaggactgttgtccacactgtagctgccttgtctgcagaaatccccgattcttgtaaatgcaaacatagttgatctgtggtgtaaagtttctcataagattattgtaaacagatcaatactactttcttaaaagtttttctgctgtttcttgttatttctgaagcagaccctgaggagaaatagcatgattcagctactagtgactcaacaaaatctaagggttcttggggatctggaaaggatcagtatagcagggaactgcttgtgtcctccatctttgcagctgctagtcgcaagaggaagaagccgaaagaaaaagcacagcctagcagctcagaagatgaactggacaatgtattttttaagaaagaaaatgtggaacagtgtcacaatgat

SEQ ID NO: 26243 - DNA, 3526 bp, Homo sapiens
  source 1..3526: mol_type = unassigned DNA
ttgtcccttctttgtcatttgaaatgaaatgatggccacgcgtcggactggtctgtctgagggagatggtgacaagctcaaggcctgcgaggtctcaaaaaataaagatggaaaagaacaaagtgaaactgtatcactgtctgaagatgaaacattctcctggccaggtcccaaaacagttacgttgaaaagaacatctcaaggctttggttttacattaagacattttattgtttatcccccagagtctgcaattcaattttcatataaggatgaagaaaatggaaacagaggaggaaaacaaagaaaccgcttggaaccaatggataccatatttgttaagcaagttaaagaaggaggacctgcttttgaagctggattatgtacaggtgaccgaattataaaagtcaatggagaaagtgttattggcaaaacctattcccaagtaattgctttaattcaaaacagtgatacaacattggaacttagtgttatgccaaaagatgaagacattctccaagtggcatattctcaagatgcctacctgaaaggcaacgaagcttatagcggcaatgcccgcaatatacctgaacctccaccaatctgctatccctggctgccatctgccccatcagccatggcacagccagttgaaatatctcctcctgactcatcattgagcaaacagcaaaccagtacaccagtactgacacaacctggtagggcctatagaatggaaatacaagtgcctccatcaccaacagatgttgcaaaatcaaacacagcagtgtgtgtttgcaatgaaagtgtaaggactgtcattgtgccttctgagaaggttgtagatttgttatccaatagaaacaaccatacaggtccttcacatagaactgaagaagtgaggtatggcgtgagtgagcagacctctttaaaaacagtgtcaagaaccacatcaccaccattatcaattcccaccactcatctaattcatcagcctgcaggctccagatcactggaaccttctggaattttacttaagtctggaaattacagtggacattctgatggaatctcaagcagcagatctcaagctgtggaggctccctctgtatctgttaatcactattcgccaaattcccatcagcacatagactggaaaaactataaaacttacaaagagtatattgataacagacgattgcacataggttgtcggacaatacaagaaagattagatagtttaagagcagcatctcaaagcacgacagattataaccaggtcgtccccaaccgcactactttgcagggacgacgtcgaagcacctctcatgatcgagtgccccagtctgtccagatacggcaacgcagtgtgtcccaagaaagactggaagattctgtgctaatgaagtattgtccaagaagtgcatctcaaggagcactgacgtctccatctgttagttttagtaatcatagaactcgttcatgggattatattgagggacaggatgaaaccttagaaaatgtcaattctggaactccaatacctgattccaatggagagaaaaaacagacttacaagtggagtgggtttactgaacaggatgatagacgaggtatttgtgaaagacctaggcagcaagaaattcataaatcttttcgaggttccaattttactgtggctccaagcgttgttaattctgataacaggcgaatgagtggtagaggagtgggatctgtgtcgcagtttaaaaaaattccaccagatctaaaaacattgcagtcaaacagaaattttcagactacttgtggaatgtcactgcctcggggtatttcacaagacaggtcacctcttgtgaaagtccgaagtaattctctgaaagctccttccacgcatgtcacaaaaccatcatttagccagaaatcatttgtttctatcaaagaccaaagaccagtaaatcacttgcatcagaacagtctgttgaatcagcagacatgggtaaggactgacagtgcccccgatcagcaagtggagactgggaaatccccctctttatctggagcctctgccaagcctgcccctcagtcgagtgaaaacgctggtacttcagatttagaactacctgtcagtcaaaggaatcaagatttaagtttacaagaggctgaaactgagcaatcagatactttagataataaagaagctgtcatcctaagggaaaaacctccatctggacgccagacaccgcagcctttaaggcatcagtcttacatcttggcagtaaatgaccaggagaccgggtcagacactacctgctggctgcccaatgatgcacgtcgagaggtccacataaaaagaatggaggaaagaaaagcctcgagtaccagtccgcctggcgattctttggcttccatcccatttatagatgaaccaactagccctagcattgatcatgatattgcacatatccctgcctctgctgttatatcagcctctacctctcaggtcccctccatagcaacagttcctccttgcctcacaacttcagctccattaattcgccgtcagctctcacatgaccacgaatctgttggccctcctagcctggatgctcagcccaactcaaagacagaaagatcaaaatcatatgatgagggtctggatgattacagagaagatgcaaaattgtcctttaagcacgtatctagtctgaagggaatcaagatcgcagacagccaaaagtcatcagaagactctgggtccagaaaagattcttcctcagaggtcttcagtgatgctgccaaggaagggtggcttcatttccgaccccttgtcaccgataagggcaagcgagttggtggaagtattcggccatggaaacagatgtatgttgtccttcggggtcattcactttacctgtacaaagataaaagagagcagacgactccgtctgaggaagagcagcccatcagtgttaatgcttgcttgatagacatctcttacagtgagaccaagaggaaaaatgtgtttcgactcaccacgtccgactgtgaatgcctgtttcaggctgaagacagagatgatatgctagcttggatcaagacgatccaggagagcagcaacctaaacgaagaggacactggagtcactaacagggatctaattagtcgaagaataaaagaatacaacaatctgatgagcaaagcagaacagttgccaaaaacacctcgccagagtctcagcatcaggcaaactttgcttggtgctaaatcagagccaaagactcaaagcccacactctccgaaggaagagtcggaaaggaaacttctcagtaaagatgataccagtcccccaaaagacaaaggcacatggagaaaaggcattccaagtatcatgagaaagacatttgagaaaaagccaactgctacaggaactttcggcgtccgactagatgactgcccaccagctcatactaatcgggtaggagacaccagcccaccggatttcctcaagtcattaattcagttttga

SEQ ID NO: 26244 - DNA, 7167 bp, Homo sapiens
  source 1..7167: mol_type = unassigned DNA
gcgggatcgtccggctgcggggtccggctcacgccgggcgggcgggcggggcgcgctgtcccggagccggccagccccgtgcggatccactcgtcccgcttcctctggatctctctaggagctgacactcgaaccttcacgacccattcggatttttccaggactcaggagtggcactgggaagaaggggaccgctttctgcaattggcctcgacactggctgccaagaagacctgtcgcctttgtttttaagtctccagaaatggaagaagaaggcgaagtcagttgaagtcacgagaaatcagcgaggcatttgaaggcgcttcctgaaaacctttattccctggcacgttgtctgtttcaacagccctgcccctcctcggagcctgcttgtggaattcttccccttcgggtgtgtggtggcattccccgccacgtccaatgtggactccaaaggatttgtcccttctttgtcatttgaaatgaaatgatggccacgcgtcggactggtctgtctgagggagatggtgacaagctcaaggcctgcgaggtctcaaaaaataaagatggaaaagaacaaagtgaaactgtatcactgtctgaagatgaaacattctcctggccaggtcccaaaacagttacgttgaaaagaacatctcaaggctttggttttacattaagacattttattgtttatcccccagagtctgcaattcaattttcatataaggatgaagaaaatggaaacagaggaggaaaacaaagaaaccgcttggaaccaatggataccatatttgttaagcaagttaaagaaggaggacctgcttttgaagctggattatgtacaggtgaccgaattataaaagtcaatggagaaagtgttattggcaaaacctattcccaagtaattgctttaattcaaaacagtgatacaacattggaacttagtgttatgccaaaagatgaagacattctccaagtgctacagtttacaaaggatgtcacagcactggcatattctcaagatgcctacctgaaaggcaacgaagcttatagcggcaatgcccgcaatatacctgaacctccaccaatctgctatccctggctgccatctgccccatcagccatggcacagccagttgaaatatctcctcctgactcatcattgagcaaacagcaaaccagtacaccagtactgacacaacctggtagggcctatagaatggaaatacaagtgcctccatcaccaacagatgttgcaaaatcaaacacagcagtgtgtgtttgcaatgaaagtgtaaggactgtcattgtgccttctgagaaggttgtagatttgttatccaatagaaacaaccatacaggtccttcacatagaactgaagaagtgaggtatggcgtgagtgagcagacctctttaaaaacagtgtcaagaaccacatcaccaccattatcaattcccaccactcatctaattcatcagcctgcaggctccagatcactggaaccttctggaattttacttaagtctggaaattacagtggacattctgatggaatctcaagcagcagatctcaagctgtggaggctccctctgtatctgttaatcactattcgccaaattcccatcagcacatagactggaaaaactataaaacttacaaagagtatattgataacagacgattgcacataggttgtcggacaatacaagaaagattagatagtttaagagcagcatctcaaagcacgacagattataaccaggtcgtccccaaccgcactactttgcagggacgacgtcgaagcacctctcatgatcgagtgccccagtctgtccagatacggcaacgcagtgtgtcccaagaaagactggaagattctgtgctaatgaagtattgtccaagaagtgcatctcaaggagcactgacgtctccatctgttagttttagtaatcatagaactcgttcatgggattatattgagggacaggatgaaaccttagaaaatgtcaattctggaactccaatacctgattccaatggagagaaaaaacagacttacaagtggagtgggtttactgaacaggatgatagacgaggtatttgtgaaagacctaggcagcaagaaattcataaatcttttcgaggttccaattttactgtggctccaagcgttgttaattctgataacaggcgaatgagtggtagaggagtgggatctgtgtcgcagtttaaaaaaattccaccagatctaaaaacattgcagtcaaacagaaattttcagactacttgtggaatgtcactgcctcggggtatttcacaagacaggtcacctcttgtgaaagtccgaagtaattctctgaaagctccttccacgcatgtcacaaaaccatcatttagccagaaatcatttgtttctatcaaagaccaaagaccagtaaatcacttgcatcagaacagtctgttgaatcagcagacatgggtaaggactgacagtgcccccgatcagcaagtggagactgggaaatccccctctttatctggagcctctgccaagcctgcccctcagtcgagtgaaaacgctggtacttcagatttagaactacctgtcagtcaaaggaatcaagatttaagtttacaagaggctgaaactgagcaatcagatactttagataataaagaagctgtcatcctaagggaaaaacctccatctggacgccagacaccgcagcctttaaggcatcagtcttacatcttggcagtaaatgaccaggagaccgggtcagacactacctgctggctgcccaatgatgcacgtcgagaggtccacataaaaagaatggaggaaagaaaagcctcgagtaccagtccgcctggcgattctttggcttccatcccatttatagatgaaccaactagccctagcattgatcatgatattgcacatatccctgcctctgctgttatatcagcctctacctctcaggtcccctccatagcaacagttcctccttgcctcacaacttcagctccattaattcgccgtcagctctcacatgaccacgaatctgttggccctcctagcctggatgctcagcccaactcaaagacagaaagatcaaaatcatatgatgagggtctggatgattacagagaagatgcaaaattgtcctttaagcacgtatctagtctgaagggaatcaagatcgcagacagccaaaagtcatcagaagactctgggtccagaaaagattcttcctcagaggtcttcagtgatgctgccaaggaagggtggcttcatttccgaccccttgtcaccgataagggcaagcgagttggtggaagtattcggccatggaaacagatgtatgttgtccttcggggtcattcactttacctgtacaaagataaaagagagcagacgactccgtctgaggaagagcagcccatcagtgttaatgcttgcttgatagacatctcttacagtgagaccaagaggaaaaatgtgtttcgactcaccacgtccgactgtgaatgcctgtttcaggctgaagacagagatgatatgctagcttggatcaagacgatccaggagagcagcaacctaaacgaagaggacactggagtcactaacagggatctaattagtcgaagaataaaagaatacaacaatctgatgagcaaagcagaacagttgccaaaaacacctcgccagagtctcagcatcaggcaaactttgcttggtgctaaatcagagccaaagactcaaagcccacactctccgaaggaagagtcggaaaggaaacttctcagtaaagatgataccagtcccccaaaagacaaaggcacatggagaaaaggcattccaagtatcatgagaaagacatttgagaaaaagccaactgctacaggaactttcggcgtccgactagatgactgcccaccagctcatactaatcggtatattccattaatagttgacatatgttgcaaattagttgaagaaagaggtcttgaatatacaggtatttatagagttcctggaaataatgcagccatctcaagtatgcaagaagaactcaacaagggaatggctgatattgatatacaagatgataaatggcgagatttgaatgtgataagcagtttactaaaatccttcttcagaaaactccctgagcctctcttcacaaatgataaatatgctgattttattgaagccaatcgtaaagaagatcctctagatcgtctgaaaacattaaaaagactaattcacgatttgcctgaacatcattatgaaacacttaagttcctttcagctcatctgaagacagtggcagaaaattcagaaaaaaataagatggaaccaagaaacctagcaatagtgtttggtcccacccttgttcgaacatcagaagacaacatgacccacatggtcacccacatgcctgaccagtacaagattgtagaaacgctcatccagcaccatgactggtttttcacagaagaaggtgctgaagagcctcttacaacagtgcaggaggaaagcacagtagactcccagccagtgccaaacatagatcatttactcaccaacattggaaggacaggagtctccccaggagatgtatcagattcagctactagtgactcaacaaaatctaagggttcttggggatctggaaaggatcagtatagcagggaactgcttgtgtcctccatctttgcagctgctagtcgcaagaggaagaagccgaaagaaaaagcacagcctagcagctcagaagatgaactggacaatgtattttttaagaaagaaaatgtggaacagtgtcacaatgatactaaagaggagtccaaaaaagaaagtgagacactgggcagaaaacagaagatcatcattgccaaagaaaacagcactaggaaagaccccagcacgacaaaagatgaaaagatatcactaggaaaagagagcacgccttctgaagaaccctcaccaccacacaactcaaaacacaacaagtcaccaactctcagctgtcgctttgccatcctgaaagagagccccaggtcacttctggcacagaagtcctcccaccttgaagagacaggctctgactctggcactttgctcagcacgtcttcccaggcctccctggcaaggttttccatgaagaaatcaaccagtccagaaacgaaacatagcgagtttttggccaacgtcagcaccatcacctcagattattccaccacatcgtctgctacatacttgactagcctggactccagtcgactgagccctgaggtgcaatccgtggcagagagcaagggggacgaggcagatgacgagagaagcgaactcatcagtgaagggcggcctgtggaaaccgacagcgagagcgagtttcccgtgttccccacagccttgacttcagagaggcttttccgaggaaaactgcaagaagtgactaagagcagccggagaaattctgaaggaagtgaattaagttgcaccgagggaagtttaacatcaagtttagatagccggagacagctcttcagttcccataaactcatcgaatgtgatactctttccaggaaaaaatcagctagattcaagtcagatagtggaagtctaggagatgccaagaatgagaaagaagcaccttcgttaactaaagtgtttgatgttatgaaaaaaggaaagtcaactgggagtttactgacacccaccagaggcgaatccgaaaaacaggaacccacatggaaaacgaaaatagcagatcggttaaaactgagacccagagcccctgcggatgacatgtttggagtagggaatcacaaagtgaatgccgagactgctaaaaggaaaagcatccggcgcagacatacactaggagggcacagagatgctaccgaaatcagcgttttgaatttttggaaagtgcatgagcagagcggggagagagaatctgaactttcagctgtaaaccggttaaaaccaaaatgctcagcccaggacctttccatctcagactggctggccagggaacgcctacgcaccagtacctctgaccttagcagaggagaaatcggagatccccagacagagaacccaagcacacgagaaatagccacgaccgacacacctttgtctcttcattgcaacacaggcagttcttccagcaccttggcttcaacaaacaggccccttctttccataccaccacagtcacctgaccaaataaacggagaaagcttccagaacgtgagcaaaaatgctagttctgcagcgaatgcccaacctcataaactgtctgaaaccccaggcagtaaagcagagtttcatccctgtctttaaactgggggtatgtccactctagcaagtaaaaaaactactgttacacgttccagtaactctgtcaatattttcttgtatcagaattgttattatgcagccttcatttgggctggtttcatcattttgcactgtgaaatagctttacagtgcattactacagccagaagaacatatatatatatatatatatttaaaaatatatcggatagttgtatacaaatgagcaaggtatttgttgcaacttactacatagcatatacccaaaatcactgaagaaaatcgctggcatcagtgtgcagcaaatttgttcttttggtttcatcactaacaaaagtgcctcatcataaaaatacagttggtttttagggtgccatattgttaaaattagataacttacttacattgaataaacgaatgcgttttattggtaacagatatcattacatttaccagttttaacacaggtggatacagaacttccattctttagtcattccaggtggatctgagttttatattcaaacttttaatacagtttttgagttttgtgtgacttgaatttttaatctttctgtaaaatacgtaacttaaatgaacatattaaatgtgtatcttttcttcagataccagatttgatataatgttgtaacataggtgtgtagatagtggatcctggatggaactggcttctttatcgagaagaatataattctgcatgaggacttaatgaatccaaacctgtgtcatgcctgtgtgcatacccaattaaacactggaaataaaaattgttttggtgaattttg

SEQ ID NO: 26245 - DNA, 590 bp, Homo sapiens
  source 1..590: mol_type = unassigned DNA
aaataatgcagccatctcaagtatgcaagaagaactcaacaagggaatggctgatattgatatacaagatgataaatggcgagatttgaatgtgataagcagtttactaaaatccttcttcagaaaactccctgagcctctcttcacaaatgataaatatgctgattttattgaagccaatcgtaaagaagatcctctagatcgtctgaaaacattaaaaagactaattcacgatttgcctgaacatcattatgaaacacttaagttcctttcagctcatctgaagacagtggcagaaaattcagaaaaaaataagatggaaccaagaaacctagcaatagtgtttggtcccacccttgttcgaacatcagaagacaacatgacccacatggtcacccacatgcctgaccagtacaagattgtagaaacgctcatccagcaccatgactggtttttcacagaagaaggtgctgaagagcctcttattcagctactagtgactcaacaaaatctaagggttcttggggatctggaaaggatcagtatagcagggaactgcttgtgtcctccatctttgcagctgctagtcg

SEQ ID NO: 26246 - DNA, 340 bp, Homo sapiens
  source 1..340: mol_type = unassigned DNA
tatattccattaatagttgacatatgttgcaaattagttgaagaaagaggtcttgaatatacaggtatttatagagttcctggaaataatgcagccatctcaagtatgcaagaagaactcaacaagggaatggctgatattgatatacaagatgataaatggcgagatttgaatgtgataagcagtttactaaaatccttcttcagaaaactccctgagcctctcttcacaaatgataaatatgctgattttattgaagccaatcgtaaagaagatcctctagatcgtctgaaaacattaaaaagactattcctttcagctcatctgaagacagtggcag

SEQ ID NO: 26247 - DNA, 3829 bp, Homo sapiens
  source 1..3829: mol_type = unassigned DNA
cccggccgggcccggcgcccggccagcgtctccgcttcagctcgccgccgcgcttcggccgccgggcccgagcgggcgggaagggatctctctaggagctgacactcgaaccttcacgacccattcggatttttccaggactcaggagtggcactgggaagaaggggaccgctttctgcaattggcctcgacactggctgccaagaagacctgtcgcctttgtttttaagtctccagaaatggaagaagaaggcgaagtcagttgaagtcacgagaaatcagcgaggcatttgaaggcgcttcctgaaaacctttattccctggcacgttgtctgtttcaacagccctgcccctcctcggagcctgcttgtggaattcttccccttcgggtgtgtggtggcattccccgccacgtccaatgtggactccaaaggatttgtcccttctttgtcatttgaaatgaaatgatggccacgcgtcggactggtctgtctgagggagatggtgacaagctcaaggcctgcgaggtctcaaaaaataaagatggaaaagaacaaagtgaaactgtatcactgtctgaagatgaaacattctcctggccaggtcccaaaacagttacgttgaaaagaacatctcaaggctttggttttacattaagacattttattgtttatcccccagagtctgcaattcaattttcatataaggatgaagaaaatggaaacagaggaggaaaacaaagaaaccgcttggaaccaatggataccatatttgttaagcaagttaaagaaggaggacctgcttttgaagctggattatgtacaggtgaccgaattataaaagtcaatggagaaagtgttattggcaaaacctattcccaagtaattgctttaattcaaaacagtgatacaacattggaacttagtgttatgccaaaagatgaagacattctccaagtggcatattctcaagatgcctacctgaaaggcaacgaagcttatagcggcaatgcccgcaatatacctgaacctccaccaatctgctatccctggctgccatctgccccatcagccatggcacagccagttgaaatatctcctcctgactcatcattgagcaaacagcaaaccagtacaccagtactgacacaacctggtagggcctatagaatggaaatacaagtgcctccatcaccaacagatgttgcaaaatcaaacacagcagtgtgtgtttgcaatgaaagtgtaaggactgtcattgtgccttctgagaaggttgtagatttgttatccaatagaaacaaccatacaggtccttcacatagaactgaagaagtgaggtatggcgtgagtgagcagacctctttaaaaacagtgtcaagaaccacatcaccaccattatcaattcccaccactcatctaattcatcagcctgcaggctccagatcactggaaccttctggaattttacttaagtctggaaattacagtggacattctgatggaatctcaagcagcagatctcaagctgtggaggctccctctgtatctgttaatcactattcgccaaattcccatcagcacatagactggaaaaactataaaacttacaaagagtatattgataacagacgattgcacataggttgtcggacaatacaagaaagattagatagtttaagagcagcatctcaaagcacgacagattataaccaggtcgtccccaaccgcactactttgcagggacgacgtcgaagcacctctcatgatcgagtgccccagtctgtccagatacggcaacgcagtgtgtcccaagaaagactggaagattctgtgctaatgaagtattgtccaagaagtgcatctcaaggagcactgacgtctccatctgttagttttagtaatcatagaactcgttcatgggattatattgagggacaggatgaaaccttagaaaatgtcaattctggaactccaatacctgattccaatggagagaaaaaacagacttacaagtggagtgggtttactgaacaggatgatagacgaggtatttgtgaaagacctaggcagcaagaaattcataaatcttttcgaggttccaattttactgtggctccaagcgttgttaattctgataacaggcgaatgagtggtagaggagtgggatctgtgtcgcagtttaaaaaaattccaccagatctaaaaacattgcagtcaaacagaaattttcagactacttgtggaatgtcactgcctcggggtatttcacaagacaggtcacctcttgtgaaagtccgaagtaattctctgaaagctccttccacgcatgtcacaaaaccatcatttagccagaaatcatttgtttctatcaaagaccaaagaccagtaaatcacttgcatcagaacagtctgttgaatcagcagacatgggtaaggactgacagtgcccccgatcagcaagtggagactgggaaatccccctctttatctggagcctctgccaagcctgcccctcagtcgagtgaaaacgctggtacttcagatttagaactacctgtcagtcaaaggaatcaagatttaagtttacaagaggctgaaactgagcaatcagatactttagataataaagaagctgtcatcctaagggaaaaacctccatctggacgccagacaccgcagcctttaaggcatcagtcttacatcttggcagtaaatgaccaggagaccgggtcagacactacctgctggctgcccaatgatgcacgtcgagaggtccacataaaaagaatggaggaaagaaaagcctcgagtaccagtccgcctggcgattctttggcttccatcccatttatagatgaaccaactagccctagcattgatcatgatattgcacatatccctgcctctgctgttatatcagcctctacctctcaggtcccctccatagcaacagttcctccttgcctcacaacttcagctccattaattcgccgtcagctctcacatgaccacgaatctgttggccctcctagcctggatgctcagcccaactcaaagacagaaagatcaaaatcatatgatgagggtctggatgattacagagaagatgcaaaattgtcctttaagcacgtatctagtctgaagggaatcaagatcgcagacagccaaaagtcatcagaagactctgggtccagaaaagattcttcctcagaggtcttcagtgatgctgccaaggaagggtggcttcatttccgaccccttgtcaccgataagggcaagcgagttggtggaagtattcggccatggaaacagatgtatgttgtccttcggggtcattcactttacctgtacaaagataaaagagagcagacgactccgtctgaggaagagcagcccatcagtgttaatgcttgcttgatagacatctcttacagtgagaccaagaggaaaaatgtgtttcgactcaccacgtccgactgtgaatgcctgtttcaggctgaagacagagatgatatgctagcttggatcaagacgatccaggagagcagcaacctaaacgaagaggacactggagtcactaacagggatctaattagtcgaagaataaaagaatacaacaatctgatgagcaaagcagaacagttgccaaaaacacctcgccagagtctcagcatcaggcaaactttgcttggtgctaaatcagagccaaagactcaaagcccacactctccgaaggaagagtcggaaaggaaacttctcagtaaagatgataccagtcccccaaaagacaaaggcacatggagaaaaggcattccaagtatcatgag

SEQ ID NO: 26248 - DNA, 3859 bp, Homo sapiens
  source 1..3859: mol_type = unassigned DNA
cccggccgggcccggcgcccggccagcgtctccgcttcagctcgccgccgcgcttcggccgccgggcccgagcgggcgggaagggatctctctaggagctgacactcgaaccttcacgacccattcggatttttccaggactcaggagtggcactgggaagaaggggaccgctttctgcaattggcctcgacactggctgccaagaagacctgtcgcctttgtttttaagtctccagaaatggaagaagaaggcgaagtcagttgaagtcacgagaaatcagcgaggcatttgaaggcgcttcctgaaaacctttattccctggcacgttgtctgtttcaacagccctgcccctcctcggagcctgcttgtggaattcttccccttcgggtgtgtggtggcattccccgccacgtccaatgtggactccaaaggatttgtcccttctttgtcatttgaaatgaaatgatggccacgcgtcggactggtctgtctgagggagatggtgacaagctcaaggcctgcgaggtctcaaaaaataaagatggaaaagaacaaagtgaaactgtatcactgtctgaagatgaaacattctcctggccaggtcccaaaacagttacgttgaaaagaacatctcaaggctttggttttacattaagacattttattgtttatcccccagagtctgcaattcaattttcatataaggatgaagaaaatggaaacagaggaggaaaacaaagaaaccgcttggaaccaatggataccatatttgttaagcaagttaaagaaggaggacctgcttttgaagctggattatgtacaggtgaccgaattataaaagtcaatggagaaagtgttattggcaaaacctattcccaagtaattgctttaattcaaaacagtgatacaacattggaacttagtgttatgccaaaagatgaagacattctccaagtgctacagtttacaaaggatgtcacagcactggcatattctcaagatgcctacctgaaaggcaacgaagcttatagcggcaatgcccgcaatatacctgaacctccaccaatctgctatccctggctgccatctgccccatcagccatggcacagccagttgaaatatctcctcctgactcatcattgagcaaacagcaaaccagtacaccagtactgacacaacctggtagggcctatagaatggaaatacaagtgcctccatcaccaacagatgttgcaaaatcaaacacagcagtgtgtgtttgcaatgaaagtgtaaggactgtcattgtgccttctgagaaggttgtagatttgttatccaatagaaacaaccatacaggtccttcacatagaactgaagaagtgaggtatggcgtgagtgagcagacctctttaaaaacagtgtcaagaaccacatcaccaccattatcaattcccaccactcatctaattcatcagcctgcaggctccagatcactggaaccttctggaattttacttaagtctggaaattacagtggacattctgatggaatctcaagcagcagatctcaagctgtggaggctccctctgtatctgttaatcactattcgccaaattcccatcagcacatagactggaaaaactataaaacttacaaagagtatattgataacagacgattgcacataggttgtcggacaatacaagaaagattagatagtttaagagcagcatctcaaagcacgacagattataaccaggtcgtccccaaccgcactactttgcagggacgacgtcgaagcacctctcatgatcgagtgccccagtctgtccagatacggcaacgcagtgtgtcccaagaaagactggaagattctgtgctaatgaagtattgtccaagaagtgcatctcaaggagcactgacgtctccatctgttagttttagtaatcatagaactcgttcatgggattatattgagggacaggatgaaaccttagaaaatgtcaattctggaactccaatacctgattccaatggagagaaaaaacagacttacaagtggagtgggtttactgaacaggatgatagacgaggtatttgtgaaagacctaggcagcaagaaattcataaatcttttcgaggttccaattttactgtggctccaagcgttgttaattctgataacaggcgaatgagtggtagaggagtgggatctgtgtcgcagtttaaaaaaattccaccagatctaaaaacattgcagtcaaacagaaattttcagactacttgtggaatgtcactgcctcggggtatttcacaagacaggtcacctcttgtgaaagtccgaagtaattctctgaaagctccttccacgcatgtcacaaaaccatcatttagccagaaatcatttgtttctatcaaagaccaaagaccagtaaatcacttgcatcagaacagtctgttgaatcagcagacatgggtaaggactgacagtgcccccgatcagcaagtggagactgggaaatccccctctttatctggagcctctgccaagcctgcccctcagtcgagtgaaaacgctggtacttcagatttagaactacctgtcagtcaaaggaatcaagatttaagtttacaagaggctgaaactgagcaatcagatactttagataataaagaagctgtcatcctaagggaaaaacctccatctggacgccagacaccgcagcctttaaggcatcagtcttacatcttggcagtaaatgaccaggagaccgggtcagacactacctgctggctgcccaatgatgcacgtcgagaggtccacataaaaagaatggaggaaagaaaagcctcgagtaccagtccgcctggcgattctttggcttccatcccatttatagatgaaccaactagccctagcattgatcatgatattgcacatatccctgcctctgctgttatatcagcctctacctctcaggtcccctccatagcaacagttcctccttgcctcacaacttcagctccattaattcgccgtcagctctcacatgaccacgaatctgttggccctcctagcctggatgctcagcccaactcaaagacagaaagatcaaaatcatatgatgagggtctggatgattacagagaagatgcaaaattgtcctttaagcacgtatctagtctgaagggaatcaagatcgcagacagccaaaagtcatcagaagactctgggtccagaaaagattcttcctcagaggtcttcagtgatgctgccaaggaagggtggcttcatttccgaccccttgtcaccgataagggcaagcgagttggtggaagtattcggccatggaaacagatgtatgttgtccttcggggtcattcactttacctgtacaaagataaaagagagcagacgactccgtctgaggaagagcagcccatcagtgttaatgcttgcttgatagacatctcttacagtgagaccaagaggaaaaatgtgtttcgactcaccacgtccgactgtgaatgcctgtttcaggctgaagacagagatgatatgctagcttggatcaagacgatccaggagagcagcaacctaaacgaagaggacactggagtcactaacagggatctaattagtcgaagaataaaagaatacaacaatctgatgagcaaagcagaacagttgccaaaaacacctcgccagagtctcagcatcaggcaaactttgcttggtgctaaatcagagccaaagactcaaagcccacactctccgaaggaagagtcggaaaggaaacttctcagtaaagatgataccagtcccccaaaagacaaaggcacatggagaaaaggcattccaagtatcatgag

SEQ ID NO: 26249 - DNA, 4343 bp, Homo sapiens
  source 1..4343: mol_type = unassigned DNA
aattcttccccttcgggtgtgtggtggcattccccgccacgtccaatgtggactccaaaggatttgtcccttctttgtcatttgaaatgaaatgatggccacgcgtcggactggtctgtctgagggagatggtgacaagctcaaggcctgcgaggtctcaaaaaataaagatggaaaagaacaaagtgaaactgtatcactgtctgaagatgaaacattctcctggccaggtcccaaaacagttacgttgaaaagaacatctcaaggctttggttttacattaagacattttattgtttatcccccagagtctgcaattcaattttcatataaggatgaagaaaatggaaacagaggaggaaaacaaagaaaccgcttggaaccaatggataccatatttgttaagcaagttaaagaaggaggacctgcttttgaagctggattatgtacaggtgaccgaattataaaagtcaatggagaaagtgttattggcaaaacctattcccaagtaattgctttaattcaaaacagtgatacaacattggaacttagtgttatgccaaaagatgaagacattctccaagtggcatattctcaagatgcctacctgaaaggcaacgaagcttatagcggcaatgcccgcaatatacctgaacctccaccaatctgctatccctggctgccatctgccccatcagccatggcacagccagttgaaatatctcctcctgactcatcattgagcaaacagcaaaccagtacaccagtactgacacaacctggtagggcctatagaatggaaatacaagtgcctccatcaccaacagatgttgcaaaatcaaacacagcagtgtgtgtttgcaatgaaagtgtaaggactgtcattgtgccttctgagaaggttgtagatttgttatccaatagaaacaaccatacaggtccttcacatagaactgaagaagtgaggtatggcgtgagtgagcagacctctttaaaaacagtgtcaagaaccacatcaccaccattatcaattcccaccactcatctaattcatcagcctgcaggctccagatcactggaaccttctggaattttacttaagtctggaaattacagtggacattctgatggaatctcaagcagcagatctcaagctgtggaggctccctctgtatctgttaatcactattcgccaaattcccatcagcacatagactggaaaaactataaaacttacaaagagtatattgataacagacgattgcacataggttgtcggacaatacaagaaagattagatagtttaagagcagcatctcaaagcacgacagattataaccaggtcgtccccaaccgcactactttgcagggacgacgtcgaagcacctctcatgatcgagtgccccagtctgtccagatacggcaacgcagtgtgtcccaagaaagactggaagattctgtgctaatgaagtattgtccaagaagtgcatctcaaggagcactgacgtctccatctgttagttttagtaatcatagaactcgttcatgggattatattgagggacaggatgaaaccttagaaaatgtcaattctggaactccaatacctgattccaatggagagaaaaaacagacttacaagtggagtgggtttactgaacaggatgatagacgaggtatttgtgaaagacctaggcagcaagaaattcataaatcttttcgaggttccaattttactgtggctccaagcgttgttaattctgataacaggcgaatgagtggtagaggagtgggatctgtgtcgcactggagaaaaggcattccaagtatcatgagaaagacatttgagaaaaagccaactgctacaggaactttcggcgtccgactagatgactgcccaccagctcatactaatcggtatattccattaatagttgacatatgttgcaaattagttgaagaaagaggtcttgaatatacaggtatttatagagttcctggaaataatgcagccatctcaagtatgcaagaagaactcaacaagggaatggctgatattgatatacaagatgataaatggcgagatttgaatgtgataagcagtttactaaaatccttcttcagaaaactccctgagcctctcttcacaaatgataaatatgctgattttattgaagccaatcgtaaagaagatcctctagatcgtctgaaaacattaaaaagactaattcacgatttgcctgaacatcattatgaaacacttaagttcctttcagctcatctgaagacagtggcagaaaattcagaaaaaaataagatggaaccaagaaacctagcaatagtgtttggtcccacccttgttcgaacatcagaagacaacatgacccacatggtcacccacatgcctgaccagtacaagattgtagaaacgctcatccagcaccatgactggtttttcacagaagaaggtgctgaagagcctcttacaacagtgcaggaggaaagcacagtagactcccagccagtgccaaacatagatcatttactcaccaacattggaaggacaggagtctccccaggagatgtatcagattcagctactagtgactcaacaaaatctaagggttcttggggatctggaaaggatcagtatagcagggaactgcttgtgtcctccatctttgcagctgctagtcgcaagaggaagaagccgaaagaaaaagcacagcctagcagctcagaagatgaactggacaatgtattttttaagaaagaaaatgtggaacagtgtcacaatgatactaaagaggagtccaaaaaagaaagtgagacactgggcagaaaacagaagatcatcattgccaaagaaaacagcactaggaaagaccccagcacgacaaaagatgaaaagatatcactaggaaaagagagcacgccttctgaagaaccctcaccaccacacaactcaaaacacaacaagtcaccaactctcagctgtcgctttgccatcctgaaagagagccccaggtcacttctggcacagaagtcctcccaccttgaagagacaggctctgactctggcactttgctcagcacgtcttcccaggcctccctggcaaggttttccatgaagaaatcaaccagtccagaaacgaaacatagcgagtttttggccaacgtcagcaccatcacctcagattattccaccacatcgtctgctacatacttgactagcctggactccagtcgactgagccctgaggtgcaatccgtggcagagagcaagggggacgaggcagatgacgagagaagcgaactcatcagtgaagggcggcctgtggaaaccgacagcgagagcgagtttcccgtgttccccacagccttgacttcagagaggcttttccgaggaaaactgcaagaagtgactaagagcagccggagaaattctgaaggaagtgaattaagttgcaccgagggaagtttaacatcaagtttagatagccggagacagctcttcagttcccataaactcatcgaatgtgatactctttccaggaaaaaatcagctagattcaagtcagatagtggaagtctaggagatgccaagaatgagaaagaagcaccttcgttaactaaagtgtttgatgttatgaaaaaaggaaagtcaactgggagtttactgacacccaccagaggcgaatccgaaaaacaggaacccacatggaaaacgaaaatagcagatcggttaaaactgagacccagagcccctgcggatgacatgtttggagtagggaatcacaaagtgaatgccgagactgctaaaaggaaaagcatccggcgcagacatacactaggagggcacagagatgctaccgaaatcagcgttttgaatttttggaaagtgcatgagcagagcggggagagagaatctgaactttcagctgtaaaccggttaaaaccaaaatgctcagcccaggacctttccatctcagactggctggccagggaacgcctacgcaccagtacctctgaccttagcagaggagaaatcggagatccccagacagagaacccaagcacacgagaaatagccacgaccgacacacctttgtctcttcattgcaacacaggcagttcttccagcaccttggcttcaacaaacaggccccttctttccataccaccacagtcacctgaccaaataaacggagaaagcttccagaacgtgagcaaaaatgctagttctgcagcgaatgcccaacctcataaactgtctgaaaccccaggcagtaaagcagagtttcatccctgtctttaaactgggggtatgtccactctagcaa

SEQ ID NO: 26250 - DNA, 568 bp, Homo sapiens
  source 1..568: mol_type = unassigned DNA
ggccacgcgtcggactggtctgtctgagggagatggtgacaagctcaaggcctgcgaggtctcaaaaaataaagatggaaaagaacaaagtgaaactgtatcactgtctgaagatgaaacattctcctggccaggtcccaaaacagttacgttgaaaagaacatctcaaggctttggttttacattaagacattttattgtttatcccccagagtctgcaattcaattttcatataaggatgaagaaaatggaaacagaggaggaaaacaaagaaaccgcttggaaccaatggataccatatttgttaagcaagttaaagaaggaggacctgcttttgaagctggattatgtacaggtgaccgaattataaaagtcaatggagaaagtgttattggcaaaacctattcccaagtaattgctttaattcaaaacagtgatacaacattggaacttagtgttatgccaaaagatgaagacattctccaagtgaatctggaattctctacattttacaaaaataccattgccaagtttttgcaattaagtgacatggaaatgttatgttga

SEQ ID NO: 26251 - DNA, 5896 bp, Homo sapiens
  source 1..5896: mol_type = unassigned DNA
atgaatggagtcgccttctgcctggtcgggatcccgccccgcccggagccccggcccccacagctgccactgggcccaagagatgggtgctctcctaggcgccccttcccctggcaggggccgaggacgctgctgctgtacaaaagtccccaggacggctttggcttcactctgcgccacttcatcgtgtacccacccgagtcggccgtgcactgcagcctgaaggaggaagagaatggaggccgtggaggaggaccctccccccggtaccgcctggagcccatggacaccatctttgtcaagaatgtgaaggaagacggccctgcccatagggcggggcttcgcacaggagaccggctggtaaaggtgaatggggaaagcgtcattgggaagacctactctcaggtcatagctctgatccagaatagtgatgacactctggagctgtctatcatgcccaaggacgaggacatcctccagctggcctactcccaggatgcctacctgaaagggaacgagccgtattctggagaggcccgcagcatcccagagccaccgccgatctgctacccccgcaagacctacgcccctcctgcccgggcctccaccagggccactatggtgcctgagcccacctcagcactgcccagtgacccccggagtcctgctgcctggagtgacccggggctccgtgtgccacctgctgcccgtgcccacctggacaactcttccttggggatgagccagccccgccccagccctggtgccttcccccacctctcctcggagccccggacgccccgtgccttcccagagcctggcagccgggtgccccccagcagactggagtgccagcaggccttgtcacactggctgtcaaaccaggtaccccgccgggcgggggagagacggtgcccagccatggccccccgggcccgcagcgcctcccaggaccggttggaggaggtggctgccccccgcccgtggccctgctccacctcccaggatgctttgagccagctgggccaggagggctggcaccgagctcgctcagatgactacttgagccgggccacccgttctgccgaggcactggggccaggggcactggtgtcaccccgctttgagcggtgtggctgggcttcccagcgttcgtctgcccgcacccccgcctgcccaactcgggacctgccagggccccaggccccacccccgtctggcctgcagggcctggatgacctcgggtacatcggctaccggagctacagcccatcattccagcgccggaccggcctcctccatgcgctctccttccgggactcaccctttggggggctgcctaccttcaacctggcccagtcccctgcgtcattcccaccagaggcctccgagccacccagggttgtacggccggaacccagcacccgggccctggagcctcctgcggaggatcgcggcgatgaggtggtcctgaggcagaagcccccgacgggccgcaaggttcagctgacccccgcaagacagatgaaccttggatttggtgacgagtccccagagccagaggccagtgggcgaggggaacgcctgggcaggaaggtggcccctttggccaccaccgaagactctctggcttccatcccctttattgatgagcccaccagccccagcattgacctccaagccaagcacgtccctgcctctgctgtggtctccagtgccatgaactcagcccctgtcctgggcaccagcccatcttccccgaccttcactttcaccctcggacgccattactcgcaggactgcagcagcatcaaggctggccgccgctcctcctacctgctggccatcaccacggagcgctccaagtcctgcgatgatggactcaacaccttccgcgacgagggccgggttctgcggcgcctgccaaaccgcatacccagcctgcggatgctccggagcttcttcaccgacgggtccttggatagctggggcacctctgaagatgctgacgctccttctaagcgacactcaacctctgacctctcagatgcgaccttcagcgatatcaggagagaaggctggttgtattataagcagattctcaccaagaaggggaagaaagcgggcagcggcctgcgccagtggaagcgggtgtacgccgcgctgcgggcgcgctcgctctcgctgagcaaggagcggcgggagcccgggccggcggcggcgggggctgcggcggccggcgcaggtgaggacgaggcggcgcccgtctgcatcggctcctgcctcgtggacatctcctacagcgagaccaagaggaggcacgtgttccggctgaccaccgctgacttctgtgaatatctctttcaggctgaggaccgggatgacatgctgggctggatcagagcgatccgggagaacagcagggccgagggcgaggaccccggctgtgccaaccaagctctgatcagcaagaagcttaacgattatcgcaaagtgagccatagctctgggcccaaagctgattcctcccccaaaggctctcgcggcctggggggcctcaagtctgagttcctcaagcagagtgcggcacgtggcctcaggactcaggacctgcccgcagggagcaaggatgacagtgctgcagcccccaaaaccccctggggcatcaacatcatcaagaaaaataagaaggccgctccgagggcgtttggggtcaggctggaggagtgccagccagccacggagaaccagcgcgtccccttaatcgtggctgcatgctgtcgcattgtggaggcacgagggctggagtccacaggcatttaccgagtgcccggcaacaatgcagtggtgtccagcctacaggagcagctcaaccgcgggcctggtgacatcaacctgcaggatgagcgctggcaagacctcaatgtgatcagcagcctgctcaagtccttcttccgaaagctgcccgagcctcttttcactgatgacaaatacaacgacttcatcgaggccaaccgcattgaggacgcacgggagcgaatgaggacgctgcggaagctgatccgggatctcccaggacactactatgaaacgctcaaattccttgtgggccatctcaagaccatcgctgaccactctgagaaaaacaagatggaaccccggaacctggccctggtctttgggccgacactggtgaggacgtctgaggacaacatgacagacatggtgacccacatgcctgaccgctacaagatcgtggagacactgatccagcactcagactggttcttcagtgacgaagaggacaagggagagagaacccctgtgggcgacaaggagcctcaggcagtgcccaacattgagtacctcctgcccaacattggcaggacagtgccccctggcgacccggggtcagattctaccacctgtagttcagccaagtccaagggttcgtgggcccccaagaaggagccgtacgcccgggagatgctggcgatctccttcatctcggccgtcaaccgcaagcgcaagaagcggcgggaggcgcgggggctgggcagcagcaccgacgacgactcggagcaggaggcgcacaagcctggggcgggggccacagcgccggggactcaggagcggccgcaggggccgctgcctggcgccgtcgcccccgaggcccccggacgcctcagtcccccggcggcgccggaggagcggccggccgcggacacgcgctccattgtgtcgggctactccaccctgtccaccatggaccgcagcgtgtgctcgggcgctagcggtcggcgggcaggggcgggggatgaggcggacgacgagcgtagcgagctgagccacgtggagacggacactgagggcgcggcgggcgcggggcctggggggcgcctgacacgccggccgtccttcagctcgcaccacctcatgccctgcgacactctggcgcgccgccgcctggcccggggccgcccagacggcgagggcgcgggccggggcggtccccgcgccccggagccgcccggctcggcgtcgtccagcagccaggagtcgctgcggcccccggcggcggcgctggcctcccggccctcgcgcatggaggcgctgcgtctaaggctccgcggcacggcggacgacatgctcgccgtgcgcctgcggcggccgctgtcgcccgagacccggcggcgccggagcagctggcgccgccacaccgtggtggtgcagagcccgctgactgacctcaacttcaacgagtggaaggagctgggcggagggggccccccggagcctgcgggcgcgcgggcgcacagtgacaacaaggactccggactcagcagcctggagtccaccaaggcgcgggccccgtcgtccgctgcctcgcagccgcccgcgcccggggacacggggtccctgcagagccagcccccgcgccgctcggccgcctcccgcctgcatcagtgtctgtgatccccacctcccgcgccgctcgggcgccacccctccctagagcccctttggaaccaggaggcttcaccagcctgcacctcctcttctgtggcccctgggtgcatggtgtgggtggagggcgcagcaggcagtgtctctagttggtgtgctggaactggcagggcagaggagaaggctggggccggactaattgaatggaagggggttccagaggtgatgagcagaagaggagggggcgtgggctgctggggtctgtgtccctgcacacatgcgcccgataggtccttctgagcctttctgtggctgcacttggggacccttgtggaccatggggtgtggctagggaacccctaagtttcagactaaaggaaagatcctgggtgatgctggctttttgcttctttcttctgccctcccacctcagcttgtaagcggggatgtgtgtatgtctggggagaggaggtgtagggtgcgtatgtccatggggggaggggcttgtgtgtgcagtcattgtcccaaggtgtttccagtagcgacttctgtccccctatccccaccctggtccccactttgcgcccccgggctccctgcctttggtgcacacaggatcctgcccgccccccttgccagagccagagaagggggttggggccattccaaggaggcaggactgaaaccctcaccagggttactccccaacatccttttgcctgagtcaccctctaagcgctttaaccacgggcagctgcctgttccccagacagtttttggtggggggggtccagggtcccccttgctggtacctccctcacccctctttttgtttttccatctgtgcctgttccttccacagcccaggcacacagaagcccaccttcttccccttaggaggagggatagtcaacacccctgctgtctctctgtcactcacacactgatttatggggtctgagctgggctgttcctgcaggatggacaggacccagcgccctcttctccccacaggctgtaaatagacttccaatcaccaggccagcccccacacaccctcactcattccagggaagcccaggtaggtggtgaacccgctgccacgtctatcagtcctcttgttttatgcaaagatttactgtaaagtagatttctttccctccctcccccattcttttattgtaaatattgtctctaaatgtgtaacatattataaagaatttataaggatttttaaagatgttttgctcatttacaaaagtgttgtaacagtgttggacaaagccttccaccccatgtccgcatggctcctttcactgtgtccttgacacacctctctggcaacaactaaaatttcctgcttctgaaaagtcctgtcttaaaagtacagtctatatcttggaaataaatagctttcctcaaggcatga

SEQ ID NO: 26252 - DNA, 5929 bp, Homo sapiens
  source 1..5929: mol_type = unassigned DNA
ctgccacccgatgaatggagtcgccttctgcctggtcgggatcccgccccgcccggagccccggcccccacagctgccactgggcccaagagatgggtgctctcctaggcgccccttcccctggcaggggccgaggacgctgctgctgtacaaaagtccccaggacggctttggcttcactctgcgccacttcatcgtgtacccacccgagtcggccgtgcactgcagcctgaaggaggaagagaatggaggccgtggaggaggaccctccccccggtaccgcctggagcccatggacaccatctttgtcaagaatgtgaaggaagacggccctgcccatagggcggggcttcgcacaggagaccggctggtaaaggtgaatggggaaagcgtcattgggaagacctactctcaggtcatagctctgatccagaatagtgatgacactctggagctgtctatcatgcccaaggacgaggacatcctccagctggcctactcccaggatgcctacctgaaagggaacgagccgtattctggagaggcccgcagcatcccagagccaccgccgatctgctacccccgcaagacctacgcccctcctgcccgggcctccaccagggccactatggtgcctgagcccacctcagcactgcccagtgacccccggagtcctgctgcctggagtgacccggggctccgtgtgccacctgctgcccgtgcccacctggacaactcttccttggggatgagccagccccgccccagccctggtgccttcccccacctctcctcggagccccggacgccccgtgccttcccagagcctggcagccgggtgccccccagcagactggagtgccagcaggccttgtcacactggctgtcaaaccaggtaccccgccgggcgggggagagacggtgcccagccatggccccccgggcccgcagcgcctcccaggaccggttggaggaggtggctgccccccgcccgtggccctgctccacctcccaggatgctttgagccagctgggccaggagggctggcaccgagctcgctcagatgactacttgagccgggccacccgttctgccgaggcactggggccaggggcactggtgtcaccccgctttgagcggtgtggctgggcttcccagcgttcgtctgcccgcacccccgcctgcccaactcgggacctgccagggccccaggccccacccccgtctggcctgcagggcctggatgacctcgggtacatcggctaccggagctacagcccatcattccagcgccggaccggcctcctccatgcgctctccttccgggactcaccctttggggggctgcctaccttcaacctggcccagtcccctgcgtcattcccaccagaggcctccgagccacccagggttgtacggccggaacccagcacccgggccctggagcctcctgcggaggatcgcggcgatgaggtggtcctgaggcagaagcccccgacgggccgcaaggttcagctgacccccgcaagacagatgaaccttggatttggtgacgagtccccagagccagaggccagtgggcgaggggaacgcctgggcaggaaggtggcccctttggccaccaccgaagactctctggcttccatcccctttattgatgagcccaccagccccagcattgacctccaagccaagcacgtccctgcctctgctgtggtctccagtgccatgaactcagcccctgtcctgggcaccagcccatcttccccgaccttcactttcaccctcggacgccattactcgcaggactgcagcagcatcaaggctggccgccgctcctcctacctgctggccatcaccacggagcgctccaagtcctgcgatgatggactcaacaccttccgcgacgagggccgggttctgcggcgcctgccaaaccgcatacccagcctgcggatgctccggagcttcttcaccgacgggtccttggatagctggggcacctctgaagatgctgacgctccttctaagcgacactcaacctctgacctctcagatgcgaccttcagcgatatcaggagagaaggctggttgtattataagcagattctcaccaagaaggggaagaaagcgggcagcggcctgcgccagtggaagcgggtgtacgccgcgctgcgggcgcgctcgctctcgctgagcaaggagcggcgggagcccgggccggcggcggcgggggctgcggcggccggcgcaggtgaggacgaggcggcgcccgtctgcatcggctcctgcctcgtggacatctcctacagcgagaccaagaggaggcacgtgttccggctgaccaccgctgacttctgtgaatatctctttcaggctgaggaccgggatgacatgctgggctggatcagagcgatccgggagaacagcagggccgagggcgaggaccccggctgtgccaaccaagctctgatcagcaagaagcttaacgattatcgcaaagtgagccatagctctgggcccaaagctgattcctcccccaaaggctctcgcggcctggggggcctcaagtctgagttcctcaagcagagtgcggcacgtggcctcaggactcaggacctgcccgcagggagcaaggatgacagtgctgcagcccccaaaaccccctggggcatcaacatcatcaagaaaaataagaaggccgctccgagggcgtttggggtcaggctggaggagtgccagccagccacggagaaccagcgcgtccccttaatcgtggctgcatgctgtcgcattgtggaggcacgagggctggagtccacaggcatttaccgagtgcccggcaacaatgcagtggtgtccagcctacaggagcagctcaaccgcgggcctggtgacatcaacctgcaggatgagcgctggcaagacctcaatgtgatcagcagcctgctcaagtccttcttccgaaagctgcccgagcctcttttcactgatgacaaatacaacgacttcatcgaggccaaccgcattgaggacgcacgggagcgaatgaggacgctgcggaagctgatccgggatctcccaggacactactatgaaacgctcaaattccttgtgggccatctcaagaccatcgctgaccactctgagaaaaacaagatggaaccccggaacctggccctggtctttgggccgacactggtgaggacgtctgaggacaacatgacagacatggtgacccacatgcctgaccgctacaagatcgtggagacactgatccagcactcagactggttcttcagtgacgaagaggacaagggagagagaacccctgtgggcgacaaggagcctcaggcagtgcccaacattgagtacctcctgcccaacattggcaggacagtgccccctggcgacccggggtcagcggacctgttggagatttaaaggattctaccacctgtagttcagccaagtccaagggttcgtgggcccccaagaaggagccgtacgcccgggagatgctggcgatctccttcatctcggccgtcaaccgcaagcgcaagaagcggcgggaggcgcgggggctgggcagcagcaccgacgacgactcggagcaggaggcgcacaagcctggggcgggggccacagcgccggggactcaggagcggccgcaggggccgctgcctggcgccgtcgcccccgaggcccccggacgcctcagtcccccggcggcgccggaggagcggccggccgcggacacgcgctccattgtgtcgggctactccaccctgtccaccatggaccgcagcgtgtgctcgggcgctagcggtcggcgggcaggggcgggggatgaggcggacgacgagcgtagcgagctgagccacgtggagacggacactgagggcgcggcgggcgcggggcctggggggcgcctgacacgccggccgtccttcagctcgcaccacctcatgccctgcgacactctggcgcgccgccgcctggcccggggccgcccagacggcgagggcgcgggccggggcggtccccgcgccccggagccgcccggctcggcgtcgtccagcagccaggagtcgctgcggcccccggcggcggcgctggcctcccggccctcgcgcatggaggcgctgcgtctaaggctccgcggcacggcggacgacatgctcgccgtgcgcctgcggcggccgctgtcgcccgagacccggcggcgccggagcagctggcgccgccacaccgtggtggtgcagagcccgctgactgacctcaacttcaacgagtggaaggagctgggcggagggggccccccggagcctgcgggcgcgcgggcgcacagtgacaacaaggactccggactcagcagcctggagtccaccaaggcgcgggccccgtcgtccgctgcctcgcagccgcccgcgcccggggacacggggtccctgcagagccagcccccgcgccgctcggccgcctcccgcctgcatcagtgtctgtgatccccacctcccgcgccgctcgggcgccacccctccctagagcccctttggaaccaggaggcttcaccagcctgcacctcctcttctgtggcccctgggtgcatggtgtgggtggagggcgcagcaggcagtgtctctagttggtgtgctggaactggcagggcagaggagaaggctggggccggactaattgaatggaagggggttccagaggtgatgagcagaagaggagggggcgtgggctgctggggtctgtgtccctgcacacatgcgcccgataggtccttctgagcctttctgtggctgcacttggggacccttgtggaccatggggtgtggctagggaacccctaagtttcagactaaaggaaagatcctgggtgatgctggctttttgcttctttcttctgccctcccacctcagcttgtaagcggggatgtgtgtatgtctggggagaggaggtgtagggtgcgtatgtccatggggggaggggcttgtgtgtgcagtcattgtcccaaggtgtttccagtagcgacttctgtccccctatccccaccctggtccccactttgcgcccccgggctccctgcctttggtgcacacaggatcctgcccgccccccttgccagagccagagaagggggttggggccattccaaggaggcaggactgaaaccctcaccagggttactccccaacatccttttgcctgagtcaccctctaagcgctttaaccacgggcagctgcctgttccccagacagtttttggtggggggggtccagggtcccccttgctggtacctccctcacccctctttttgtttttccatctgtgcctgttccttccacagcccaggcacacagaagcccaccttcttccccttaggaggagggatagtcaacacccctgctgtctctctgtcactcacacactgatttatggggtctgagctgggctgttcctgcaggatggacaggacccagcgccctcttctccccacaggctgtaaatagacttccaatcaccaggccagcccccacacaccctcactcattccagggaagcccaggtaggtggtgaacccgctgccacgtctatcagtcctcttgttttatgcaaagatttactgtaaagtagatttctttccctccctcccccattcttttattgtaaatattgtctctaaatgtgtaacatattataaagaatttataaggatttttaaagatgttttgctcatttacaaaagtgttgtaacagtgttggacaaagccttccaccccatgtccgcatggctcctttcactgtgtccttgacacacctctctggcaacaactaaaatttcctgcttctgaaaagtcctgtcttaaaagtacagtctatatcttggaaataaatagctttcctcaaggcatga

SEQ ID NO: 26253 - DNA, 6276 bp, Homo sapiens
  source 1..6276: mol_type = unassigned DNA
gaaggatgcgtgtgtgccggtctgctgtgcatgtgtgtatctgcatgtctgtgatgcatgcgcatgcgtctgtatgtgcattgtgtgtgcaggactttgattctgtgcaactctgtgcatatctatgtgtctacaaaagtgtgcacatgtgtactcatttgtgtgtgtgtatctgtgtgtctgcatatttgcacatgcttgtctgtatgtttgtggtatgttccgtctacatgagtgtatgtggctggggctgtgtctgcataagtatgtgtctatctgggagtgcatatatgtgtgcatgtgtgtgtgtgagattgtgcatgagctaagacaacgacaggcacttcctgggcaggaaggctgtatccagggtcctgcacatagtaggtgctcagtgaacatttgctgaactcagctgaactgaactgaatgaacttgcttcactgccactgggcccaagagatgggtgctctcctaggcgccccttcccctggcaggggccgaggacgctgctgctgtacaaaagtccccaggacggctttggcttcactctgcgccacttcatcgtgtacccacccgagtcggccgtgcactgcagcctgaaggaggaagagaatggaggccgtggaggaggaccctccccccggtaccgcctggagcccatggacaccatctttgtcaagaatgtgaaggaagacggccctgcccatagggcggggcttcgcacaggagaccggctggtaaaggtgaatggggaaagcgtcattgggaagacctactctcaggtcatagctctgatccagaatagtgatgacactctggagctgtctatcatgcccaaggacgaggacatcctccagctggcctactcccaggatgcctacctgaaagggaacgagccgtattctggagaggcccgcagcatcccagagccaccgccgatctgctacccccgcaagacctacgcccctcctgcccgggcctccaccagggccactatggtgcctgagcccacctcagcactgcccagtgacccccggagtcctgctgcctggagtgacccggggctccgtgtgccacctgctgcccgtgcccacctggacaactcttccttggggatgagccagccccgccccagccctggtgccttcccccacctctcctcggagccccggacgccccgtgccttcccagagcctggcagccgggtgccccccagcagactggagtgccagcaggccttgtcacactggctgtcaaaccaggtaccccgccgggcgggggagagacggtgcccagccatggccccccgggcccgcagcgcctcccaggaccggttggaggaggtggctgccccccgcccgtggccctgctccacctcccaggatgctttgagccagctgggccaggagggctggcaccgagctcgctcagatgactacttgagccgggccacccgttctgccgaggcactggggccaggggcactggtgtcaccccgctttgagcggtgtggctgggcttcccagcgttcgtctgcccgcacccccgcctgcccaactcgggacctgccagggccccaggccccacccccgtctggcctgcagggcctggatgacctcgggtacatcggctaccggagctacagcccatcattccagcgccggaccggcctcctccatgcgctctccttccgggactcaccctttggggggctgcctaccttcaacctggcccagtcccctgcgtcattcccaccagaggcctccgagccacccagggttgtacggccggaacccagcacccgggccctggagcctcctgcggaggatcgcggcgatgaggtggtcctgaggcagaagcccccgacgggccgcaaggttcagctgacccccgcaagacagatgaaccttggatttggtgacgagtccccagagccagaggccagtgggcgaggggaacgcctgggcaggaaggtggcccctttggccaccaccgaagactctctggcttccatcccctttattgatgagcccaccagccccagcattgacctccaagccaagcacgtccctgcctctgctgtggtctccagtgccatgaactcagcccctgtcctgggcaccagcccatcttccccgaccttcactttcaccctcggacgccattactcgcaggactgcagcagcatcaaggctggccgccgctcctcctacctgctggccatcaccacggagcgctccaagtcctgcgatgatggactcaacaccttccgcgacgagggccgggttctgcggcgcctgccaaaccgcatacccagcctgcggatgctccggagcttcttcaccgacgggtccttggatagctggggcacctctgaagatgctgacgctccttctaagcgacactcaacctctgacctctcagatgcgaccttcagcgatatcaggagagaaggctggttgtattataagcagattctcaccaagaaggggaagaaagcgggcagcggcctgcgccagtggaagcgggtgtacgccgcgctgcgggcgcgctcgctctcgctgagcaaggagcggcgggagcccgggccggcggcggcgggggctgcggcggccggcgcaggtgaggacgaggcggcgcccgtctgcatcggctcctgcctcgtggacatctcctacagcgagaccaagaggaggcacgtgttccggctgaccaccgctgacttctgtgaatatctctttcaggctgaggaccgggatgacatgctgggctggatcagagcgatccgggagaacagcagggccgagggcgaggaccccggctgtgccaaccaagctctgatcagcaagaagcttaacgattatcgcaaagtgagccatagctctgggcccaaagctgattcctcccccaaaggctctcgcggcctggggggcctcaagtctgagttcctcaagcagagtgcggcacgtggcctcaggactcaggacctgcccgcagggagcaaggatgacagtgctgcagcccccaaaaccccctggggcatcaacatcatcaagaaaaataagaaggccgctccgagggcgtttggggtcaggctggaggagtgccagccagccacggagaaccagcgcgtccccttaatcgtggctgcatgctgtcgcattgtggaggcacgagggctggagtccacaggcatttaccgagtgcccggcaacaatgcagtggtgtccagcctacaggagcagctcaaccgcgggcctggtgacatcaacctgcaggatgagcgctggcaagacctcaatgtgatcagcagcctgctcaagtccttcttccgaaagctgcccgagcctcttttcactgatgacaaatacaacgacttcatcgaggccaaccgcattgaggacgcacgggagcgaatgaggacgctgcggaagctgatccgggatctcccaggacactactatgaaacgctcaaattccttgtgggccatctcaagaccatcgctgaccactctgagaaaaacaagatggaaccccggaacctggccctggtctttgggccgacactggtgaggacgtctgaggacaacatgacagacatggtgacccacatgcctgaccgctacaagatcgtggagacactgatccagcactcagactggttcttcagtgacgaagaggacaagggagagagaacccctgtgggcgacaaggagcctcaggcagtgcccaacattgagtacctcctgcccaacattggcaggacagtgccccctggcgacccggggtcagattctaccacctgtagttcagccaagtccaagggttcgtgggcccccaagaaggagccgtacgcccgggagatgctggcgatctccttcatctcggccgtcaaccgcaagcgcaagaagcggcgggaggcgcgggggctgggcagcagcaccgacgacgactcggagcaggaggcgcacaagcctggggcgggggccacagcgccggggactcaggagcggccgcaggggccgctgcctggcgccgtcgcccccgaggcccccggacgcctcagtcccccggcggcgccggaggagcggccggccgcggacacgcgctccattgtgtcgggctactccaccctgtccaccatggaccgcagcgtgtgctcgggcgctagcggtcggcgggcaggggcgggggatgaggcggacgacgagcgtagcgagctgagccacgtggagacggacactgagggcgcggcgggcgcggggcctggggggcgcctgacacgccggccgtccttcagctcgcaccacctcatgccctgcgacactctggcgcgccgccgcctggcccggggccgcccagacggcgagggcgcgggccggggcggtccccgcgccccggagccgcccggctcggcgtcgtccagcagccaggagtcgctgcggcccccggcggcggcgctggcctcccggccctcgcgcatggaggcgctgcgtctaaggctccgcggcacggcggacgacatgctcgccgtgcgcctgcggcggccgctgtcgcccgagacccggcggcgccggagcagctggcgccgccacaccgtggtggtgcagagcccgctgactgacctcaacttcaacgagtggaaggagctgggcggagggggccccccggagcctgcgggcgcgcgggcgcacagtgacaacaaggactccggactcagcagcctggagtccaccaaggcgcgggccccgtcgtccgctgcctcgcagccgcccgcgcccggggacacggggtccctgcagagccagcccccgcgccgctcggccgcctcccgcctgcatcagtgtctgtgatccccacctcccgcgccgctcgggcgccacccctccctagagcccctttggaaccaggaggcttcaccagcctgcacctcctcttctgtggcccctgggtgcatggtgtgggtggagggcgcagcaggcagtgtctctagttggtgtgctggaactggcagggcagaggagaaggctggggccggactaattgaatggaagggggttccagaggtgatgagcagaagaggagggggcgtgggctgctggggtctgtgtccctgcacacatgcgcccgataggtccttctgagcctttctgtggctgcacttggggacccttgtggaccatggggtgtggctagggaacccctaagtttcagactaaaggaaagatcctgggtgatgctggctttttgcttctttcttctgccctcccacctcagcttgtaagcggggatgtgtgtatgtctggggagaggaggtgtagggtgcgtatgtccatggggggaggggcttgtgtgtgcagtcattgtcccaaggtgtttccagtagcgacttctgtccccctatccccaccctggtccccactttgcgcccccgggctccctgcctttggtgcacacaggatcctgcccgccccccttgccagagccagagaagggggttggggccattccaaggaggcaggactgaaaccctcaccagggttactccccaacatccttttgcctgagtcaccctctaagcgctttaaccacgggcagctgcctgttccccagacagtttttggtggggggggtccagggtcccccttgctggtacctccctcacccctctttttgtttttccatctgtgcctgttccttccacagcccaggcacacagaagcccaccttcttccccttaggaggagggatagtcaacacccctgctgtctctctgtcactcacacactgatttatggggtctgagctgggctgttcctgcaggatggacaggacccagcgccctcttctccccacaggctgtaaatagacttccaatcaccaggccagcccccacacaccctcactcattccagggaagcccaggtaggtggtgaacccgctgccacgtctatcagtcctcttgttttatgcaaagatttactgtaaagtagatttctttccctccctcccccattcttttattgtaaatattgtctctaaatgtgtaacatattataaagaatttataaggatttttaaagatgttttgctcatttacaaaagtgttgtaacagtgttggacaaagccttccaccccatgtccgcatggctcctttcactgtgtccttgacacacctctctggcaacaactaaaatttcctgcttctgaaaagtcctgtcttaaaagtacagtctatatcttggaaataaatagctttcctcaaggcatga

SEQ ID NO: 26254 - DNA, 4572 bp, Homo sapiens
  source 1..4572: mol_type = unassigned DNA
gggagtttgaagacagaaaggaaaggggagaaacctgcagagagcatcaaaggatggggggtgctataaaagaagcaggggggtcctttgaaagaaatctatcatgcactgaaatgctttctggagaaggtgccattattttcctcccctcttgctcagatgaaaggagccagcaaggacagtcctgaaatattcctcaggggactttttgtcattgttcctctttcctcttgcacagagctatttgctgacctttccagaggaatctcagtccagctgagaagacagttcttaataaaaacaaaaaaatgcaaaaaccaattcctgctgtttgaatgggaatggtagcttgcttgctgcagttcttttcctgtgacattttggaatgtctgcagaaacttaaaaaaaagaaaaaaaaaaccttaaaaactccctggattaggcaagagaaaaggaagtttttttttgctaaacaggagtaaatgagaggtggtaacttatccctaagccaggacctggatgatcaaaaccttcaaattctagggatcagcacttcaaaaataacaagtaaacaagcatgaggagtggctgttgggtttcgctcagaggcaggttttaaaggaagccaaaaccgggttcagaacttcaggcctgtacgatgcctgaagaccggaattctggggggtgcccggctggtgccttagcctcaactcctttcatccctaaaactacatacagaagaatcaaacggtgttttagttttcggaaaggcatttttggacagaaactggaggatactgttcgttatgagaagagatatgggaaccgtctggctccgatgttggtggagcagtgcgtggactttatccgacaaagggggctgaaagaagagggtctctttcgactgccaggccaggctaatcttgttaaggagctccaagatgcctttgactgtggggagaagccatcatttgacagcaacacagatgtacacacggtggcatcacttcttaagctgtacctccgagaacttccagaaccagttattccttatgcgaagtatgaagattttttgtcatgtgccaaactgctcagcaaggaagaggaagcaggtgttaaggaattagcaaagcaggtgaagagtttgccagtggtaaattacaacctcctcaagtatatttgcagattcttggatgaagtacagtcctactcgggagttaacaaaatgagtgtgcagaacttggcaacggtctttggtcctaatatcctgcgccccaaagtggaagatcctttgactatcatggagggcactgtggtggtccagcagttgatgtcagtgatgattagcaaacatgattgcctctttcccaaagatgcagaactacaaagcaagccccaagatggagtgagcaacaacaatgaaattcagaagaaagccaccatggggcagttacagaacaaggagaacaataacaccaaggacagccctagtaggcagtgctcctgggacaagtctgagtcaccccagagaagcagcatgaacaatggatcccccacagctctatcaggcagcaaaaccaacagcccaaagaacagtgttcacaagctagatgtgtctagaagcccccctctcatggtcaaaaagaacccagcctttaataagggtagtgggatagttaccaatgggtccttcagcagcagtaatgcagaaggtcttgagaaaacccaaaccacccccaatgggagcctacaggccagaaggagctcttcactgaaggtatctggtaccaaaatgggcacgcacagtgtacagaatggaacggtgcgcatgggcattttgaacagcgacacactcgggaaccccacaaatgttcgaaacatgagctggctgccaaatggctatgtgaccctgagggataacaagcagaaagaacaagctggagagttaggccagcacaacagactgtccacctatgataatgtccatcaacagttctccatgatgaaccttgatgacaagcagagcattgacagtgctacctggtccacttcctcctgtgaaatctccctccctgagaactccaactcctgtcgctcttctaccaccacctgcccagagcaagacttttttggggggaactttgaggaccctgttttggatgggcccccgcaggacgacctttcccaccccagggactatgaaagcaaaagtgaccacaggagtgtgggaggtcgaagtagtcgtgccaccagtagcagtgacaacagtgagacatttgtgggcaacagcagcagcaaccacagtgcactgcacagtttagtttccagcctgaaacaggaaatgaccaaacagaagatagagtatgagtccaggataaagagcttagaacagcgaaacttgactttggaaacagaaatgatgagcctccatgatgaactggatcaggagaggaaaaagttcacaatgatagaaataaaaatgcgaaatgccgagcgagcaaaagaagatgccgagaaaagaaatgacatgctacagaaagaaatggagcagtttttttccacgtttggagaactgacagtggaacccaggagaaccgagagaggaaacacaatatggattcagtgagcctgctttcgcctgctgtctctgatggctctggcaaggactccagggattctggtgggatatgacttagaaccaggtggctggtcacctggatgtacagaagtctaactggtgaaggaatatcatttacagacattaaacatccatatctgcaatgtgtaccaaagttatatcatgccccataatgctactgtcaagtgttacaactggatatgtgtatatagagtagtttttcaaaagtaaactaaaaatgagaagcatatttcaagaattattttattgcaagtcttgtatttaaatgttaaatcaatatgttgttgcaatttagcttgctttcaagcttcaccccttgcacttaacataagctatttttggcattgtgttatcatcggcttattttatagatcaatatttttatttcccttttttgctgaggaaatgaagataagcaaaaatataaatatatatataaatatatgagttattaaaatcagaagaatactttgtggctgtgctgtttgtgccaatagactttgtcatgaccaaaaagagaaatgtaaatagttttataaaatacagtcgaatcaccaggaacctttgagctgcttttaaaattcttcccctggcaccactcagttttgcttttgcgaggcgatttgacataggaactttgagactccatgagaaagtccctttctgaggcccactgtctaccttgccagatcctcagtgcgtatcgccaatgcaggatgctccttagaaaagaaaaaatggtaaagaatggcatttaacgattcaggctttgaattactctgtccctctggaccgaatctctttaactgctggatagttttagaggaattctcctgctacttaggtactgggaaacaatgcttgctaaaccatgcccacgtgagcacctgtctcccactcaaacctctcccatctcccaacaactgcactttagaataccagcagtgaaatggtattactgtttccctctgagtgaaactgctagagtatatgtcacgtagtgacatttttttctcactcaggctattgccatctgggattctctccctactacagctggcaaagttggtttgcagcaagaagatagtgggagggggccaggctgcaggagaaggagaaaagtttagaagaaacaaaccattttgcttctaattttgacagtatcactttcctgttaaaacatacaataattttaaaaggtgaatgcctaaagttccaattttagcaaatatgggaacctcagcaatgctaattttctagaaaaacccagggctctttggagctagagttttgggagaacagttcttcacaataaggcaatggttttgagaggccaggcaaataatctttctcaccgtagaacaaaaagttacaaaaggcataatcggaaatagagactacatacttgagtttatggggtttgtgttgtttgaaggttcaatgcttgcatgtgtttatttattttcaagagggaaagtggtctgtactgctttcatccttgccactgtcttgcttttattttttactctcccactgagcaagcgtctgtggtcctatggtatcaaccagtatctttatagcaataatttctttaattcccttttctctctctttccaattatttaaccagttacttccacctggacatacgataggaaattcaaactcaaaatatgaaaattgatcttaataactctcccttcatatcttttcacctatttccagtccttatcatagttgataaaaacctcagactcatccagaaagctatatgatgcactagtaaaaaaaacaaagatattcaaactgcttgggttcaaatggtatacaatttgccagctgttactgaaccttctatgcataactttttttttcctctgtgcaattggaataataaaaatactactcccata

SEQ ID NO: 26255 - DNA, 2740 bp, Homo sapiens
  source 1..2740: mol_type = unassigned DNA
ggatgggaggatactgactaagtctgagaaggaggagaaagaaaattagctacaggaagagtttatatccccttctacaagaaaacttaaatatagctaccaccgctttgaaaggaatggtttgtgtccaaacagcattttccagacaagctctgtacttttttgccaaaagaattaactttaaactgaaggcagtggacagttaaacaagagtcggcactgggaacagctgtgcgtagaccagaccagtgacttataaggaggcgatcgagatcggatgacagcaaatcatgaaagctacctcctcatggcaagcacccagaatgatatggaagactgggtgaagtcaatccgccgagtcatatggggacctttcggaggaggcatttttggacagaaactggaggatactgttcgttatgagaagagatatgggaaccgtctggctccgatgttggtggagcagtgcgtggactttatccgacaaagggggctgaaagaagagggtctctttcgactgccaggccaggctaatcttgttaaggagctccaagatgcctttgactgtggggagaagccatcatttgacagcaacacagatgtacacacggtggcatcacttcttaagctgtacctccgagaacttccagaaccagttattccttatgcgaagtatgaagattttttgtcatgtgccaaactgctcagcaaggaagaggaagcaggtgttaaggaattagcaaagcaggtgaagagtttgccagtggtaaattacaacctcctcaagtatatttgcagattcttggatgaagtacagtcctactcgggagttaacaaaatgagtgtgcagaacttggcaacggtctttggtcctaatatcctgcgccccaaagtggaagatcctttgactatcatggagggcactgtggtggtccagcagttgatgtcagtgatgattagcaaacatgattgcctctttcccaaagatgcagaactacaaagcaagccccaagatggagtgagcaacaacaatgaaattcagaagaaagccaccatggggcagttacagaacaaggagaacaataacaccaaggacagccctagtaggcagtgctcctgggacaagtctgagtcaccccagagaagcagcatgaacaatggatcccccacagctctatcaggcagcaaaaccaacagcccaaagaacagtgttcacaagctagatgtgtctagaagcccccctctcatggtcaaaaagaacccagcctttaataagggtagtgggatagttaccaatgggtccttcagcagcagtaatgcagaaggtcttgagaaaacccaaaccacccccaatgggagcctacaggccagaaggagctcttcactgaaggtatctggtaccaaaatgggcacgcacagtgtacagaatggaacggtgcgcatgggcattttgaacagcgacacactcgggaaccccacaaatgttcgaaacatgagctggctgccaaatggctatgtgaccctgagggataacaagcagaaagaacaagctggagagttaggccagcacaacagactgtccacctatgataatgtccatcaacagttctccatgatgaaccttgatgacaagcagagcattgacagtgctacctggtccacttcctcctgtgaaatctccctccctgagaactccaactcctgtcgctcttctaccaccacctgcccagagcaagacttttttggggggaactttgaggaccctgttttggatgggcccccgcaggacgacctttcccaccccagggactatgaaagcaaaagtgaccacaggagtgtgggaggtcgaagtagtcgtgccaccagtagcagtgacaacagtgagacatttgtgggcaacagcagcagcaaccacagtgcactgcacagtttagtttccagcctgaaacaggaaatgaccaaacagaagatagagtatgagtccaggataaagagcttagaacagcgaaacttgactttggaaacagaaatgatgagcctccatgatgaactggatcaggagaggaaaaagttcacaatgatagaaataaaaatgcgaaatgccgagcgagcaaaagaagatgccgagaaaagaaatgacatgctacagaaagaaatggagcagtttttttccacgtttggagaactgacagtggaacccaggagaaccgagagaggaaacacaatatggattcagtgagcctgctttcgcctgctgtctctgatggctctggcaaggactccagggattctggtgggatatgacttagaaccaggtggctggtcacctggatgtacagaagtctaactggtgaaggaatatcatttacagacattaaacatccatatctgcaatgtgtaccaaagttatatcatgccccataatgctactgtcaagtgttacaactggatatgtgtatatagagtagtttttcaaaagtaaactaaaaatgagaagcatatttcaagaattattttattgcaagtcttgtatttaaatgttaaatcaatatgttgttgcaatttagcttgctttcaagcttcaccccttgcacttaacataagctatttttggcattgtgttatcatcggcttattttatagatcaatatttttatttcccttttttgctgaggaaatgaagataagcaaaaatataaatatatatataaatatatgagttattaaaatcagaagaata

SEQ ID NO: 26256 - DNA, 4661 bp, Homo sapiens
  source 1..4661: mol_type = unassigned DNA
ttgtactgtatatttacacattcacacacaatcaccctttctaacttctgggactctttgcgcaactgctaggatttctcaagtgcatgtggcaacacagcccagctccgggtggaaaccagcagggctctggaggggctcggagaccaggggagctgtcaaggctgcggcggggaccagagaggagcctggcgggggtggctgggtggctgggggaatccccccaacttcccatcgcaggcgcagctctctcggccgcctatttcctccgaaacccgcgctgcggagcagcccagtgcatagagttcaacacttccccttgttgtggaaagtaaaggagcctcactaccacctttttttctttgcgttttcttactgctggtcctgggagccttttccttcggagcagcagccctgtccggcatctgtcttgagctcccagcaaggaaagtccatcagcttgataatggaggagaacaatgactccacggagaacccccaacaaggccaagggcggcagaatgccatcaagtgtgggtggctgaggaagcaaggaggctttgtcaagacttggcatactcgctggtttgtgctcaagggggatcagctctattatttcaaagatgaagatgaaaccaagcccttgggtactatttttctgcctggaaataaagtttctgagcatccctgcaatgaagagaacccagggaagttcctttttgaagtagttccaggaggcgatcgagatcggatgacagcaaatcatgaaagctacctcctcatggcaagcacccagaatgatatggaagactgggtgaagtcaatccgccgagtcatatggggacctttcggaggaggcatttttggacagaaactggaggatactgttcgttatgagaagagatatgggaaccgtctggctccgatgttggtggagcagtgcgtggactttatccgacaaagggggctgaaagaagagggtctctttcgactgccaggccaggctaatcttgttaaggagctccaagatgcctttgactgtggggagaagccatcatttgacagcaacacagatgtacacacggtggcatcacttcttaagctgtacctccgagaacttccagaaccagttattccttatgcgaagtatgaagattttttgtcatgtgccaaactgctcagcaaggaagaggaagcaggtgttaaggaattagcaaagcaggtgaagagtttgccagtggtaaattacaacctcctcaagtatatttgcagattcttggatgaagtacagtcctactcgggagttaacaaaatgagtgtgcagaacttggcaacggtctttggtcctaatatcctgcgccccaaagtggaagatcctttgactatcatggagggcactgtggtggtccagcagttgatgtcagtgatgattagcaaacatgattgcctctttcccaaagatgcagaactacaaagcaagccccaagatggagtgagcaacaacaatgaaattcagaagaaagccaccatggggcagttacagaacaaggagaacaataacaccaaggacagccctagtaggcagtgctcctgggacaagtctgagtcaccccagagaagcagcatgaacaatggatcccccacagctctatcaggcagcaaaaccaacagcccaaagaacagtgttcacaagctagatgtgtctagaagcccccctctcatggtcaaaaagaacccagcctttaataagggtagtgggatagttaccaatgggtccttcagcagcagtaatgcagaaggtcttgagaaaacccaaaccacccccaatgggagcctacaggccagaaggagctcttcactgaaggtatctggtaccaaaatgggcacgcacagtgtacagaatggaacggtgcgcatgggcattttgaacagcgacacactcgggaaccccacaaatgttcgaaacatgagctggctgccaaatggctatgtgaccctgagggataacaagcagaaagaacaagctggagagttaggccagcacaacagactgtccacctatgataatgtccatcaacagttctccatgatgaaccttgatgacaagcagagcattgacagtgctacctggtccacttcctcctgtgaaatctccctccctgagaactccaactcctgtcgctcttctaccaccacctgcccagagcaagacttttttggggggaactttgaggaccctgttttggatgggcccccgcaggacgacctttcccaccccagggactatgaaagcaaaagtgaccacaggagtgtgggaggtcgaagtagtcgtgccaccagtagcagtgacaacagtgagacatttgtgggcaacagcagcagcaaccacagtgcactgcacagtttagtttccagcctgaaacaggaaatgaccaaacagaagatagagtatgagtccaggataaagagcttagaacagcgaaacttgactttggaaacagaaatgatgagcctccatgatgaactggatcaggagaggaaaaagttcacaatgatagaaataaaaatgcgaaatgccgagcgagcaaaagaagatgccgagaaaagaaatgacatgctacagaaagaaatggagcagtttttttccacgtttggagaactgacagtggaacccaggagaaccgagagaggaaacacaatatggattcagtgagcctgctttcgcctgctgtctctgatggctctggcaaggactccagggattctggtgggatatgacttagaaccaggtggctggtcacctggatgtacagaagtctaactggtgaaggaatatcatttacagacattaaacatccatatctgcaatgtgtaccaaagttatatcatgccccataatgctactgtcaagtgttacaactggatatgtgtatatagagtagtttttcaaaagtaaactaaaaatgagaagcatatttcaagaattattttattgcaagtcttgtatttaaatgttaaatcaatatgttgttgcaatttagcttgctttcaagcttcaccccttgcacttaacataagctatttttggcattgtgttatcatcggcttattttatagatcaatatttttatttcccttttttgctgaggaaatgaagataagcaaaaatataaatatatatataaatatatgagttattaaaatcagaagaatactttgtggctgtgctgtttgtgccaatagactttgtcatgaccaaaaagagaaatgtaaatagttttataaaatacagtcgaatcaccaggaacctttgagctgcttttaaaattcttcccctggcaccactcagttttgcttttgcgaggcgatttgacataggaactttgagactccatgagaaagtccctttctgaggcccactgtctaccttgccagatcctcagtgcgtatcgccaatgcaggatgctccttagaaaagaaaaaatggtaaagaatggcatttaacgattcaggctttgaattactctgtccctctggaccgaatctctttaactgctggatagttttagaggaattctcctgctacttaggtactgggaaacaatgcttgctaaaccatgcccacgtgagcacctgtctcccactcaaacctctcccatctcccaacaactgcactttagaataccagcagtgaaatggtattactgtttccctctgagtgaaactgctagagtatatgtcacgtagtgacatttttttctcactcaggctattgccatctgggattctctccctactacagctggcaaagttggtttgcagcaagaagatagtgggagggggccaggctgcaggagaaggagaaaagtttagaagaaacaaaccattttgcttctaattttgacagtatcactttcctgttaaaacatacaataattttaaaaggtgaatgcctaaagttccaattttagcaaatatgggaacctcagcaatgctaattttctagaaaaacccagggctctttggagctagagttttgggagaacagttcttcacaataaggcaatggttttgagaggccaggcaaataatctttctcaccgtagaacaaaaagttacaaaaggcataatcggaaatagagactacatacttgagtttatggggtttgtgttgtttgaaggttcaatgcttgcatgtgtttatttattttcaagagggaaagtggtctgtactgctttcatccttgccactgtcttgcttttattttttactctcccactgagcaagcgtctgtggtcctatggtatcaaccagtatctttatagcaataatttctttaattcccttttctctctctttccaattatttaaccagttacttccacctggacatacgataggaaattcaaactcaaaatatgaaaattgatcttaataactctcccttcatatcttttcacctatttccagtccttatcatagttgataaaaacctcagactcatccagaaagctatatgatgcactagtaaaaaaaacaaagatattcaaactgcttgggttcaaatggtatacaatttgccagctgttactgaaccttctatgcataactttttttttcctctgtgcaattggaataataaaaatactactcccataga

SEQ ID NO: 26257 - DNA, 1273 bp, Homo sapiens
  source 1..1273: mol_type = unassigned DNA
gggctctggaggggctcggagaccaggggagctgtcaaggctgcggcggggaccagagaggagcctggcgggggtggctgggtggctgggggaatccccccaacttcccatcgcaggcgcagctctctcggccgcctatttcctccgaaacccgcgctgcggagcagcccagtgcatagagttcaacacttccccttgttgtggaaagtaaaggagcctcactaccacctttttttctttgcgttttcttactgctggtcctgggagccttttccttcggagcagcagccctgtccggcatctgtcttgagctcccagcaaggaaagtccatcagcttgataatggaggagaacaatgactccacggagaacccccaacaaggccaagggcggcagaatgccatcaagtgtgggtggctgaggaagcaaggaggctttgtcaagacttggcatactcgctggtttgtgctcaagggggatcagctctattatttcaaagatgaagatgaaaccaagcccttgggtactatttttctgcctggaaataaagtttctgagcatccctgcaatgaagagaacccagggaagttcctttttgaagtagttccaggaggcgatcgagatcggatgacagcaaatcatgaaagctacctcctcatggcaagcacccagaatgatatggaagactgggtgaagtcaatccgccgagtcatatggggacctttcggaggaggcatttttggacagaaactggaggatactgttcgttatgagaagagatatgggaaccgtctggctccgatgttggtggagcagtgcgtggactttatccgacaaagggggctgaaagaagagggtctctttcgactgccaggccaggctaatcttgttaaggagctccaagatgcctttgactgtggggagaagccatcatttgacagcaacacagatgtacacacggtggcatcacttcttaagctgtacctccgagaacttccagaaccagttattccttatgcgaagtatgaagattttttgtcatgtgccaaactgctcagcaaggaagaggaagcagtaagttgatgcatttatttccaaataagcttttgtttggaatttttttctgtgttcttagtcttaaatctgtaaatttccattgccctatcccggtgttactctccactatcctttgaattgacctcacacacactgagactttccgtatacagctcaagcaccatttccgatcccctctctgatcaaaaaaaaagaa

SEQ ID NO: 26258 - DNA, 567 bp, Homo sapiens
  source 1..567: mol_type = unassigned DNA
ataactcattaggcttgaatgagatgctttgaactgtggtgactacagtaatgttcccctctgcatgttgaagtgacaagtgcctccttggcctattgctgatcctgcctgctgtagaaatctccagctgtccaatatttggaagaaaactggctgtgcgtgtagtagagatgctctctctttgtgaagaaggccctgcatacattaaacaagtccggtactatttttctgcctggaaataaagtttctgagcatccctgcaatgaagagaacccagggaagttcctttttgaagtagttccaggaggcgatcgagatcggatgacagcaaatcatgaaagctacctcctcatggcaagcacccagaatgatatggaagactgggtgaagtcaatccgccgagtcatatggggacctttcggaggaggcatttttggacagaaactggaggatactgttcgttatgagaagagatatgggaaccgtctggctccgatgttggtggagcagtgcgtggactttatccgacaaagggggctgaaagaagagggtctctttcgactgcca

SEQ ID NO: 26259 - DNA, 2979 bp, Homo sapiens
  source 1..2979: mol_type = unassigned DNA
acacacacacacacaaaaccaagaggcagcagttgtttatcacgacctcaactcagtaaggcctgagattctttcgaaaaggagctttgcttcccatgacgcagagggaagtgtcaactgggatatttctggtaaaactgaaagcaagaaaagcagggtgctagcccctgtgggactgagggtggaggctgggggagtttgggtgccatcctccagtgacagatggatggacctttcatctaagagaaaggaggagacacgttggcaaatcagcctcaagcctaagattgcttgtgaagcaatcataaggaggaacaaaaacagacacaaaaacagagggaaagagtgaaaagacaagaagggcgcaaactgtgacagactcaccgcttcactaactactcacttaaactggaagcaaaatgtccctaaaattgccaaggaactgggatttcaacctgaaagtggaggctgcgaaaatagctcggtcaaggagtgtgatgactggcgagcagatggctgccttccatccatcgtccacccccaacccgctggagaggcccatcaagatgggctggctgaagaagcagaggtccatcgtgaagaactggcagcagaggtactttgtgctgagggcgcagcagctctactactacaaggatgaagaggacacgaagccccagggctgcatgtatctaccaggatgtacaatcaaggagatcgccacaaacccagaagaagctgggaagtttgtctttgaaatcattccagcctcatgggaccagaatcgcatgggacaggactcctatgtcctcatggccagctctcaggcggagatggaggagtgggttaaattcctcaggagagttgctggcacaccctgtggagtgtttggccagcgcttggatgagactgtggcctatgaacagaaattcggcccccatctggtgcccatcctggtggagaaatgtgcagagttcatcctggagcacggccggaatgaagagggcatcttccgtctgcctgggcaggacaacctggtgaagcagctgagagacgcttttgatgctggggagcggccctcctttgacagagacacagatgtgcacactgtggcttccctgttaaagctctacctccgagacctcccagagcccgtggttccctggagccagtacgaagggttcctgctctgtgggcagctcacgaatgcggatgaggcaaaggctcagcaggagttgatgaagcagctctccatccttcctcgtgacaactatagtctcctgagctacatctgcaggttcctacatgaaatacagctgaactgtgctgttaacaagatgagtgtggacaacctggctactgtgattggtgtgaatctcatcaggtcgaaggtcgaagaccctgccgtgatcatgagagggactcctcagatccaaagagtgatgactatgatgatcagagaccatgaagtcctcttccccaagtccaaggatatacccctgtcaccccctgcccagaaaaatgaccccaagaaagctccagtggcccgaagctctgtaggctgggatgccactgaagacctccgaatttctaggacagacagcttcagtagcatgacaagcgactctgatacaaccagccccaccggacagcagccgagcgatgcgtttccggaggacagcagcaaagtacccagggaaaagccaggagactggaaaatgcaatctcgtaaaaggactcaaacactccctaaccggaaatgtttcttgacatcagcttttcagggtgccaacagcagcaaaatggagatctttaaaaatgaattctggtcgccttcctcagaggctaaggcaggggaagggcacaggagaacgatgtctcaagacttgcgccaactttctgactcccaacggacttccacctacgataacgtcccttccctgccagggtcccctggggaggaagccagtgcactctcttcccaagcctgtgactccaagggagatactcttgccagtccaaactctgaaactgggcctggaaaaaagaactctggagaagaggaaattgattctttgcagaggatggtccaagagctacgaaaggaaatagaaacacagaagcaaatgtatgaggaacagattaaaaaccttgagaaggaaaattatgacgtttgggctaaagtggtgaggctcaatgaagaactggagaaggaaaagaagaagtctgcagccctagagatcagcctccgcaacatggagcgctcccgggaggatgttgagaagaggaacaaggccttggaagaagaagtcaaggaatttgtcaaatccatgaaggaacccaagaccgaggcttaagggtcccaggagtactgcagggacagccccagagaggcccaactctggcccctttctcagtgctatctgatgacggggaaacaaaattattctctgagagggaaaggacatttgagggaaacatcaaatttccccataaataaatgaatggagtttgcaggaaggtgagggtgagcagagatgtgtgtggacatctctgaccatccatcgctgtattcaaatggattgttttattccattctggtctcaggcatgaccacgtccagtgaagacatttgaggcagcacatctcaggacccaggcaatagactggccccaactcaggctggactaaggtgtgattaattctttgttttttgtgtggaacagctcaccttgtcagacagcctcagggcatctctgagacacaggggcagaaaatgacattcatcttttgagtcctcatccatggagtgctgtgtttggggggctgcatctgctgaagcgagaaccccattctgccaccccaccaggatgcccattctccaggacttctccaacttactattagactaaaccagaacaagcaacaaactgtatttatgcaagcaaaattgatgagaaaattatattcaaataaagc

SEQ ID NO: 26260 - DNA, 2936 bp, Homo sapiens
  source 1..2936: mol_type = unassigned DNA
ccgagccttcagagtgaggcattattttctcctctctcttgtcagatactgactcccacgcaggaaaaaggaagcaccttttgtcagatgctgtggccacttcctcttcagaaggctccagccaacctttcggtttgcagaatgacggggcccgccgcggtgccggactgcctgtgcacggggccaccgactgcagcctgggttttattcttggcctggccctgaccgggagctggcccctcggctgcttctctggctcgggggggactttctctggctcagatccggacccctgaactggacctggttgtcgtccccccgcttctcagccccctctggggttcctctctcctctccgcccactctttgctcactgccccatgtccctcggtcagtcggcctgtctgttcctctctatagctcggtcaaggagtgtgatgactggcgagcagatggctgccttccatccatcgtccacccccaacccgctggagaggcccatcaagatgggctggctgaagaagcagaggtccatcgtgaagaactggcagcagaggtactttgtgctgagggcgcagcagctctactactacaaggatgaagaggacacgaagccccagggctgcatgtatctaccaggatgtacaatcaaggagatcgccacaaacccagaagaagctgggaagtttgtctttgaaatcattccagcctcatgggaccagaatcgcatgggacaggactcctatgtcctcatggccagctctcaggcggagatggaggagtgggttaaattcctcaggagagttgctggcacaccctgtggagtgtttggccagcgcttggatgagactgtggcctatgaacagaaattcggcccccatctggtgcccatcctggtggagaaatgtgcagagttcatcctggagcacggccggaatgaagagggcatcttccgtctgcctgggcaggacaacctggtgaagcagctgagagacgcttttgatgctggggagcggccctcctttgacagagacacagatgtgcacactgtggcttccctgttaaagctctacctccgagacctcccagagcccgtggttccctggagccagtacgaagggttcctgctctgtgggcagctcacgaatgcggatgaggcaaaggctcagcaggagttgatgaagcagctctccatccttcctcgtgacaactatagtctcctgagctacatctgcaggttcctacatgaaatacagctgaactgtgctgttaacaagatgagtgtggacaacctggctactgtgattggtgtgaatctcatcaggtcgaaggtcgaagaccctgccgtgatcatgagagggactcctcagatccaaagagtgatgactatgatgatcagagaccatgaagtcctcttccccaagtccaaggatatacccctgtcaccccctgcccagaaaaatgaccccaagaaagctccagtggcccgaagctctgtaggctgggatgccactgaagacctccgaatttctaggacagacagcttcagtagcatgacaagcgactctgatacaaccagccccaccggacagcagccgagcgatgcgtttccggaggacagcagcaaagtacccagggaaaagccaggagactggaaaatgcaatctcgtaaaaggactcaaacactccctaaccggaaatgtttcttgacatcagcttttcagggtgccaacagcagcaaaatggagatctttaaaaatgaattctggtcgccttcctcagaggctaaggcaggggaagggcacaggagaacgatgtctcaagacttgcgccaactttctgactcccaacggacttccacctacgataacgtcccttccctgccagggtcccctggggaggaagccagtgcactctcttcccaagcctgtgactccaagggagatactcttgccagtccaaactctgaaactgggcctggaaaaaagaactctggagaagaggaaattgattctttgcagaggatggtccaagagctacgaaaggaaatagaaacacagaagcaaatgtatgaggaacagattaaaaaccttgagaaggaaaattatgacgtttgggctaaagtggtgaggctcaatgaagaactggagaaggaaaagaagaagtctgcagccctagagatcagcctccgcaacatggagcgctcccgggaggatgttgagaagaggaacaaggccttggaagaagaagtcaaggaatttgtcaaatccatgaaggaacccaagaccgaggcttaagggtcccaggagtactgcagggacagccccagagaggcccaactctggcccctttctcagtgctatctgatgacggggaaacaaaattattctctgagagggaaaggacatttgagggaaacatcaaatttccccataaataaatgaatggagtttgcaggaaggtgagggtgagcagagatgtgtgtggacatctctgaccatccatcgctgtattcaaatggattgttttattccattctggtctcaggcatgaccacgtccagtgaagacatttgaggcagcacatctcaggacccaggcaatagactggccccaactcaggctggactaaggtgtgattaattctttgttttttgtgtggaacagctcaccttgtcagacagcctcagggcatctctgagacacaggggcagaaaatgacattcatcttttgagtcctcatccatggagtgctgtgtttggggggctgcatctgctgaagcgagaaccccattctgccaccccaccaggatgcccattctccaggacttctccaacttactattagactaaaccagaacaagcaacaaactgtatttatgcaagcaaaattgatgagaaaattatattcaaataaagcaaaaattaaaaaaaaaa

SEQ ID NO: 26261 - DNA, 2945 bp, Homo sapiens
  source 1..2945: mol_type = unassigned DNA
agtaaggcctgagattctttcgaaaaggagctttgcttcccatgacgcagagggaagtgtcaactgggatatttctggtaaaactgaaagcaagaaaagcagggtgctagcccctgtgggactgagggtggaggctgggggagtttgggtgccatcctccagtgacagatggatggacctttcatctaagagaaaggaggagacacgttggcaaatcagcctcaagcctaagattgcttgtgaagcaatcataaggaggaacaaaaacagacacaaaaacagagggaaagagtgaaaagacaagaagggcgcaaactgtgacagactcaccgcttcactaactactcacttaaactggaagcaaaatgtccctaaaattgccaaggaactgggatttcaacctgaaagtggaggctgcgaaaatagctcggtcaaggagtgtgatgactggcgagcagatggctgccttccatccatcgtccacccccaacccgctggagaggcccatcaagatgggctggctgaagaagcagaggtccatcgtgaagaactggcagcagaggtactttgtgctgagggcgcagcagctctactactacaaggatgaagaggacacgaagccccagggctgcatgtatctaccaggatgtacaatcaaggagatcgccacaaacccagaagaagctgggaagtttgtctttgaaatcattccagcctcatgggaccagaatcgcatgggacaggactcctatgtcctcatggccagctctcaggcggagatggaggagtgggttaaattcctcaggagagttgctggcacaccctgtggagcagtgtttggccagcgcttggatgagactgtggcctatgaacagaaattcggcccccatctggtgcccatcctggtggagaaatgtgcagagttcatcctggagcacggccggaatgaagagggcatcttccgtctgcctgggcaggacaacctggtgaagcagctgagagacgcttttgatgctggggagcggccctcctttgacagagacacagatgtgcacactgtggcttccctgttaaagctctacctccgagacctcccagagcccgtggttccctggagccagtacgaagggttcctgctctgtgggcagctcacgaatgcggatgaggcaaaggctcagcaggagttgatgaagcagctctccatccttcctcgtgacaactatagtctcctgagctacatctgcaggttcctacatgaaatacagctgaactgtgctgttaacaagatgagtgtggacaacctggctactgtgattggtgtgaatctcatcaggtcgaaggtcgaagaccctgccgtgatcatgagagggactcctcagatccaaagagtgatgactatgatgatcagagaccatgaagtcctcttccccaagtccaaggatatacccctgtcaccccctgcccagaaaaatgaccccaagaaagctccagtggcccgaagctctgtaggctgggatgccactgaagacctccgaatttctaggacagacagcttcagtagcatgacaagcgactctgatacaaccagccccaccggacagcagccgagcgatgcgtttccggaggacagcagcaaagtacccagggaaaagccaggagactggaaaatgcaatctcgtaaaaggactcaaacactccctaaccggaaatgtttcttgacatcagcttttcagggtgccaacagcagcaaaatggagatctttaaaaatgaattctggtcgccttcctcagaggctaaggcaggggaagggcacaggagaacgatgtctcaagacttgcgccaactttctgactcccaacggacttccacctacgataacgtcccttccctgccagggtcccctggggaggaagccagtgcactctcttcccaagcctgtgactccaagggagatactcttgccagtccaaactctgaaactgggcctggaaaaaagaactctggagaagaggaaattgattctttgcagaggatggtccaagagctacgaaaggaaatagaaacacagaagcaaatgtatgaggaacagattaaaaaccttgagaaggaaaattatgacgtttgggctaaagtggtgaggctcaatgaagaactggagaaggaaaagaagaagtctgcagccctagagatcagcctccgcaacatggagcgctcccgggaggatgttgagaagaggaacaaggccttggaagaagaagtcaaggaatttgtcaaatccatgaaggaacccaagaccgaggcttaagggtcccaggagtactgcagggacagccccagagaggcccaactctggcccctttctcagtgctatctgatgacggggaaacaaaattattctctgagagggaaaggacatttgagggaaacatcaaatttccccataaataaatgaatggagtttgcaggaaggtgagggtgagcagagatgtgtgtggacatctctgaccatccatcgctgtattcaaatggattgttttattccattctggtctcaggcatgaccacgtccagtgaagacatttgaggcagcacatctcaggacccaggcaatagactggccccaactcaggctggactaaggtgtgattaattctttgttttttgtgtggaacagctcaccttgtcagacagcctcagggcatctctgagacacaggggcagaaaatgacattcatcttttgagtcctcatccatggagtgctgtgtttggggggctgcatctgctgaagcgagaaccccattctgccaccccaccaggatgcccattctccaggacttctccaacttactattagactaaaccagaacaagcaacaaactgtatttatgcaagcaaaattgatgagaaaattatattcaaataaagcaaaaattaaaaaaaaaa

SEQ ID NO: 26262 - DNA, 2939 bp, Homo sapiens
  source 1..2939: mol_type = unassigned DNA
ccgagccttcagagtgaggcattattttctcctctctcttgtcagatactgactcccacgcaggaaaaaggaagcaccttttgtcagatgctgtggccacttcctcttcagaaggctccagccaacctttcggtttgcagaatgacggggcccgccgcggtgccggactgcctgtgcacggggccaccgactgcagcctgggttttattcttggcctggccctgaccgggagctggcccctcggctgcttctctggctcgggggggactttctctggctcagatccggacccctgaactggacctggttgtcgtccccccgcttctcagccccctctggggttcctctctcctctccgcccactctttgctcactgccccatgtccctcggtcagtcggcctgtctgttcctctctatagctcggtcaaggagtgtgatgactggcgagcagatggctgccttccatccatcgtccacccccaacccgctggagaggcccatcaagatgggctggctgaagaagcagaggtccatcgtgaagaactggcagcagaggtactttgtgctgagggcgcagcagctctactactacaaggatgaagaggacacgaagccccagggctgcatgtatctaccaggatgtacaatcaaggagatcgccacaaacccagaagaagctgggaagtttgtctttgaaatcattccagcctcatgggaccagaatcgcatgggacaggactcctatgtcctcatggccagctctcaggcggagatggaggagtgggttaaattcctcaggagagttgctggcacaccctgtggagcagtgtttggccagcgcttggatgagactgtggcctatgaacagaaattcggcccccatctggtgcccatcctggtggagaaatgtgcagagttcatcctggagcacggccggaatgaagagggcatcttccgtctgcctgggcaggacaacctggtgaagcagctgagagacgcttttgatgctggggagcggccctcctttgacagagacacagatgtgcacactgtggcttccctgttaaagctctacctccgagacctcccagagcccgtggttccctggagccagtacgaagggttcctgctctgtgggcagctcacgaatgcggatgaggcaaaggctcagcaggagttgatgaagcagctctccatccttcctcgtgacaactatagtctcctgagctacatctgcaggttcctacatgaaatacagctgaactgtgctgttaacaagatgagtgtggacaacctggctactgtgattggtgtgaatctcatcaggtcgaaggtcgaagaccctgccgtgatcatgagagggactcctcagatccaaagagtgatgactatgatgatcagagaccatgaagtcctcttccccaagtccaaggatatacccctgtcaccccctgcccagaaaaatgaccccaagaaagctccagtggcccgaagctctgtaggctgggatgccactgaagacctccgaatttctaggacagacagcttcagtagcatgacaagcgactctgatacaaccagccccaccggacagcagccgagcgatgcgtttccggaggacagcagcaaagtacccagggaaaagccaggagactggaaaatgcaatctcgtaaaaggactcaaacactccctaaccggaaatgtttcttgacatcagcttttcagggtgccaacagcagcaaaatggagatctttaaaaatgaattctggtcgccttcctcagaggctaaggcaggggaagggcacaggagaacgatgtctcaagacttgcgccaactttctgactcccaacggacttccacctacgataacgtcccttccctgccagggtcccctggggaggaagccagtgcactctcttcccaagcctgtgactccaagggagatactcttgccagtccaaactctgaaactgggcctggaaaaaagaactctggagaagaggaaattgattctttgcagaggatggtccaagagctacgaaaggaaatagaaacacagaagcaaatgtatgaggaacagattaaaaaccttgagaaggaaaattatgacgtttgggctaaagtggtgaggctcaatgaagaactggagaaggaaaagaagaagtctgcagccctagagatcagcctccgcaacatggagcgctcccgggaggatgttgagaagaggaacaaggccttggaagaagaagtcaaggaatttgtcaaatccatgaaggaacccaagaccgaggcttaagggtcccaggagtactgcagggacagccccagagaggcccaactctggcccctttctcagtgctatctgatgacggggaaacaaaattattctctgagagggaaaggacatttgagggaaacatcaaatttccccataaataaatgaatggagtttgcaggaaggtgagggtgagcagagatgtgtgtggacatctctgaccatccatcgctgtattcaaatggattgttttattccattctggtctcaggcatgaccacgtccagtgaagacatttgaggcagcacatctcaggacccaggcaatagactggccccaactcaggctggactaaggtgtgattaattctttgttttttgtgtggaacagctcaccttgtcagacagcctcagggcatctctgagacacaggggcagaaaatgacattcatcttttgagtcctcatccatggagtgctgtgtttggggggctgcatctgctgaagcgagaaccccattctgccaccccaccaggatgcccattctccaggacttctccaacttactattagactaaaccagaacaagcaacaaactgtatttatgcaagcaaaattgatgagaaaattatattcaaataaagcaaaaattaaaaaaaaaa

SEQ ID NO: 26263 - DNA, 1227 bp, Homo sapiens
  source 1..1227: mol_type = unassigned DNA
gtttacctaagctagcctgggcaatggcgggcgcccctcccccagcttctctgcggccttgcagtttgatctcagactgctgtgctagcaatcagcgagactccgcgggcgtaggaccctccgagccagagtctcctgcaatgattcagacttggctttactggcttcttccatagataagcaccagcctaggagctctcaaagttgttccagctaaaggacacactcagcttttggtctacagtgacttccagcctaagtggctctggacactgctggaaccccccgctccatctccctccataaatatgtctctgcagcagctcggtcaaggagtgtgatgactggcgagcagatggctgccttccatccatcgtccacccccaacccgctggagaggcccatcaagatgggctggctgaagaagcagaggtccatcgtgaagaactggcagcagaggtactttgtgctgagggcgcagcagctctactactacaaggatgaagaggacacgaagccccagggctgcatgtatctaccaggatgtacaatcaaggagatcgccacaaacccagaagaagctgggaagtttgtctttgaaatcattccagcctcatgggaccagaatcgcatgggacaggactcctatgtcctcatggccagctctcaggcggagatggaggagtgggttaaattcctcaggagagttgctggcacaccctgtggagcagtgtttggccagcgcttggatgagactgtggcctatgaacagaaattcggcccccatctggtgcccatcctggtggagaaatgtgcagagttcatcctggagcacggccggaatgaagagggcatcttccgtctgcctgggcaggacaacctggtgaagcagctgagagacgcttttgatgctggggagcggccctcctttgacagagacacagatgtgcacactgtggcttccctgttaaagctctacctccgagacctcccagagcccgtggttccctggagccagtacgaagggttcctgctctgtgggcagctcacgaatgcggatgaggcaaagaactacaggaacaggaatgactgccaaagtgttgtttctgcacagatacaccaattctgtcccagggtctccttgctggcacatgggcaggctcatttactggtaaatgatttacttgtgtaaatctcttcccaggctcagcaggagttgatgaagca

SEQ ID NO: 26264 - DNA, 2156 bp, Homo sapiens
  source 1..2156: mol_type = unassigned DNA
ccgagccttcagagtgaggcattattttctcctctctcttgtcagatactgactcccacgcaggaaaaaggaagcaccttttgtcagatgctgtggccacttcctcttcagaaggctccagccaacctttcggtttgcagaatgacggggcccgccgcggtgccggactgcctgtgcacggggccaccgactgcagcctgggttttattcttggcctggccctgaccgggagctggcccctcggctgcttctctggctcgggggggactttctctggctcagatccggacccctgaactggacctggttgtcgtccccccgcttctcagccccctctggggttcctctctcctctccgcccactctttgctcactgccccatgtccctcggtcagtcggcctgtctgttcctctctatagctcggtcaaggagtgtgatgactggcgagcagatggctgccttccatccatcgtccacccccaacccgctggagaggcccatcaagatgggctggctgaagaagcagaggtccatcgtgaagaactggcagcagaggtactttgtgctgagggcgcagcagctctactactacaaggatgaagaggacacgaagccccagggctgcatgtatctaccaggatgtacaatcaaggagatcgccacaaacccagaagaagctgggaagtttgtctttgaaatcattccagcctcatgggaccagaatcgcatgggacaggactcctatgtcctcatggccagctctcaggcggagatggaggagtgggttaaattcctcaggagagttgctggcacaccctgtggagcagtgtttggccagcgcttggatgagactgtggcctatgaacagaaattcggcccccatctggtgcccatcctggtggagaaatgtgcagagttcatcctggagcacggccggaatgaagagggcatcttccgtctgcctgggcaggacaacctggtgaagcagctgagagacgcttttgatgctggggagcggccctcctttgacagagacacagatgtgcacactgtggcttccctgttaaagctctacctccgagacctcccagagcccgtggttccctggagccagtacgaagggttcctgctctgtgggcagctcacgaatgcggatgaggcaaaggctcagcaggagttgatgaagcagctctccatccttcctcgtgacaactatagtctcctgagctacatctgcaggttcctacatgaaatacagctgaactgtgctgttaacaagatgagtgtggacaacctggctactgtgattggtgtgaatctcatcaggtcgaaggtcgaagaccctgccgtgatcatgagagggactcctcagatccaaagagtgatgactatgatgatcagagaccatgaagtcctcttccccaagtccaaggatatacccctgtcaccccctgcccagaaaaatgaccccaagaaagctccagtggcccgaagctctgtaggctgggatgccactgaagacctccgaatttctaggacagacagcttcagtagcatgacaagcgactctgatacaaccagccccaccggacagcagccgagcgatgcgtttccggaggacagcagcaaagtacccagggaaaagccaggagactggaaaatgcaatctcgtaaaaggactcaaacactccctaaccggaaatgtttcttgacatcagcttttcagggtgccaacagcagcaaaatggagatctttaaaaatgaattctggtcgccttcctcagaggctaaggcaggggaagggcacaggagaacgatgtctcaagacttgcgccaactttctgactcccaacggacttccacctacgataacgtcccttccctgccagggtcccctggggaggaagccagtgcactctcttcccaagcctgtgactccaagggagatactcttgccagtccaaactctgaaactgggcctggaaaaaagaactctggagaagaggaaattgattctttgcagaggatggtccaagagctacgaaaggaaatagaaacacagaagcaaatgtatgaggaacagattaaaaaccttgagaaggaaaattatgacgtttgggctaaagtggtgaggccctttctcagtgctatctga

SEQ ID NO: 26265 - DNA, 1843 bp, Homo sapiens
  source 1..1843: mol_type = unassigned DNA
gaatgacggggcccgccgcggtgccggactgcctgtgcacggggccaccgactgcagcctgggttttattcttggcctggccctgaccgggagctggcccctcggctgcttctctggctcgggggggactttctctggctcagatccggacccctgaactggacctggttgtcgtccccccgcttctcagccccctctggggttcctctctcctctccgcccactctttgctcactgccccatgtccctcggtcagtcggcctgtctgttcctctctatagctcggtcaaggagtgtgatgactggcgagcagatggctgccttccatccatcgtccacccccaacccgctggagaggcccatcaagatgggctggctgaagaagcagaggtccatcgtgaagaactggcagcagaggtactttgtgctgagggcgcagcagctctactactacaaggatgaagaggacacgaagccccagggctgcatgtatctaccaggatgtacaatcaaggagatcgccacaaacccagaagaagctgggaagtttgtctttgaaatcattccagcctcatgggaccagaatcgcatgggacaggactcctatgtcctcatggccagctctcaggcggagatggaggagtgggttaaattcctcaggagagttgctggcacaccctgtggagcagtgtttggccagcgcttggatgagactgtggcctatgaacagaaattcggcccccatctggtgcccatcctggtggagaaatgtgcagagttcatcctggagcacggccggaatgaagagggcatcttccgtctgcctgggcaggacaacctggtgaagcagctgagagacgcttttgatgctggggagcggccctcctttgacagagacacagatgtgcacactgtggcttccctgttaaagctctacctccgagacctcccagagcccgtggttccctggagccagtacgaagggttcctgctctgtgggcagctcacgaatgcggatgaggcaaaggctcagcaggagttgatgaagcagctctccatccttcctcgtgacaactatagtctcctgagctacatctgcaggttcctacatgaaatacagctgaactgtgctgttaacaagatgagtgtggacaacctggctactgtgattggtgtgaatctcatcaggtcgaaggtcgaagaccctgccgtgatcatgagagggactcctcagatccaaagagtgatgactatgatgatcagagaccatgaagtcctcttccccaagtccaaggatatacccctgtcaccccctgcccagaaaaatgaccccaagaaagctccagtggcccgaagctctgtaggctgggatgccactgaagacctccgaatttctaggacagacagcttcagtagcatggtaaggtgcagagaaccttcctgcttccattgggttcttcctttagtccaggccatcccatgtaaggcctgctctcgggtggcaatttggggagttttaggtgatgcagtggcagtgggcgctgctgctacagactcatctgaacacaccttgaaagcctggcctctttccaaatctagtttctattggcatctttgaggggggtgagtgacaagtgtgccaatcacccagtgactgagcaatgaggtcctcactgaagcccactctgaaagagagactcaaatacagtccagagaagttcagtgggaaaaatgtatacaacattgtaaatgttttggtcagaattgttgaaaattctgggtgaacgtccagagaaaactggtttcctgctaacccatgaaacgtgattcctttctcagagta

SEQ ID NO: 26266 - DNA, 2515 bp, Homo sapiens
  source 1..2515: mol_type = unassigned DNA
atgtccctcggtcagtcggcctgtctgttcctctctatagctcggtcaaggagtgtgatgactggcgagcagatggctgccttccatccatcgtccacccccaacccgctggagaggcccatcaagatgggctggctgaagaagcagaggtccatcgtgaagaactggcagcagagctactactacaaggatgaagaggacacgaagccccagggctgcatgtatctaccaggatgtacaatcaaggagatcgccacaaacccagaagaagctgggaagtttgtctttgaaatcattccagcctcatgggaccagaatcgcatgggacaggactcctatgtcctcatggccagctctcaggcggagatggaggagtgggttaaattcctcaggagagttgctggcacaccctgtggagcagtgtttggccagcgcttggatgagactgtggcctatgaacagaaattcggcccccatctggtgcccatcctggtggagaaatgtgcagagttcatcctggagcacggccggaatgaagagggcatcttccgtctgcctgggcaggacaacctggtgaagcagctgagagacgcttttgatgctggggagcggccctcctttgacagagacacagatgtgcacactgtggcttccctgttaaagctctacctccgagacctcccagagcccgtggttccctggagccagtacgaagggttcctgctctgtgggcagctcacgaatgcggatgaggcaaaggctcagcaggagttgatgaagcagctctccatccttcctcgtgacaactatagtctcctgagctacatctgcaggttcctacatgaaatacagctgaactgtgctgttaacaagatgagtgtggacaacctggctactgtgattggtgtgaatctcatcaggtcgaaggtcgaagaccctgccgtgatcatgagagggactcctcagatccaaagagtgatgactatgatgatcagagaccatgaagtcctcttccccaagtccaaggatatacccctgtcaccccctgcccagaaaaatgaccccaagaaagctccagtggcccgaagctctgtaggctgggatgccactgaagacctccgaatttctaggacagacagcttcagtagcatgacaagcgactctgatacaaccagccccaccggacagcagccgagcgatgcgtttccggaggacagcagcaaagtacccagggaaaagccaggagactggaaaatgcaatctcgtaaaaggactcaaacactccctaaccggaaatgtttcttgacatcagcttttcagggtgccaacagcagcaaaatggagatctttaaaaatgaattctggtcgccttcctcagaggctaaggcaggggaagggcacaggagaacgatgtctcaagacttgcgccaactttctgactcccaacggacttccacctacgataacgtcccttccctgccagggtcccctggggaggaagccagtgcactctcttcccaagcctgtgactccaagggagatactcttgccagtccaaactctgaaactgggcctggaaaaaagaactctggagaagaggaaattgattctttgcagaggatggtccaagagctacgaaaggaaatagaaacacagaagcaaatgtatgaggaacagattaaaaaccttgagaaggaaaattatgacgtttgggctaaagtggtgaggctcaatgaagaactggagaaggaaaagaagaagtctgcagccctagagatcagcctccgcaacatggagcgctcccgggaggatgttgagaagaggaacaaggccttggaagaagaagtcaaggaatttgtcaaatccatgaaggaacccaagaccgaggcttaagggtcccaggagtactgcagggacagccccagagaggcccaactctggcccctttctcagtgctatctgatgacggggaaacaaaattattctctgagagggaaaggacatttgagggaaacatcaaatttccccataaataaatgaatggagtttgcaggaaggtgagggtgagcagagatgtgtgtggacatctctgaccatccatcgctgtattcaaatggattgttttattccattctggtctcaggcatgaccacgtccagtgaagacatttgaggcagcacatctcaggacccaggcaatagactggccccaactcaggctggactaaggtgtgattaattctttgttttttgtgtggaacagctcaccttgtcagacagcctcagggcatctctgagacacaggggcagaaaatgacattcatcttttgagtcctcatccatggagtgctgtgtttggggggctgcatctgctgaagcgagaaccccattctgccaccccaccaggatgcccattctccaggacttctccaacttactattagactaaaccagaacaagcaacaaactgtatttatgcaagcaaaattgatgagaaaattatattcaaataaagc

SEQ ID NO: 26267 - DNA, 1101 bp, Homo sapiens
  source 1..1101: mol_type = unassigned DNA
cagagtctcctgcaatgattcagacttggctttactggcttcttccatagataagcaccagcctaggagctctcaaagttgttccagctaaaggacacactcagcttttggtctacagtgacttccagcctaagtggctctggacactgctggaaccccccgctccatctccctccataaatatgtctctgcagcagctcggtcaaggagtgtgatgactggcgagcagatggctgccttccatccatcgtccacccccaacccgctggagaggcccatcaagatgggctggctgaagaagcagaggtccatcgtgaagaactggcagcagaggtactttgtgctgagggcgcagcagctctactactacaaggatgaagaggacacgaagccccagggctgcatgtatctaccaggatgtacaatcaaggagatcgccacaaacccagaagaagctgggaagtttgtctttgaaatcattccagcctcatgggaccagaatcgcatgggacaggactcctatgtcctcatggccagctctcaggcggagatggaggagtgggttaaattcctcaggagagttgctggcacaccctgtggagcagtgtttggccagcgcttggatgagactgtggcctatgaacagaaattcggcccccatctggtgcccatcctggtggagaaatgtgcagagttcatcctggagcacggccggaatgaagagggcatcttccgtctgcctgggcaggacaacctggtgaagcagctgagagacgcttttgatgctggggagcggccctcctttgacagagacacagatgtgcacactgtggcttccctgttaaagctctacctccgagacctcccagagcccgtggttccctggagccagtacgaagggttcctgctctgtgggcagctcacgaatgcggatgaggcaaagaactacaggaacaggaatgactgccaaagtgttgtttctgcacagatacaccaattctgtcccagggtctccttgctggcacatgggcaggctcatttactggtaaatgatttacttgtgtaaatctcttcccaggctcagcaggagttgatgaagca

SEQ ID NO: 26268 - DNA, 2247 bp, Homo sapiens
  source 1..2247: mol_type = unassigned DNA
cagagggaagtgtcaactgggatatttctggtaaaactgaaagcaagaaaagcagggtgctagcccctgtgggactgagggtggaggctgggggagtttgggtgccatcctccagtgacagatggatggacctttcatctaagagaaaggaggagacacgttggcaaatcagcctcaagcctaagattgcttgtgaagcaatcataaggaggaacaaaaacagacacaaaaacagagggaaagagtgaaaagacaagaagggcgcaaactgtgacagactcaccgcttcactaactactcacttaaactggaagcaaaatgtccctaaaattgccaaggaactgggatttcaacctgaaagtggaggctgcgaaaatagctcggtcaaggagtgtgatgactggcgagcagatggctgccttccatccatcgtccacccccaacccgctggagaggcccatcaagatgggctggctgaagaagcagaggtccatcgtgaagaactggcagcagaggtactttgtgctgagggcgcagcagctctactactacaaggatgaagaggacacgaagccccagggctgcatgtatctaccaggatgtacaatcaaggagatcgccacaaacccagaagaagctgggaagtttgtctttgaaatcattccagtgtttggccagcgcttggatgagactgtggcctatgaacagaaattcggcccccatctggtgcccatcctggtggagaaatgtgcagagttcatcctggagcacggccggaatgaagagggcatcttccgtctgcctgggcaggacaacctggtgaagcagctgagagacgcttttgatgctggggagcggccctcctttgacagagacacagatgtgcacactgtggcttccctgttaaagctctacctccgagacctcccagagcccgtggttccctggagccagtacgaagggttcctgctctgtgggcagctcacgaatgcggatgaggcaaaggctcagcaggagttgatgaagcagctctccatccttcctcgtgacaactatagtctcctgagctacatctgcaggttcctacatgaaatacagctgaactgtgctgttaacaagatgagtgtggacaacctggctactgtgattggtgtgaatctcatcaggtcgaaggtcgaagaccctgccgtgatcatgagagggactcctcagatccaaagagtgatgactatgatgatcagagaccatgaagtcctcttccccaagtccaaggatatacccctgtcaccccctgcccagaaaaatgaccccaagaaagctccagtggcccgaagctctgtaggctgggatgccactgaagacctccgaatttctaggacagacagcttcagtagcatgacaagcgactctgatacaaccagccccaccggacagcagccgagcgatgcgtttccggaggacagcagcaaagtacccagggaaaagccaggagactggaaaatgcaatctcgtaaaaggactcaaacactccctaaccggaaatgtttcttgacatcagcttttcagggtgccaacagcagcaaaatggagatctttaaaaatgaattctggtcgccttcctcagaggctaaggcaggggaagggcacaggagaacgatgtctcaagacttgcgccaactttctgactcccaacggacttccacctacgataacgtcccttccctgccagggtcccctggggaggaagccagtgcactctcttcccaagcctgtgactccaagggagatactcttgccagtccaaactctgaaactgggcctggaaaaaagaactctggagaagaggaaattgattctttgcagaggatggtccaagagctacgaaaggaaatagaaacacagaagcaaatgtatgaggaacagattaaaaaccttgagaaggaaaattatgacgtttgggctaaagtggtgaggctcaatgaagaactggagaaggaaaagaagaagtctgcagccctagagatcagcctccgcaacatggagcgctcccgggaggatgttgagaagaggaacaaggccttggaagaagaagtcaaggaatttgtcaaatccatgaaggaacccaagaccgaggcttaagggtcccaggagtactgcagggacagccccagagaggcccaactctggcccctttctcagtgctatctgatgacggggaaacaaaattattctctgagagggaaagga

SEQ ID NO: 26269 - DNA, 6862 bp, Homo sapiens
  source 1..6862: mol_type = unassigned DNA
ggcggggcggccgaggctgctgtgagagggcgctcgaggctgccgagagctagctagcgaaggaggcggggaggcggcgtctgcactcgctcgcccgctcgctcgcttcccggcgccgctgcgggtccgcgctgcgtttcctgctcgcgatccgctccgttgcccgcgcccggaacagcagcacctcggccgggtccgagctcggttcgggagtcttgcgcgccggcggacaccgcgcgcggagtgagccagcgccacacctgtggagccggcggccgtcgggggagccggccggggtcccgccgcgtgagtgctctgggcggcgggcggcccgggccccggcggaggcgcgccccccggctgggcgccgcgcgcaccatggggctcccagcgctcgagttcagcgactgctgcctcgatagtccgcacttccgagagacgctcaagtcgcacgaagcagagctggacaagaccaacaaattcatcaaggagctcatcaaggacgggaagtcactcataagcgcgctcaagaatttgtcttcagcgaagcggaagtttgcagattccttaaatgaatttaaatttcagtgcataggagatgcagaaacagatgatgagatgtgtatagcaagatctttgcaggagtttgccactgtcctcaggaatcttgaagatgaacggatacggatgattgagaatgccagcgaggtgctcatcactcccttggagaagtttcgaaaggaacagatcggggctgccaaggaagccaaaaagaagtatgacaaagagacagaaaagtattgtggcatcttagaaaaacacttgaatttgtcttccaaaaagaaagaatctcagcttcaggaggcagacagccaagtggacctggtccggcagcatttctatgaagtatccctggaatatgtcttcaaggtgcaggaagtccaagagagaaagatgtttgagtttgtggagcctctgctggccttcctgcaaggactcttcactttctatcaccatggttacgaactggccaaggatttcggggacttcaagacacagttaaccattagcatacagaacacaagaaatcgctttgaaggcactagatcagaagtggaatcactgatgaaaaagatgaaggagaatccccttgagcacaagaccatcagtccctacaccatggagggatacctctacgtgcaggagaaacgtcactttggaacttcttgggtgaagcactactgtacatatcaacgggattccaaacaaatcaccatggtaccatttgaccaaaagtcaggaggaaaagggggagaagatgaatcagttatcctcaaatcctgcacacggcggaaaacagactccattgagaagaggttttgctttgatgtggaagcagtagacaggccaggggttatcaccatgcaagctttgtcggaagaggaccggaggctctggatggaagccatggatggccgggaacctgtctacaactcgaacaaagacagccagagtgaagggactgcgcagttggacagcattggcttcagcataatcaggaaatgcatccatgctgtggaaaccagagggatcaacgagcaagggctgtatcgaattgtgggtgtcaactccagagtgcagaagttgctgagtgtcctgatggaccccaagactgcttctgagacagaaacagatatctgtgctgaatgggagataaagaccatcactagtgctctgaagacctacctaagaatgcttccaggaccactcatgatgtaccagtttcaaagaagtttcatcaaagcagcaaaactggagaaccaggagtctcgggtctctgaaatccacagccttgttcatcggctcccagagaaaaatcggcagatgttacagctgctcatgaaccacttggcaaatgttgctaacaaccacaagcagaatttgatgacggtggcaaaccttggtgtggtgtttggacccactctgctgaggcctcaggaagaaacagtagcagccatcatggacatcaaatttcagaacattgtcattgagatcctaatagaaaaccacgaaaagatatttaacaccgtgcccgatatgcctctcaccaatgcccagctgcacctgtctcggaagaagagcagtgactccaagcccccgtcctgcagcgagaggcccctgacgctcttccacaccgttcagtcaacagagaaacaggaacaaaggaacagcatcatcaactccagtttggaatctgtctcatcaaatccaaacagcatccttaattccagcagcagcttacagcccaacatgaactccagtgacccagacctggctgtggtcaaacccacccggcccaactcactccccccgaatccaagcccaacttcacccctctcgccatcttggcccatgttctcggcgccatccagccctatgcccacctcatccacgtccagcgactcatcccccgtcaggtctgttgcagggtttgtttggttttctgttgctgccgttgttctctcattggctcggtcctctcttcatgcagtgttcagcctcctcgtcaactttgttccctgccatccaaacctgcacttgctttttgacaggccagaagaagcggtacatgaagactccagcacaccgttccggaaggcaaaagccttgtatgcctgcaaagctgaacatgactcagaactttcgttcacagcaggcacggtcttcgataacgttcacccatctcaggagcctggctggttggaggggactctgaacggaaagactggcctcatccctgagaattacgtggagttcctctaaccgtgggccccagcagaactgctgagctttacatggtatccatgacaactgctgattccagtgtcgaggccatttctctttgccactgagaaatgcagcgtgactgactctgttgctacctgtcaacatgaatgtttctgtgagctctggtgtcactcatctccatgatcatctcagccaacatgcatcagtactgcaagaaaagaagtcaatcagcagaggagagcatttgataactaagaggaagacttgcaaagccgttttctcatgagtaccctgaatagggggcactcattttgtttcaacggtccaaacgcccaaccttcagaaagaggaagtcagatagaaatagtccctgagagcacactgtgtagctaagcctgctggggctgggtgaagaaattggcgctgagatccaggctggatccattgcttttgtttacaataggcactctctctaccccacctctcagtacttgagacttaaagtgctacaggcagctggatctgtttgcatgcaggatgaagagggttaaaacactgtttatataagatccaatctctcaccatctctaaagcagccgttggcctgtcatcagtgagatacaatccagtcttctcatgcacgggaacacacacaccctgcgtttctccctcccaggctaggaacctctctgccaccaagggctgccatccatcgcctagtaaccacggcaacccaacctactctaaaaccaaaccaaaaaaataaaataacacatcctctttgcatgacacattttttttctcccctttttggtacactttttttgaatggttttctaacaacttgaagcacaggatcaaggaattagggtggtctacttgaggcagatgggatagtagctgggaactgttccctttctgattaatttcagcagcatcggaatatatttggagcacaccctagtaacctcttgagattaaattacatagtcttaatatttctgttcctccatgcaactgatgtttgttttttaaagggtaagatgctgcctcccaatgggtgatgccatctgactggtttccccatgtcctcccattcacccatctctgctcccacccttgcctgcctctaacccaccactggccagcccccttgccctactctgggctgctgaacactggtgctgtggtggttttcaaggttaattcctaggctaaccgtatggcctatagtttaaaagcacatctatgttcactgccactctgaaaaagggaattatttctcagtctttcaaggcttgagactaatataggccattgtgattcaggaagaaacccaaggttggagggtgggatgagtaccctctgaaaaagggaatttgctggtgaaaagaggctggatcttgtggaagactgtcttggatggggaagtactacctggagatttcaaattcacttggcctgcaaacaacagagttatccgtatcttccacatgtgaatgtcattgcaagggtgactctagacaaactacaaaccgatggaccgtcaagctccccaggagccccttggatggcagcgttgcttcagagtgtttcctgtttctggaattccttgttagggaactttaaagaagaaaagaaaaacttgaattgtgttgaattactgtatcttttacttttttttttttgaaaagataaacttgtaaatagagtgatttgaaatactatatggcaaagttttatatttgatattctttaagttagttgctcacacacttaggctttgattgctgaagaagtatgtttaagagggagagaggggaggcaaagctgaagagagtcaaggtcactgtccccgcttcggcctgaaggaaagagaagacatttctatggccttgctctctgctgtcctgttggtgggcacgacacatcagtggtgttcagtctttatgtgtttttaagcatcccttgggctttggatttggagatgggaagagcatctccaggcaatgagtttttcaaagaatgcctacttagtagtaagatgaagctcaggatttaaataagtggggtcaggcattcgagtttttgtctttcttctcaggtgtatttcttggtacccccaagatatcaggccagaaagagatgagtcagttgctgtgctctttacttctttttctccacatcttctgaggctttagaaatgtggacaagctagttttcaaattttgtgtgcgtctgtaagttcttaaagaaccagcttcttagaatgttcagttctcaatgtgctgctgctttcccttctcctaaacattttaaaactcttccctttcacctccaattcccgtgatcccaaaagaagaggaagactccaggaggggtatagattgtgccgtcatagctttacaggtggttttaaagttaacaggggtttgtcatggtgattcactactcagtttatcagctcaaggattatacagctcttttccgggaactcacccaggagcaagcgagacactaccattgaatcagggaatgagaattaagaatggacaggaccaagacagaactcaagaaagccactggggaaaactcgagaagaaagggagtatactagtaggttagatctgtgaacctgaggacaagaagaccttgggaaatggaggcctcaggggatgtgcattcacatactattacgcttctcaaagagagaccaacatcatgcttttaacacatttgatgaggttttttatttgtgtttttgtttgttttttgagatggagtctcactctgtggcccaggctggagtgcagtggcgcaatcttggctcactgcaacctccacctcccaggttcaagtgattctcctgtctcagcctcccaagtagctgggactacaggcatgagccatcacacccagctagttttttgtatttttagtaaagatggggttttgccatgtttgccaggctgatctcgaactcctgacctcaagtgatctgcccacttcagacccccaaagtgctgggattccaggtgtgagccgctgcggccgaccacatttgatgtttgaagttgtaatctgtcccatcataaacttacctggagctcatgtggaggaacagaaggccaagatccttgctttgggggtgcctcacgaagcatccctgtagacatttggccccagcttcactgcttggaagcatgtccctccctcttgagttggctctgatttgaaatcgggagaaacagagctgctgccaatgggatcttttaggtaactccctccctagcttccgtgtgtctgtgcagtgcccatgagctgctgccaatgggatctttcaggtaccccctccccagcttccctgtggctgtgcggtgcccttgacagatggcttctctgtttccctttgcccagccaggctcccctccttcctattagctacaaaactggataaacttcagaatatgagccaatgagtaggaaggaacttgaagactaaagattttactctctcccctatccatgccccctacctctgactctctctgtgtgaacaggaaactttagggcagatgaggagaatgaattggttatcagagtggaagaccatggcccaggatccctgagctttcccagtagcctccagtttcctttgtaagacccagggatcacttagccatagcctgaatcttttaggggtattaaggtcagcctctcactcttccttcaggttactaacaaaatttcgtagctaaagaatgccatggccgggtgcagtggctcacgcctataatcccagcactttgggaggccgaggcgggcggatcacgaggtcaggagattgagaccatcctggctacgacggtgaaaccccgtctctactaaaaatacaaaaaattagccgggtgtggtggcgggcgcctgtagtcccagctactctggaggctgaggcaggagaatggcatgaacccaggaggcagagattgcagtgagccaagatcacgcccctgcactccagcctgggtgacagagccagactccgtctcaaagg

SEQ ID NO: 26270 - DNA, 9200 bp, Homo sapiens
  source 1..9200: mol_type = unassigned DNA
gagagggcgctcgaggctgccgagagctagctagcgaaggaggcggggaggcggcgtctgcactcgctcgcccgctcgctcgcttcccggcgccgctgcgggtccgcgctgcgtttcctgctcgcgatccgctccgttgcccgcgcccggaacagcagcacctcggccgggtccgagctcggttcgggagtcttgcgcgccggcggacaccgcgcgcggagtgagccagcgccacacctgtggagccggcggccgtcgggggagccggccggggtcccgccgcgtgagtgctctgggcggcgggcggcccgggccccggcggaggcgcgccccccggctgggcgccgcgcgcaccatggggctcccagcgctcgagttcagcgactgctgcctcgatagtccgcacttccgagagacgctcaagtcgcacgaagcagagctggacaagaccaacaaattcatcaaggagctcatcaaggacgggaagtcactcataagcgcgctcaagaatttgtcttcagcgaagcggaagtttgcagattccttaaatgaatttaaatttcagtgcataggagatgcagaaacagatgatgagatgtgtatagcaagatctttgcaggagtttgccactgtcctcaggaatcttgaagatgaacggatacggatgattgagaatgccagcgaggtgctcatcactcccttggagaagtttcgaaaggaacagatcggggctgccaaggaagccaaaaagaagtatgacaaagagacagaaaagtattgtggcatcttagaaaaacacttgaatttgtcttccaaaaagaaagaatctcagcttcaggaggcagacagccaagtggacctggtccggcagcatttctatgaagtatccctggaatatgtcttcaaggtgcaggaagtccaagagagaaagatgtttgagtttgtggagcctctgctggccttcctgcaaggactcttcactttctatcaccatggttacgaactggccaaggatttcggggacttcaagacacagttaaccattagcatacagaacacaagaaatcgctttgaaggcactagatcagaagtggaatcactgatgaaaaagatgaaggagaatccccttgagcacaagaccatcagtccctacaccatggagggatacctctacgtgcaggagaaacgtcactttggaacttcttgggtgaagcactactgtacatatcaacgggattccaaacaaatcaccatggtaccatttgaccaaaagtcaggaggaaaagggggagaagatgaatcagttatcctcaaatcctgcacacggcggaaaacagactccattgagaagaggttttgctttgatgtggaagcagtagacaggccaggggttatcaccatgcaagctttgtcggaagaggaccggaggctctggatggaagccatggatggccgggaacctgtctacaactcgaacaaagacagccagagtgaagggactgcgcagttggacagcattggcttcagcataatcaggaaatgcatccatgctgtggaaaccagagggatcaacgagcaagggctgtatcgaattgtgggtgtcaactccagagtgcagaagttgctgagtgtcctgatggaccccaagactgcttctgagacagaaacagatatctgtgctgaatgggagataaagaccatcactagtgctctgaagacctacctaagaatgcttccaggaccactcatgatgtaccagtttcaaagaagtttcatcaaagcagcaaaactggagaaccaggagtctcgggtctctgaaatccacagccttgttcatcggctcccagagaaaaatcggcagatgttacagctgctcatgaaccacttggcaaatgttgctaacaaccacaagcagaatttgatgacggtggcaaaccttggtgtggtgtttggacccactctgctgaggcctcaggaagaaacagtagcagccatcatggacatcaaatttcagaacattgtcattgagatcctaatagaaaaccacgaaaagatatttaacaccgtgcccgatatgcctctcaccaatgcccagctgcacctgtctcggaagaagagcagtgactccaagcccccgtcctgcagcgagaggcccctgacgctcttccacaccgttcagtcaacagagaaacaggaacaaaggaacagcatcatcaactccagtttggaatctgtctcatcaaatccaaacagcatccttaattccagcagcagcttacagcccaacatgaactccagtgacccagacctggctgtggtcaaacccacccggcccaactcactccccccgaatccaagcccaacttcacccctctcgccatcttggcccatgttctcggcgccatccagccctatgcccacctcatccacgtccagcgactcatcccccgtcagcacaccgttccggaaggcaaaagccttgtatgcctgcaaagctgaacatgactcagaactttcgttcacagcaggcacggtcttcgataacgttcacccatctcaggagcctggctggttggaggggactctgaacggaaagactggcctcatccctgagaattacgtggagttcctctaaccgtgggccccagcagaactgctgagctttacatggtatccatgacaactgctgattccagtgtcgaggccatttctctttgccactgagaaatgcagcgtgactgactctgttgctacctgtcaacatgaatgtttctgtgagctctggtgtcactcatctccatgatcatctcagccaacatgcatcagtactgcaagaaaagaagtcaatcagcagaggagagcatttgataactaagaggaagacttgcaaagccgttttctcatgagtaccctgaatagggggcactcattttgtttcaacggtccaaacgcccaaccttcagaaagaggaagtcagatagaaatagtccctgagagcacactgtgtagctaagcctgctggggctgggtgaagaaattggcgctgagatccaggctggatccattgcttttgtttacaataggcactctctctaccccacctctcagtacttgagacttaaagtgctacaggcagctggatctgtttgcatgcaggatgaagagggttaaaacactgtttatataagatccaatctctcaccatctctaaagcagccgttggcctgtcatcagtgagatacaatccagtcttctcatgcacgggaacacacacaccctgcgtttctccctcccaggctaggaacctctctgccaccaagggctgccatccatcgcctagtaaccacggcaacccaacctactctaaaaccaaaccaaaaaaataaaataacacatcctctttgcatgacacattttttttctcccctttttggtacactttttttgaatggttttctaacaacttgaagcacaggatcaaggaattagggtggtctacttgaggcagatgggatagtagctgggaactgttccctttctgattaatttcagcagcatcggaatatatttggagcacaccctagtaacctcttgagattaaattacatagtcttaatatttctgttcctccatgcaactgatgtttgttttttaaagggtaagatgctgcctcccaatgggtgatgccatctgactggtttccccatgtcctcccattcacccatctctgctcccacccttgcctgcctctaacccaccactggccagcccccttgccctactctgggctgctgaacactggtgctgtggtggttttcaaggttaattcctaggctaaccgtatggcctatagtttaaaagcacatctatgttcactgccactctgaaaaagggaattatttctcagtctttcaaggcttgagactaatataggccattgtgattcaggaagaaacccaaggttggagggtgggatgagtaccctctgaaaaagggaatttgctggtgaaaagaggctggatcttgtggaagactgtcttggatggggaagtactacctggagatttcaaattcacttggcctgcaaacaacagagttatccgtatcttccacatgtgaatgtcattgcaagggtgactctagacaaactacaaaccgatggaccgtcaagctccccaggagccccttggatggcagcgttgcttcagagtgtttcctgtttctggaattccttgttagggaactttaaagaagaaaagaaaaacttgaattgtgttgaattactgtatcttttacttttttttttttgaaaagataaacttgtaaatagagtgatttgaaatactatatggcaaagttttatatttgatattctttaagttagttgctcacacacttaggctttgattgctgaagaagtatgtttaagagggagagaggggaggcaaagctgaagagagtcaaggtcactgtccccgcttcggcctgaaggaaagagaagacatttctatggccttgctctctgctgtcctgttggtgggcacgacacatcagtggtgttcagtctttatgtgtttttaagcatcccttgggctttggatttggagatgggaagagcatctccaggcaatgagtttttcaaagaatgcctacttagtagtaagatgaagctcaggatttaaataagtggggtcaggcattcgagtttttgtctttcttctcaggtgtatttcttggtacccccaagatatcaggccagaaagagatgagtcagttgctgtgctctttacttctttttctccacatcttctgaggctttagaaatgtggacaagctagttttcaaattttgtgtgcgtctgtaagttcttaaagaaccagcttcttagaatgttcagttctcaatgtgctgctgctttcccttctcctaaacattttaaaactcttccctttcacctccaattcccgtgatcccaaaagaagaggaagactccaggaggggtatagattgtgccgtcatagctttacaggtggttttaaagttaacaggggtttgtcatggtgattcactactcagtttatcagctcaaggattatacagctcttttccgggaactcacccaggagcaagcgagacactaccattgaatcagggaatgagaattaagaatggacaggaccaagacagaactcaagaaagccactggggaaaactcgagaagaaagggagtatactagtaggttagatctgtgaacctgaggacaagaagaccttgggaaatggaggcctcaggggatgtgcattcacatactattacgcttctcaaagagagaccaacatcatgcttttaacacatttgatgaggttttttatttgtgtttttgtttgttttttgagatggagtctcactctgtggcccaggctggagtgcagtggcgcaatcttggctcactgcaacctccacctcccaggttcaagtgattctcctgtctcagcctcccaagtagctgggactacaggcatgagccatcacacccagctagttttttgtatttttagtaaagatggggttttgccatgtttgccaggctgatctcgaactcctgacctcaagtgatctgcccacttcagacccccaaagtgctgggattccaggtgtgagccgctgcggccgaccacatttgatgtttgaagttgtaatctgtcccatcataaacttacctggagctcatgtggaggaacagaaggccaagatccttgctttgggggtgcctcacgaagcatccctgtagacatttggccccagcttcactgcttggaagcatgtccctccctcttgagttggctctgatttgaaatcgggagaaacagagctgctgccaatgggatcttttaggtaactccctccctagcttccgtgtgtctgtgcagtgcccatgagctgctgccaatgggatctttcaggtaccccctccccagcttccctgtggctgtgcggtgcccttgacagatggcttctctgtttccctttgcccagccaggctcccctccttcctattagctacaaaactggataaacttcagaatatgagccaatgagtaggaaggaacttgaagactaaagattttactctctcccctatccatgccccctacctctgactctctctgtgtgaacaggaaactttagggcagatgaggagaatgaattggttatcagagtggaagaccatggcccaggatccctgagctttcccagtagcctccagtttcctttgtaagacccagggatcacttagccatagcctgaatcttttaggggtattaaggtcagcctctcactcttccttcaggttactaacaaaatttcgtagctaaagaatgccatggccgggtgcagtggctcacgcctataatcccagcactttgggaggccgaggcgggcggatcacgaggtcaggagattgagaccatcctggctacgacggtgaaaccccgtctctactaaaaatacaaaaaattagccgggtgtggtggcgggcgcctgtagtcccagctactctggaggctgaggcaggagaatggcatgaacccaggaggcagagattgcagtgagccaagatcacgcccctgcactccagcctgggtgacagagccagactccgtctcaaaggaaaaaaaaaaaaaaaaaaaaagaatgccatgccaggagaagacagctggtttcaaatccctgcccccaggcaagtaaaaccctgacttgctcaagacagaagatcttttctcctgtttttcaaaataaacatatatagggatggaccctgtgcattgtggcctgccttggtgtcctagaattggagccagtctttagcttaatgtctgaagtatttatacggccaatatgtgttttcttatgtcagaccacactgtctttttgaatatcagttcatttcctctcaccgagtgcttttcggtgagaggcaaagagaaagaatgaacaatcaagtattgacagactggcattagcaggacagagccatactagtgacaagggcatcccaaggcacttgcccagagctgcagagttgtgtgtgccatacctgcggctcaaagggaaggccttctatcccctgagtttctatcagctgaaaatggcaactgctgtctcagtaaaagctctgtcttgactgcagaggctccaaaagcattcacagttgagggggagaaagacagaaagaagaagccaaagataacctgatccctgcctgtctgttggcacctgtcatcctctggcttctgctcccaaaagcaagtctggatgactgagttttgtggacatggcactcccggagacagcagtggccaccatggcacccagagtttgcccaagtactgaatgttttgtgagcaaccatgttccccaagtaggtagccagcgctgcagaaaccaaacagcctcttagctacctgactttaaaaggaatgacctaggtgttctgccaaaggagttatctatcatctctggcaaacttgacaatcatcacttacctcgacaaccctgccccacatcactttataaagtcagcaggatgtcttctcacccaccctgtgctggtgtctaacaaatttatcttgtcatgctcaaatgtgtttggcagccacaccgatcggctgggtgctgaaccgcctctctgtaattgtagcatcaaaatgacaacagcagcagagcagcgaatcttgcacagccccacagcatgcctgagacaagactccaacaagtaataattagctttttttctcctgccgcctacagtacctgtctaactaaagagcttcccaaagtggagggaaaggccatagaatccaggtgtcattcagagccagtccttgctgaaatgtggtcttccagtggaagcacctgtattattgagaggaaaaagtgttggatgcaaagtaacaccaggactagagagaaagagaaaggtgaaccatcctaaggagctttggatacttttttagaaggataaatattatgcttactgaggagaaaaaaaaaagcgatcacagaaaaatttcacagctaatatttttacaaaagttgtgccagacattacagagtgaaaacgtctctcaaggtggaatgctttagagagcaaaggcttagcatagacctagacccttgtgtgggtatgacatgacatgacatgtccatgtcaaaattcactttagtcagaaccagagtattgataaacaaaatgtcagttacctggagcagtcctggagaggttaagacattctatactgttctacgtcaaccatttctacaaagttgtccagacacctaaaagcagctttcttggttatccagatgccagaatcaaccttgtatctgacaatgcacatctgttgattctaaagtatatttatgtgtgtgtgtatgtgtgtgtatacagcacatatttacatctatgaagacatagacacttacagagacccacatgagctggcactttctgagcctttacagcctttaagactcggaggttgagaattagagacacaagagaggctgtggatggcctattaaaatgattaaagatgtaaattcagtgccattttaaaactgttcatatttatcaaacaattactgtctacagctacattttttgttaacttacttaaagtcatgtcgcaagaaagatcaaacccatgaatgcttagtagctaaggctagtgttcaaaagcactctaaaagacattttgtccacattttggaaaagaaaatatttgcatgtttaattcataatttaggctatctttgagtatactgtaaagtgctgtgtgatataatatcaataaagtacttattaaatggcactttaatgttttcttttaaaataacgcactgttctaaacttcagtattgactattgactcgtgcatagaatccaatgctgtaattagaaagtaatctgtgactagaatagacctttgtccctgttagtagccctgttgccatgttcaggcttttaaaaaatgcttttgtgtcaccaaatatatctataaagaaaacaaaatttctgttcagaggcctctgaaacttggctttcttacatgtggttggtttatgtgacaatccctatgaaatgagtggacgtatgatttttgaattaaatgacttttccatttggtggtatttt

SEQ ID NO: 26271 - DNA, 1632 bp, Homo sapiens
  source 1..1632: mol_type = unassigned DNA
accccaagactgcttctgagacagaaacagatatctgtgctgaatgggagataaagaccatcactagtgctctgaagacctacctaagaatgcttccaggaccactcatgatgtaccagtttcaaagaagtttcatcaaagcagcaaaactggagaaccaggagtctcgggtctctgaaatccacagccttgttcatcggctcccagagaaaaatcggcagatgttacagctgctcatgaaccacttggcaaatgttgctaacaaccacaagcagaatttgatgacggtggcaaaccttggtgtggtgtttggacccactctgctgaggcctcaggaagaaacagtagcagccatcatggacatcaaatttcagaacattgtcattgagatcctaatagaaaaccacgaaaagatatttaacaccgtgcccgatatgcctctcaccaatgcccagctgcacctgtctcggaagaagagcagtgactccaagcccccgtcctgcagcgagaggcccctgacgctcttccacaccgttcagtcaacagagaaacaggaacaaaggaacagcatcatcaactccagtttggaatctgtctcatcaaatccaaacagcatccttaattccagcagcagcttacagcccaacatgaactccagtgacccagacctggctgtggtcaaacccacccggcccaactcactcacaccgttccggaaggcaaaagccttgtatgcctgcaaagctgaacatgactcagaactttcgttcacagcaggcacggtcttcgataacgttcacccatctcaggagcctggctggttggaggggactctgaacggaaagactggcctcatccctgagaattacgtggagttcctctaaccgtgggccccagcagaactgctgagctttacatggtatccatgacaactgctgattccagtgtcgaggccatttctctttgccactgagaaatgcagcgtgactgactctgttgctacctgtcaacatgaatgtttctgtgagctctggtgtcactcatctccatgatcatctcagccaacatgcatcagtactgcaagaaaagaagtcaatcagcagaggagagcatttgataactaagaggaagacttgcaaagccgttttctcatgagtaccctgaatagggggcactcattttgtttcaacggtccaaacgcccaaccttcagaaagaggaagtcagatagaaatagtccctgagagcacactgtgtagctaagcctgctggggctgggtgaagaaattggcgctgagatccaggctggatccattgcttttgtttacaataggcactctctctaccccacctctcagtacttgagacttaaagtgctacaggcagctggatctgtttgcatgcaggatgaagagggttaaaacactgtttatataagatccaatctctcaccatctctaaagcagccgttggcctgtcatcagtgagatacaatccagtcttctcatgcacgggaacacacacaccctgcgtttctccctcccaggctaggaacctctctgccaccaagggctgccatccatcgcctagtaaccacggcaacccaacctactctaaaaccaaaccaaaaaaa

SEQ ID NO: 26272 - DNA, 2976 bp, Homo sapiens
  source 1..2976: mol_type = unassigned DNA
attttgtgatgagacctttatagtttggcaggctcttggcaggatgaagatgaagctgttttctctccatctggccaggtctacaactcgaacaaagacagccagagtgaagggagtaagtacgatgcttgggtaaccttctacagccagggttgggagtaggctttgagaagttgctactccaggtgtgaaccaccaggcggtgctgtgggcgtgttgggttggctccagttcccgagtgcagtgggacatgcctccaccccaactttccgccagtgactccagagggacgctgcgcagttggacagcattggcttcagcataatcaggaaatgcatccatgctgtggaaaccagagggatcaacgagcaagggctgtatcgaattgtgggtgtcaactccagagtgcagaagttgctgagtgtcctgatggaccccaagactgcttctgagacagaaacagatatctgtgctgaatgggagataaagaccatcactagtgctctgaagacctacctaagaatgcttccaggaccactcatgatgtaccagtttcaaagaagtttcatcaaagcagcaaaactggagaaccaggagtctcgggtctctgaaatccacagccttgttcatcggctcccagagaaaaatcggcagatgttacagctgctcatgaaccacttggcaaatgttgctaacaaccacaagcagaatttgatgacggtggcaaaccttggtgtggtgtttggacccactctgctgaggcctcaggaagaaacagtagcagccatcatggacatcaaatttcagaacattgtcattgagatcctaatagaaaaccacgaaaagatatttaacaccgtgcccgatatgcctctcaccaatgcccagctgcacctgtctcggaagaagagcagtgactccaagcccccgtcctgcagcgagaggcccctgacgctcttccacaccgttcagtcaacagagaaacaggaacaaaggaacagcatcatcaactccagtttggaatctgtctcatcaaatccaaacagcatccttaattccagcagcagcttacagcccaacatgaactccagtgacccagacctggctgtggtcaaacccacccggcccaactcactccccccgaatccaagcccaacttcacccctctcgccatcttggcccatgttctcggcgccatccagccctatgcccacctcatccacgtccagcgactcatcccccagaattacgtggagttcctctaaccgtgggccccagcagaactgctgagctttacatggtatccatgacaactgctgattccagtgtcgaggccatttctctttgccactgagaaatgcagcgtgactgactctgttgctacctgtcaacatgaatgtttctgtgagctctggtgtcactcatctccatgatcatctcagccaacatgcatcagtactgcaagaaaagaagtcaatcagcagaggagagcatttgataactaagaggaagacttgcaaagccgttttctcatgagtaccctgaatagggggcactcattttgtttcaacggtccaaacgcccaaccttcagaaagaggaagtcagatagaaatagtccctgagagcacactgtgtagctaagcctgctggggctgggtgaagaaattggcgctgagatccaggctggatccattgcttttgtttacaataggcactctctctaccccacctctcagtacttgagacttaaagtgctacaggcagctggatctgtttgcatgcaggatgaagagggttaaaacactgtttatataagatccaatctctcaccatctctaaagcagccgttggcctgtcatcagtgagatacaatccagtcttctcatgcacgggaacacacacaccctgcgtttctccctcccaggctaggaacctctctgccaccaagggctgccatccatcgcctagtaaccacggcaacccaacctactctaaaaccaaaccaaaaaaataaaataacacatcctctttgcatgacacattttttttctcccctttttggtacactttttttgaatggttttctaacaacttgaagcacaggatcaaggaattagggtggtctacttgaggcagatgggatagtagctgggaactgttccctttctgattaatttcagcagcatcggaatatatttggagcacaccctagtaacctcttgagattaaattacatagtcttaatatttctgttcctccatgcaactgatgtttgttttttaaagggtaagatgctgcctcccaatgggtgatgccatctgactggtttccccatgtcctcccattcacccatctctgctcccacccttgcctgcctctaacccaccactggccagcccccttgccctactctgggctgctgaacactggtgctgtggtggttttcaaggttaattcctaggctaaccgtatggcctatagtttaaaagcacatctatgttcactgccactctgaaaaagggaattatttctcagtctttcaaggcttgagactaatataggccattgtgattcaggaagaaacccaaggttggagggtgggatgagtaccctctgaaaaagggaatttgctggtgaaaagaggctggatcttgtggaagactgtcttggatggggaagtactacctggagatttcaaattcacttggcctgcaaacaacagagttatccgtatcttccacatgtgaatgtcattgcaagggtgactctagacaaactacaaaccgatggaccgtcaagctccccaggagccccttggatggcagcgttgcttcagagtgtttcctgtttctggaattccttgttagggaactttaaagaagaaaagaaaaacttgaattgtgttgaattactgtatcttttacttttttttttttgaaaagataaacttgtaaatagagtgatttgaaatact

SEQ ID NO: 26273 - DNA, 2870 bp, Homo sapiens
  source 1..2870: mol_type = unassigned DNA
ctgcgcagttggacagcattggcttcagcataatcaggaaatgcatccatgctgtggaaaccagagggatcaacgagcaagggctgtatcgaattgtgggtgtcaactccagagtgcagaagttgctgagtgtcctgatggaccccaagactgcttctgagacagaaacagatatctgtgctgaatgggagataaagaccatcactagtgctctgaagacctacctaagaatgcttccaggaccactcatgatgtaccagtttcaaagaagtttcatcaaagcagcaaaactggagaaccaggagtctcgggtctctgaaatccacagccttgttcatcggctcccagagaaaaatcggcagatgttacagctgctcatgaaccacttggcaaatgttgctaacaaccacaagcagaatttgatgacggtggcaaaccttggtgtggtgtttggacccactctgctgaggcctcaggaagaaacagtagcagccatcatggacatcaaatttcagaacattgtcattgagatcctaatagaaaaccacgaaaagatatttaacaccgtgcccgatatgcctctcaccaatgcccagctgcacctgtctcggaagaagagcagtgactccaagcccccgtcctgcagcgagaggcccctgacgctcttccacaccgttcagtcaacagagaaacaggaacaaaggaacagcatcatcaactccagtttggaatctgtctcatcaaatccaaacagcatccttaattccagcagcagcttacagcccaacatgaactccagtgacccagacctggctgtggtcaaacccacccggcccaactcactccccccgaatccaagcccaacttcacccctctcgccatcttggcccatgttctcggcgccatccagccctatgcccacctcatccacgtccagcgactcatcccccgtcaggccagaagaagcggtacatgaagactccagcacaccgttccggaaggcaaaagccttgtatgcctgcaaagctgaacatgactcagaactttcgttcacagcaggcacggtcttcgataacgttcacccatctcaggagcctggctggttggaggggactctgaacggaaagactggcctcatccctgagaattacgtggagttcctctaaccgtgggccccagcagaactgctgagctttacatggtatccatgacaactgctgattccagtgtcgaggccatttctctttgccactgagaaatgcagcgtgactgactctgttgctacctgtcaacatgaatgtttctgtgagctctggtgtcactcatctccatgatcatctcagccaacatgcatcagtactgcaagaaaagaagtcaatcagcagaggagagcatttgataactaagaggaagacttgcaaagccgttttctcatgagtaccctgaatagggggcactcattttgtttcaacggtccaaacgcccaaccttcagaaagaggaagtcagatagaaatagtccctgagagcacactgtgtagctaagcctgctggggctgggtgaagaaattggcgctgagatccaggctggatccattgcttttgtttacaataggcactctctctaccccacctctcagtacttgagacttaaagtgctacaggcagctggatctgtttgcatgcaggatgaagagggttaaaacactgtttatataagatccaatctctcaccatctctaaagcagccgttggcctgtcatcagtgagatacaatccagtcttctcatgcacgggaacacacacaccctgcgtttctccctcccaggctaggaacctctctgccaccaagggctgccatccatcgcctagtaaccacggcaacccaacctactctaaaaccaaaccaaaaaaataaaataacacatcctctttgcatgacacattttttttctcccctttttggtacactttttttgaatggttttctaacaacttgaagcacaggatcaaggaattagggtggtctacttgaggcagatgggatagtagctgggaactgttccctttctgattaatttcagcagcatcggaatatatttggagcacaccctagtaacctcttgagattaaattacatagtcttaatatttctgttcctccatgcaactgatgtttgttttttaaagggtaagatgctgcctcccaatgggtgatgccatctgactggtttccccatgtcctcccattcacccatctctgctcccacccttgcctgcctctaacccaccactggccagcccccttgccctactctgggctgctgaacactggtgctgtggtggttttcaaggttaattcctaggctaaccgtatggcctatagtttaaaagcacatctatgttcactgccactctgaaaaagggaattatttctcagtctttcaaggcttgagactaatataggccattgtgattcaggaagaaacccaaggttggagggtgggatgagtaccctctgaaaaagggaatttgctggtgaaaagaggctggatcttgtggaagactgtcttggatggggaagtactacctggagatttcaaattcacttggcctgcaaacaacagagttatccgtatcttccacatgtgaatgtcattgcaagggtgactctagacaaactacaaaccgatggaccgtcaagctccccaggagccccttggatggcagcgttgcttcagagtgtttcctgtttctggaattccttgttagggaactttaaagaagaaaagaaaaacttgaattgtgttgaattactgtatcttttacttttttttttttgaaaagataaacttgtaaatagagtgatttg

SEQ ID NO: 26274 - DNA, 1376 bp, Homo sapiens
  source 1..1376: mol_type = unassigned DNA
ggaagttctgcccggcgctctccgccggtgcctccctggttatattgttgaacaggaaacccggcagcgcgggagccgcacagtcgaggagggagcgcgggacgccgagcccacgcgcgcctgccggggcaagtggaggcgaagccggcgagcggacgccccgagggtcggggaaggaaccgaggtccggtccccttcttatccagcccgagacatcgagctccggtgggcgtccctgcgctgggaatcccgctcggagtttttccaggcccggccgggctgctccgggaaaggccctgctcctgttccgcgcagcctctccggcctcgcccctggaaaccccgcccagggcgatggtaggggcctaacctgcagccaccgccggctccgcccacccagcccatgggctccctgaggcccgcccagccgacgaaaacgccgcggctgcgatggcggcggacgtggtgggggacgtgtacgtgctggtggagcaccccttcgagtacaccggcaaggacgggcgccgcgtggccatccggccgaatgagcgctaccggctgctgcggcgcagcaccgagcactggtggcacgtgcggcgtgagcccggcggccgccccttctacctgcctgcgcagtacgtgcgcgagctgcccgcgctgggcaaccctgccgccgccgcgccgccaggtccccacccgagccccgcggcccctgagccgctcgcctacgactaccggtttgtgagcgcggcggcgaccgcgggccccgacggcgcccccgaggagtccggaggccgagccagctccctgtgcggccctgcgcaacgcggcgccgcgacccagcgcagcagcctggcgcccggcctgccagcctgcctgtacctgcggcccgcggcgcccgtgcggcccgcgcagtccctgaacgacctggcctgcgccgccgtctcgcctcccgccggcctcctaggaagcagcggcagcttcaaggcctgcagcgtggcgggctcctgggtgtgcccgcggcctctggcgcgcagcgactcagagaacgtctacgaggtcatccaggacttgcacgtcccgccgccggaggagagcgcagagcaggtacctccccgggcgctggggcgcggaggcgggtggcgcgctagggaccgcgcccgcacggagccggggcgcaaggagacccgctccgctcagcgtcgggcacgacgcccacctctgtccgaagacttcggatgagctccctctccccaaccgcgaaacgtgaggggtgcacgcccgcagtccctcatcagcaattcccaagctccaaagctccctggaagcccagaggcttttcgtaatccaattggtggcaaaattgcgcttgaactg

SEQ ID NO: 26275 - DNA, 3628 bp, Homo sapiens
  source 1..3628: mol_type = unassigned DNA
acatgagcaggcagccccgactggaaggagcccggggccctcattccttctcctccactgggaactgagtggacgacccaccggagcccgtgtacgcgaacatagagaggcagccccgggccacttcaccgggcgccgctgcagccccccttcccagcccggtgtgggagacgcacacggacgcgggcaccgggcgcccctactactacaacccagacacgggagttaccacctgggagtcgccctttgaggctgccgagggtgccgccagcccagccacctcccctgcctcggtggacagccacgtgagccttgagaccgagtggggccagtactgggatgaggagagccgcagggtgttcttctacaacccgctgacgggcgagacggcctgggaggacgaggccgagaacgagcccgaggaggagttggagatgcagccgggcctgagccctggcagcccaggggacccgcggccccccactcccgagacggactaccccgagtcgctgaccagttaccccgaggaggactattctcccgtgggctctttcggtgagcccggccctacctctcccttgaccacaccccccggctggtcttgtcatgtcagccaggacaagcagatgctctacaccaaccacttcactcaggagcagtgggtgaggctggaggacccccacgggaagccatacttctacaatccagaggactcctctgttcgatgggagctgccccaggtccctgtccctgcccctcgaagcatccataaatccagccaggatggtgacaccccagcccaggccagccctccagaggagaaggtcccagcagagctggatgaggttgggagctgggaggaagtctctcctgccacagctgctgtgaggaccaagaccttggacaaggcaggggtgctccatcgcaccaagacggcagacaagggaaagcggctccggaagaagcactggagtgcctcctggactgtgctggagggtggcgtcctgacattcttcaaggactcaaagacctcggctgcaggcggcctgaggcagccttccaagttttccacccctgagtacacagtggagctgaggggggccactctctcctgggcccccaaagacaaatccagtaggaagaatgtgctggagctacggagccgagatggctctgagtacctgatccagcacgactcggaggccatcatcagcacctggcataaggccattgctcagggcatccaggagctgtccgcagagctgcccccagaggagagcgagagcagcagagtggacttcgggtcgagcgagcgcttgggaagctggcaggagaaagaggaggacgcgcgaccgaatgcagccgcgcccgccctgggccccgtgggcctggagagcgacttgagcaaggtccggcacaagctccgcaagttcctccagaggcggcccacactgcagtcgctgcgggagaagggctacatcaaagaccaggtgttcggctgcgcgctggccgcgctgtgtgagcgcgagaggagccgggtgccacgcttcgtgcagcagtgcatccgcgccgtcgaggcccgcgggctggacatcgacgggctgtaccgcatcagtggaaacctggccaccatccagaagctacgctataaggtggaccacgatgagcgccttgacctggatgacgggcgctgggaggacgtccacgttatcaccggagccctgaagctcttctttcgggagctgcccgagcccctcttccccttctcgcacttccgccagttcattgcggccatcaagttgcaggaccaggcccggcgcagccgctgtgtgcgtgacttggtgcgctcgctgcccgctcccaaccacgacactctgcggatgctcttccagcacctctgccgggtgatcgagcacggcgagcagaaccgcatgtcggtgcagagcgtggccattgtgttcgggcccacgctgctgcggcccgaggtggaagagaccagcatgcccatgaccatggtgttccagaaccaggtggtggagctcatcctgcagcagtgcgcggacatcttcccgccgcactgactgctggcctgtgactggggcggcggccgcggtcctgccacacaagctgggcggcggaggccacgcagccgggccttcttctctctgggaccctccgccagcgcatagccgcaggccggtgtgacttctgcaccctcggttctgagggtacggtgacccctagtgggcagtttgcaaaatgtgattccttcttcccaactccccatccccccttcccttcccgtcacgtcctgtttgggggttaattcggttttttctctgttgcatcgcgcctactgtgcgtgtgcgatagcgtgtgtgggggtgagagtttgttttctggaatggtaggtgctgggaggaggagtttgatggagggcttcctggctgcttctggccctcacctcgtggaggccttcacagagaccctgtgggccctggccctgtgctggcactgtgccagtcatgaggcagctctgatcacttccccactgtggaaacaggactgacccagccttcagtgtgggctgctgaagctatcctcctcaggcctcagggatgacctcctgcctgagcctctcacaggctggctgtgggccagtttcatctgctttcctgttgggggtcccgggcctctgctgtccttgacccactggtgttctgtgcaaggcttcttcccattcaccaagtgcacaccttgcatctgccgctcggcatgcaccagttccacacaccatcccattttacagacaaggacgctgaggcctgcagcagcagtgtgacttgctcaaggtccagtgagtgacctcattccccagaaaaggctcctcccacaccagagtacagcctgggtagggggaaaatcagttctttcagctaccacccatccaacctttgggcctatgtgaaaagaaaggaactaagctgggtgtgttctgtctggacctggggaggcccctgaaggcaaagagggaaactgtcccagctgttctgtcctaggggagggggacatagccctagcaggagctcccagcccctcttggcactctgacacacaagtacacccatctggggcccgctttgccacgaagagctgggcaggcctgcagggtgtggggaaggaggacacaacctcaagaaaggaagcgtgaaccccagggaacagcgggtcccttccctcctcagacacaagccacctcagcttgtggctcttggcccccagccccaccaacccacctgttcatttattcaacagacaatgacagctgatatttattggacatttgcaccatgccaagcattcggcttggattatcccatttgtttctcacagccggtatttattgtctgctcctctgtgccaggtgctgtgctctgggcaggggcactgcatgggctgcctgccctggtggagcttgtggtctgatgggtgaggctgacccaagcccaccccattgccaacagggccagggcaagagtacacacaggggcctcataccatatgtctaaatatttaaaagttatcaatcaagctaacaactgttaaataaaatatgttctattctcct

SEQ ID NO: 26276 - DNA, 2670 bp, Homo sapiens
  source 1..2670: mol_type = unassigned DNA
atggcggcggacgtggtgggggacgtgtacgtgctggtggagcaccccttcgagtacaccggcaaggacgggcgccgcgtggccatccggccgaatgagcgctaccggctgctgcggcgcagcaccgagcactggtggcacgtgcggcgtgagcccggcggccgccccttctacctgcctgcgcagtacgtgcgcgagctgcccgcgctgggcaaccctgccgccgccgcgccgccaggtccccacccgagccccgcggcccctgagccgctcgcctacgactaccggtttgtgagcgcggcggcgaccgcgggccccgacggcgcccccgaggagtccggaggccgagccagctccctgtgcggccctgcgcaacgcggcgccgcgacccagcgcagcagcctggcgcccggcctgccagcctgcctgtacctgcggcccgcggcgcccgtgcggcccgcgcagtccctgaacgacctggcctgcgccgccgtctcgcctcccgccggcctcctaggaagcagcggcagcttcaaggcctgcagcgtggcgggctcctgggtgtgcccgcggcctctggcgcgcagcgactcagagaacgtctacgaggtcatccaggacttgcacgtcccgccgccggaggagagcgcagagcaggtggacgacccaccggagcccgtgtacgcgaacatagagaggcagccccgggccacttcaccgggcgccgctgcagccccccttcccagcccggtgtgggagacgcacacggacgcgggcaccgggcgcccctactactacaacccagacacgggagttaccacctgggagtcgccctttgaggctgccgagggtgccgccagcccagccacctcccctgcctcggtggacagccacgtgagccttgagaccgagtggggccagtactgggatgaggagagccgcagggtgttcttctacaacccgctgacgggcgagacggcctgggaggacgaggccgagaacgagcccgaggaggagttggagatgcagccgggcctgagccctggcagcccaggggacccgcggccccccactcccgagacggactaccccgagtcgctgaccagttaccccgaggaggactattctcccgtgggctctttcggtgagcccggccctacctctcccttgaccacaccccccggctggtcttgtcatgtcagccaggacaagcagatgctctacaccaaccacttcactcaggagcagtgggtgaggctggaggacccccacgggaagccatacttctacaatccagaggactcctctgttcgatgggagctgccccaggtccctgtccctgcccctcgaagcatccataaatccagccaggatggtgacaccccagcccaggccagccctccagaggagaaggtcccagcagagctggatgaggttgggagctgggaggaagtctctcctgccacagctgctgtgaggaccaagaccttggacaaggcaggggtgctccatcgcaccaagacggcagacaagggaaagcggctccggaagaagcactggagtgcctcctggactgtgctggagggtggcgtcctgacattcttcaaggactcaaagacctcggctgcaggcggcctgaggcagccttccaagttttccacccctgagtacacagtggagctgaggggggccactctctcctgggcccccaaagacaaatccagtaggaagaatgtgctggagctacggagccgagatggctctgagtacctgatccagcacgactcggaggccatcatcagcacctggcataaggccattgctcagggcatccaggagctgtccgcagagctgcccccagaggagagcgagagcagcagagtggacttcgggtcgagcgagcgcttgggaagctggcaggagaaagaggaggacgcgcgaccgaatgcagccgcgcccgccctgggccccgtgggcctggagagcgacttgagcaaggtccggcacaagctccgcaagttcctccagaggcggcccacactgcagtcgctgcgggagaagggctacatcaaagaccaggtgttcggctgcgcgctggccgcgctgtgtgagcgcgagaggagccgggtgccacgcttcgtgcagcagtgcatccgcgccgtcgaggcccgcgggctggacatcgacgggctgtaccgcatcagtggaaacctggccaccatccagaagctacgctataaggtggaccacgatgagcgccttgacctggatgacgggcgctgggaggacgtccacgttatcaccggagccctgaagctcttctttcgggagctgcccgagcccctcttccccttctcgcacttccgccagttcattgcggccatcaagttgcaggaccaggcccggcgcagccgctgtgtgcgtgacttggtgcgctcgctgcccgctcccaaccacgacactctgcggatgctcttccagcacctctgccgggtgatcgagcacggcgagcagaaccgcatgtcggtgcagagcgtggccattgtgttcgggcccacgctgctgcggcccgaggtggaagagaccagcatgcccatgaccatggtgttccagaaccaggtggtggagctcatcctgcagcagtgcgcggacatcttcccgccgcactga

SEQ ID NO: 26277 - DNA, 2589 bp, Homo sapiens
  source 1..2589: mol_type = unassigned DNA
atggcggcggacgtggtgggggacgtgtacgtgctggtggagcaccccttcgagtacaccggcaaggacgggcgccgcgtggccatccggccgaatgagcgctaccggctgctgcggcgcagcaccgagcactggtggcacgtgcggcgtgagcccggcggccgccccttctacctgcctgcgcagtacgtgcgcgagctgcccgcgctgggcaaccctgccgccgccgcgccgccaggtccccacccgagccccgcggcccctgagccgctcgcctacgactaccggtttgtgagcgcggcggcgaccgcgggccccgacggcgcccccgaggagtccggaggccgagccagctccctgtgcggccctgcgcaacgcggcgccgcgacccagcgcagcagcctggcgcccggcctgccagcctgcctgtacctgcggcccgcggcgcccgtgcggcccgcgcagtccctgaacgacctggcctgcgccgccgtctcgcctcccgccggcctcctaggaagcagcggcagcttcaaggcctgcagcgtggcgggctcctgggtgtgcccgcggcctctggcgcgcagcgactcagagaacgtctacgaggtcatccaggacttgcacgtcccgccgccggaggagagcgcagagcaggtggacgacccaccggagcccgtgtacgcgaacatagagaggcagccccgggccacttcaccgggcgccgctgcagccccccttcccagcccggtgtgggagacgcacacggacgcgggcaccgggcgcccctactactacaacccagacacgggagttaccacctgggagtcgccctttgaggctgccgagggtgccgccagcccagccacctcccctgcctcggtggacagccacgtgagccttgagaccgagtggggccagtactgggatgaggagagccgcagggtgttcttctacaacccgctgacgggcgagacggcctgggaggacgaggccgagaacgagcccgaggaggagttggagatgcagccgggcctgagccctggcagcccaggggacccgcggccccccactcccgagacggactaccccgagtcgctgaccagttaccccgaggaggactattctcccgtgggctctttcggtgagcccggccctacctctcccttgaccacaccccccggctggtcttgtcatgtcagccaggacaagcagatgctctacaccaaccacttcactcaggagcaggtccctgtccctgcccctcgaagcatccataaatccagccaggatggtgacaccccagcccaggccagccctccagaggagaaggtcccagcagagctggatgaggttgggagctgggaggaagtctctcctgccacagctgctgtgaggaccaagaccttggacaaggcaggggtgctccatcgcaccaagacggcagacaagggaaagcggctccggaagaagcactggagtgcctcctggactgtgctggagggtggcgtcctgacattcttcaaggactcaaagacctcggctgcaggcggcctgaggcagccttccaagttttccacccctgagtacacagtggagctgaggggggccactctctcctgggcccccaaagacaaatccagtaggaagaatgtgctggagctacggagccgagatggctctgagtacctgatccagcacgactcggaggccatcatcagcacctggcataaggccattgctcagggcatccaggagctgtccgcagagctgcccccagaggagagcgagagcagcagagtggacttcgggtcgagcgagcgcttgggaagctggcaggagaaagaggaggacgcgcgaccgaatgcagccgcgcccgccctgggccccgtgggcctggagagcgacttgagcaaggtccggcacaagctccgcaagttcctccagaggcggcccacactgcagtcgctgcgggagaagggctacatcaaagaccaggtgttcggctgcgcgctggccgcgctgtgtgagcgcgagaggagccgggtgccacgcttcgtgcagcagtgcatccgcgccgtcgaggcccgcgggctggacatcgacgggctgtaccgcatcagtggaaacctggccaccatccagaagctacgctataaggtggaccacgatgagcgccttgacctggatgacgggcgctgggaggacgtccacgttatcaccggagccctgaagctcttctttcgggagctgcccgagcccctcttccccttctcgcacttccgccagttcattgcggccatcaagttgcaggaccaggcccggcgcagccgctgtgtgcgtgacttggtgcgctcgctgcccgctcccaaccacgacactctgcggatgctcttccagcacctctgccgggtgatcgagcacggcgagcagaaccgcatgtcggtgcagagcgtggccattgtgttcgggcccacgctgctgcggcccgaggtggaagagaccagcatgcccatgaccatggtgttccagaaccaggtggtggagctcatcctgcagcagtgcgcggacatcttcccgccgcactga

SEQ ID NO: 26278 - DNA, 2168 bp, Homo sapiens
  source 1..2168: mol_type = unassigned DNA
gtttccctgttgccctgtgccagcactggggtagtgcccctgggctctacccccaaaaccttcccagggctctgtcccggcagttcagaggggccaggatggtggacataatcgccaaagtgaccaggaggcagagtcgagccttgccggcacaggtggacgacccaccggagcccgtgtacgcgaacatagagaggcagccccgggccacttcaccgggcgccgctgcagccccccttcccagcccggtgtgggagacgcacacggacgcgggcaccgggcgcccctactactacaacccagacacgggagttaccacctgggagtcgccctttgaggctgccgagggtgccgccagcccagccacctcccctgcctcggtggacagccacgtgagccttgagaccgagtggggccagtactgggatgaggagagccgcagggtgttcttctacaacccgctgacgggcgagacggcctgggaggacgaggccgagaacgagcccgaggaggagttggagatgcagccgggcctgagccctggcagcccaggggacccgcggccccccactcccgagacggactaccccgagtcgctgaccagttaccccgaggaggactattctcccgtgggctctttcggtgagcccggccctacctctcccttgaccacaccccccggctggtcttgtcatgtcagccaggacaagcagatgctctacaccaaccacttcactcaggagcagtgggtgaggctggaggacccccacgggaagccatacttctacaatccagaggactcctctgttcgatgggagctgccccaggtccctgtccctgcccctcgaagcatccataaatccagccaggatggtgacaccccagcccaggccagccctccagaggagaaggtcccagcagagctggatgaggttgggagctgggaggaagtctctcctgccacagctgctgtgaggaccaagaccttggacaaggcaggggtgctccatcgcaccaagacggcagacaagggaaagcggctccggaagaagcactggagtgcctcctggactgtgctggagggtggcgtcctgacattcttcaaggactcaaagacctcggctgcaggcggcctgaggcagccttccaagttttccacccctgagtacacagtggagctgaggggggccactctctcctgggcccccaaagacaaatccagtaggaagaatgtgctggagctacggagccgagatggctctgagtacctgatccagcacgactcggaggccatcatcagcacctggcataaggccattgctcagggcatccaggagctgtccgcagagctgcccccagaggagagcgagagcagcagagtggacttcgggtcgagcgagcgcttgggaagctggcaggagaaagaggaggacgcgcgaccgaatgcagccgcgcccgccctgggccccgtgggcctggagagcgacttgagcaaggtccggcacaagctccgcaagttcctccagaggcggcccacactgcagtcgctgcgggagaagggctacatcaaagaccaggtgttcggctgcgcgctggccgcgctgtgtgagcgcgagaggagccgggtgccacgcttcgtgcagcagtgcatccgcgccgtcgaggcccgcgggctggacatcgacgggctgtaccgcatcagtggaaacctggccaccatccagaagctacgctataaggtggaccacgatgagcgccttgacctggatgacgggcgctgggaggacgtccacgttatcaccggagccctgaagctcttctttcgggagctgcccgagcccctcttccccttctcgcacttccgccagttcattgcggccatcaagttgcaggaccaggcccggcgcagccgctgtgtgcgtgacttggtgcgctcgctgcccgctcccaaccacgacactctgcggatgctcttccagcacctctgccgggtgatcgagcacggcgagcagaaccgcatgtcggtgcagagcgtggccattgtgttcgggcccacgctgctgcggcccgaggtggaagagaccagcatgcccatgaccatggtgttccagaaccaggtggtggagctcatcctgcagcagtgcgcggacatcttcccgccgcactga

SEQ ID NO: 26279 - DNA, 2319 bp, Homo sapiens
  source 1..2319: mol_type = unassigned DNA
gcactgcttagtggacctcatttaatcttcccaataatccagtgaagtgggtgttactatcccattgacaggaaagaaatctgagctgcagagataaggcagaactcccaaggtgccaccaaggctcagacacacagattctcagaggaagtgtggactcacaggtgggcaatgcctagcagaggcaaagatatagaggtaagggagttccttacttactatatcttacaaagatatagaggtaagggagttccttacttactatatcttacaaagatatagaggtaagggagttcctctgaatctgggtggccagattcagcttcccacccaaccctgggtccccaggaggtggtgtcaagagaggccatggcctgggatgcgggcccttcttcctcccagaacactggcctgaatcagccagctcttggcacacacagccaggtccacaggcacaactgttccttggggcccctgagggcagggggtgtgctggggctgtggcttgtaatgtctggagtgagtgcaggctcagatcagggcgaggctgcttgtccagagaggcagaaaattctccaacagaagacccccaaggcggagggccctggggctggactcctggaggttgttctgagcttaccctgtggacggattggagggtggccctccttccccacaaggatcaagagggggtgggggatggtgggagggcaatctggccaggcgaacctgcgggggaggctcccgccctccccagtcccaccatctcagccccgcagcctctttctccctggagacagccaggtgcggcccaggatcccgggaaaggcaggggagggggtggcgtcttcgctcctcaggcgctggcccggcccagaggggacaggaagccaggacaccggggattgtctctcgcaaccgcagcccagccccagtccgggaggaagttctgcccggcgctctccgccggtgcctccctggttatattgttgaacaggaaacccggcagcgcgggagccgcacagtcgaggagggagcgcgggacgccgagcccacgcgcgcctgccggggcaagtggaggcgaagccggcgagcggacgccccgagggtcggggaaggaaccgaggtccggtccccttcttatccagcccgagacatcgagctccggtgggcgtccctgcgctgggaatcccgctcggagtttttccaggcccggccgggctgctccgggaaaggccctgctcctgttccgcgcagcctctccggcctcgcccctggaaaccccgcccagggcgatggtaggggcctaacctgcagccaccgccggctccgcccacccagcccatgggctccctgaggcccgcccagccgacgaaaacgccgcggctgcgatggcggcggacgtggtgggggacgtgtacgtgctggtggagcaccccttcgagtacaccggcaaggacgggcgccgcgtggccatccggccgaatgagcgctaccggctgctgcggcgcagcaccgagcactggtggcacgtgcggcgtgagcccggcggccgccccttctacctgcctgcgcagtacgtgcgcgagctgcccgcgctgggcaaccctgccgccgccgcgccgccaggtccccacccgagccccgcggcccctgagccgctcgcctacgactaccggtttgtgagcgcggcggcgaccgcgggccccgacggcgcccccgaggagtccggaggccgagccagctccctgtgcggccctgcgcaacgcggcgccgcgacccagcgcagcagcctggcgcccggcctgccagcctgcctgtacctgcggcccgcggcgcccgtgcggcccgcgcagtccctgaacgacctggcctgcgccgccgtctcgcctcccgccggcctcctaggaagcagcggcagcttcaaggcctgcagcgtggcgggctcctgggtgtgcccgcggcctctggcgcgcagcgactcagagaacgtctacgaggtcatccaggacttgcacgtcccgccgccggaggagagcgcagagcaggtacctccccgggcgctggggcgcggaggcgggtggcgcgctagggaccgcgcccgcacggagccggggcgcaaggagacccgctccgctcagcgtcgggcacgacgcccacctctgtccgaagacttcggatgagctccctctccccaaccgcgaaacgtgaggggtgcacgcccgcagtccctcatcagcaattcccaagctccaaagctccctggaagcccagaggcttttcgtaatccaattggtggcaaaattgcgcttgaactga

SEQ ID NO: 26280 - DNA, 2296 bp, Homo sapiens
  source 1..2296: mol_type = unassigned DNA
cacgggagttaccacctgggagtcgccctttgaggctgccgagggtgccgccagcccagccacctcccctgcctcggtggacagccacgtgagccttgagaccgagtggggccagtactgggatgaggagagccgcagggtgttcttctacaacccgctgacgggcgagacggcctgggaggacgaggccgagaacgagcccgaggaggagttggagatgcagccgggcctgagccctggcagcccaggggacccgcggccccccactcccgagacggactaccccgagtcgctgaccagttaccccgaggaggactattctcccgtgggctctttcggtgagcccggccctacctctcccttgaccacaccccccggctggtcttgtcatgtcagccaggacaagcagatgctctacaccaaccacttcactcaggagcaggtccctgtccctgcccctcgaagcatccataaatccagccaggatggtgacaccccagcccaggccagccctccagaggagaaggtcccagcagagctggatgaggttgggagctgggaggaagtctctcctgccacagctgctgtgaggaccaagaccttggacaaggcaggggtgctccatcgcaccaagacggcagacaagggaaagcggctccggaagaagcactggagtgcctcctggactgtgctggagggtggcgtcctgacattcttcaaggactcaaagacctcggctgcaggcggcctgaggcagccttccaagttttccacccctgagtacacagtggagctgaggggggccactctctcctgggcccccaaagacaaatccagtaggaagaatgtgctggagctacggagccgagatggctctgagtacctgatccagcacgactcggaggccatcatcagcacctggcataaggccattgctcagggcatccaggagctgtccgcagagctgcccccagaggagagcgagagcagcagagtggacttcgggtcgagcgagcgcttgggaagctggcaggagaaagaggaggacgcgcgaccgaatgcagccgcgcccgccctgggccccgtgggcctggagagcgacttgagcaaggtccggcacaagctccgcaagttcctccagaggcggcccacactgcagtcgctgcgggagaagggctacatcaaagaccaggtgttcggctgcgcgctggccgcgctgtgtgagcgcgagaggagccgggtgccacgcttcgtgcagcagtgcatccgcgccgtcgaggcccgcgggctggacatcgacgggctgtaccgcatcagtggaaacctggccaccatccagaagctacgctataaggtggaccacgatgagcgccttgacctggatgacgggcgctgggaggacgtccacgttatcaccggagccctgaagctcttctttcgggagctgcccgagcccctcttccccttctcgcacttccgccagttcattgcggccatcaagttgcaggaccaggcccggcgcagccgctgtgtgcgtgacttggtgcgctcgctgcccgctcccaaccacgacactctgcggatgctcttccagcacctctgccgggtgatcgagcacggcgagcagaaccgcatgtcggtgcagagcgtggccattgtgttcgggcccacgctgctgcggcccgaggtggaagagaccagcatgcccatgaccatggtgttccagaaccaggtggtggagctcatcctgcagcagtgcgcggacatcttcccgccgcactgactgctggcctgtgactggggcggcggccgcggtcctgccacacaagctgggcggcggaggccacgcagccgggccttcttctctctgggaccctccgccagcgcatagccgcaggccggtgtgacttctgcaccctcggttctgagggtacggtgacccctagtgggcagtttgcaaaatgtgattccttcttcccaactccccatccccccttcccttcccgtcacgtcctgtttgggggttaattcggttttttctctgttgcatcgcgcctactgtgcgtgtgcgatagcgtgtgtgggggtgagagtttgttttctggaatggtaggtgctgggaggaggagtttgatggagggcttcctggctgcttctggccctcacctcgtggaggccttcacagagaccctgtgggccctggccctgtgctggcactgtgccagtcatgaggcagctctgatcacttccccactgtggaaacaggactgacccagccttcagtgtgggctgctga

SEQ ID NO: 26281 - DNA, 5369 bp, Homo sapiens
  source 1..5369: mol_type = unassigned DNA
ctctgtcgcccaggctggagtgcagtagagtgatctcggctcactgcaagctccacctcctgggttcacgccattctcctgcctcagccttccgagtagcttggactacaggcacccaccaccacacccagctaatttttttgtattttttttagtagagacggggttttaccatgttggccaggatggtcttgatctcctgacctcatgatccacctgcctcggcctcacaaagtgctgggattacaggtatgagccaccacgcccggccaggcatttctttatagcaatgccaggatggtgtgccagactgtatcagagacaagtgatacaaagatgaccaagatacagtacttgcccaggaagaagaattcctgtggccacctctgtcttatatcaagagataagtgtgaaacagagtatccacaacagtgtttgggaagacagtgtgagtggctcccaactctaccaacaaaggcttcaaaggagtaatgacatttgaattgagtcttaaaggataaatgtattacttggcctgacaacacagaagaaaaggtcatttttgtcaaagaaatcaaccttgaaaaaatgccgcagttcatgacttgtaccagtgaaggtagcaaggtctgtgtgttggtgatgaatttgcaggggatcaggctgaagaaacaagacttgggagagaggatgtgagacctttttatgacatgcatagagttggcacctcagcctttgcatggtagggagctagctgaaggctacctccatgacagatgtacactttgaaaagacaggccgggtgcggtggctcacgtctgtaatcccagcattttgggaggctgaggtgggcaaatcacttgaagtcaggagttagagatcagcctggccaacacagtgaaacctggtctctactaaaaaaaataaaataattagccaggcatggtggcgcacacctgtaatcccaactattcgggaggctgaggcagaagaattgcttgaacacgggaggcggaagttgcagtgagctgagatggcaccaccgcactccagcctgggcgacagatcaagactccatctcaaaataaaggaagatacagctaatctatatttctttcaccagagatcaccaccactaacaattcatactggtcgtttttccctgaatgttttacctatgtaggaaaattttacatcccaatttttaatttaacactatgaaaagcatttctttttataataaagacactctattagtatacttttgatggcttcaaaactacttttgtatagatgcaaaattaaaatatcaaattgtttcttttgtttgtttgtttttttgttttttttttgagacagagtctcactctgtcgcccaggctaaagcacagtggcatgatctcggctcactgcaagcttttcctcccaggttaaagtgattctcatgccgcagcctcccgagaagctgggactacaggtgtgcaccaccacccccggctaattttttgtatttttacaaaacacaaagagagacggggtttcaccatgttgggcaggctggtctcaaactcctgacctcaggtgatccgcctgcctcagcctcccaaagtgctgggattgcaggcgtgggccaccgtgccctgcctcaaattgtttctttaatggttgttcccaaattttcataaataactttttacgtaacatttttgggcataaagttgtctaaaattattttcataggctagataccttaagtacacttaatgatttaaatcatacttaacattaagactttaatgttgctatattgatatttagtaaaagtacaaaacttgtgctttagagtttagacatattcaggatataagatagttttgttggatttggcgaacacttgccctaggagaataaaaaatgatgaattagtccaaaatgttccagttttctaatttgtcagactcggtaaatggtatcatcaccaaccaagaaaaacagaagatacagggagagtagattttgcagaaaagataaggagttctgtttgggacttgctgcctttgatatactgcactgggagaaaatccaagtcgaacagagtggacaagtgagaatgtgctgtggaatcaacaagaggggtggggagtctacctacctagatttgagagcagtttggcaaataattgttagtaaatgtcatagaaattcgtgggagagagaagttgataagaacagaggggtaaaggatgaaacagaggaaacactgccgcttctcagggttgggtacaagagaagccagggaaatagactaagaaagagtgatcagggaaaccgggagacagtgttgtcacggaagcctggagtgtgagattttccagaaaagaaggaatgaaagaatgaatggtctgtagatccattactcagcactatcagacacattgtccccttttgatatcccataatgaaatttatagataatataatctacttgtgcacaaaattttagaaattaatataatgccccaactataatataaagtgtattagtcagggttctctagagggacagaactaataggatatatatatataaaggggagtttataaagtattaacttacactattacaaggtcccacaataggctgtctgcaagcttgaggagcagagagccaggctgagtctcaacactgaagaacttggagtccgatgttcgagggcaggaaaaatccagcacaggagaaagacgcaggctgggaggctaggccagtctctcctttccatgttcctctgcctgctttatattcactggcagctgattggattgtgcccaccagattaagggtggatctgccttccccagcccactgactcaagtattaatctcttttgacaacaccctcacagacacacccaggatcaatatttgtatccttcaatccaattaagctgacactcagaattaaccatcacataaaggaagaagtaaaaggaaagtatattttatataataagtatttaaatatgtaaacattgggacatgactaaaactgactgaacacattgaaggagtcacttggttggtctgatgtgcagaattaccatgcatgctacaaatggagaggggtctacatgagctgtattgcttgtggtgccgcagatgacttgaatttccagaatgaaaatccattcctcgctgccgaagaattaacaggatgctctccaatgaatccctccatcctcctgccttcagccgttccaactcagaagcctccgtagacagcgcctccatggaggatttctggcgggaaatagaaagtattaaagacagcagcatgggagggcaagaagagccaccgccagctgaggtcacacctgtggatgaaggagaacttgaagcagaatggctgcaagatgtgggtttatcaactctgatctcaggtgatgaagaggaagatggcaaagccttgctctccacattgactcgaacccaagcagctgccgtgcaaaagagataccatacctatacccaaaccatgaggaaaaaggataagcaatctatcagggatgtcagagacatttttggagtcagtgaatctcctcctcgtgatacctgtggcaaccacactaatcagctggatggcaccaaggaagaaagagagcttccaagagttatcaagacaagtggttccatgccagatgatgcttctctcaacagtactaccctgtctgacgcatcccaggataaagaagggagttttgcggttcccaggagtgactctgtggctatacttgagaccattccagttctaccagttcattccaatggatcaccggagcctggacagccagttcagaatgcgataagtgatgatgattttctggaaaagaacattccaccagaggctgaagagctgtcatttgaagtgtcttattcagaaatggttacggaggctctaaaaagaaataaacttaagaaatcagagattaagaaagaagactatgttttaactaaatttaatgttcagaaaaccagatttggcttaactgaagcaggagatctgtctgctgaagacatgaagaaaatccgccatctctctctgattgaattgactgccttttttgatgcctttggaattcaactgaaaaggaacaaaacagagaaagtaaaaggacgagacaatgggatttttggagttccacttacagtcctcctggacggtgaccgaaagaaagaccctggagtgaaagttcccctggtattacaaaaattttttgagaaagttgaggaatcaggtctggaatctgaaggaatttttcgactttcaggatgtactgctaaagtcaagcaataccgtgaagaacttgatgccaagtttaatgctgataaatttaaatgggacaaaatgtgccatagagaagctgcagtaatgttgaaagcgtttttcagagaactacccacctctctcttccctgtggaatatatacctgccttcatcagtctaatggaaagagggcctcacgtcaaagtacagtttcaagccttacacctcatggtcatggcgctgcctgatgccaacagagatgcagctcaggccctcatgacattcttcaataaagtgattgccaatgaatcaaaaaaccgaatgagtctgtggaacatttctacagtgatggcaccaaaccttttcttcagtagaagcaaacactctgattatgaagaattactgttagcaaacactgcggcccacatcatccgcctaatgcttaagtaccagaagattttgtggaaggttccatctttcttaatcactcaagtaagaagaatgaatgaagccacgatgctattgaagaagcagctcccaagtgtcaggaagctgctcaggaggaagaccctcgagcgggagactgcaagccccaagacttcaaaggtactgcaaaaatcaccctcggcaagacgaatgtctgacgtgccggaaggagtcatacgggtccatgctccacttctctccaaggtgtccatggccattcaactcaacaatcaaaccaaagccaaagacatattggcaaaatttcaatatgaaaacagaatactgcactggcagcgagctgcactttccttcctaaatggaaaatgggttaaaaaagaaagagaagagtcgacagagaccaacaggagccccaaacatgtattcctcttcactattggcctggacatctccacataggcagtcatatagagacttgaaatatcattcaagggatttgggtatccagtagacttttagttacatatactacaaaactgactttgtactctcaagtagacctttcgtagaaagaaaatgtttctaataaaaatgtattagaact

SEQ ID NO: 26282 - DNA, 5415 bp, Homo sapiens
  source 1..5415: mol_type = unassigned DNA
acagaaggagaacttgaagcagaatggctgcaagatgtgggtttatcaactctgatctcaggtgatgaagaggaagatggcaaagccttgctctccacattgactcgaacccaagcagctgccgtgcaaaagagataccatacctatacccaaaccatgaggaaaaaggataagcaatctatcagggatgtcagagacatttttggagtcagtgaatctcctcctcgtgatacctgtggcaaccacactaatcagctggatggcaccaaggaagaaagagagcttccaagagttatcaagacaagtggttccatgccagatgatgcttctctcaacagtactaccctgtctgacgcatcccaggataaagaagggagttttgcggttcccaggagtgactctgtggctatacttgagaccattccagttctaccagttcattccaatggatcaccggagcctggacagccagttcagaatgcgataagtgatgatgattttctggaaaagaacattccaccagaggctgaagagctgtcatttgaagtgtcttattcagaaatggttacggaggctctaaaaagaaataaacttaagaaatcagagattaagaaagaagactatgttttaactaaatttaatgttcagaaaaccagatttggcttaactgaagcaggagatctgtctgctgaagacatgaagaaaatccgccatctctctctgattgaattgactgccttttttgatgcctttggaattcaactgaaaaggaacaaaacagagaaagtaaaaggacgagacaatgggatttttggagttccacttacagtcctcctggacggtgaccgaaagaaagaccctggagtgaaagttcccctggtattacaaaaattttttgagaaagttgaggaatcaggtctggaatctgaaggaatttttcgactttcaggatgtactgctaaagtcaagcaataccgtgaagaacttgatgccaagtttaatgctgataaatttaaatgggacaaaatgtgccatagagaagctgcagtaatgttgaaagcgtttttcagagaactacccacctctctcttccctgtggaatatatacctgccttcatcagtctaatggaaagagggcctcacgtcaaagtacagtttcaagccttacacctcatggtcatggcgctgcctgatgccaacagagatgcagctcaggccctcatgacattcttcaataaagtgattgccaatgaatcaaaaaaccgaatgagtctgtggaacatttctacagtgatggcaccaaaccttttcttcagtagaagcaaacactctgattatgaagaattactgttagcaaacactgcggcccacatcatccgcctaatgcttaagtaccagaagattttgtggaaggttccatctttcttaatcactcaagtaagaagaatgaatgaagccacgatgctattgaagaagcagctcccaagtgtcaggaagctgctcaggaggaagaccctcgagcgggagactgcaagccccaagacttcaaaggtactgcaaaaatcaccctcggcaagacgaatgtctgacgtgccggaaggagtcatacgggtccatgctccacttctctccaaggtgtccatggccattcaactcaacaatcaaaccaaagccaaagacatattggcaaaatttcaatatgaaaacagtcatggttcatcagaatgtattaagattcagaaccaaaggttatatgaaattggaggaaatataggagagcattgcttggatccagatgcttatatattggatgtatatcgtataaatcctcaagcagaatgggtgattaaaccccaacaaagttcttaaaatatcctcgagagagctgctatcatgtattatatgccaaaaagatcctacattttggtagggaaaaaacaacactgtgtttgacgtatttgttcctacagcattctcagtatttctggccctcagcagtgggcattgtaagcatgaactatggaagaggcgccggttcaccaattcaactgaagctttctcatgacttttttttttataaaagtaaaggaaagatgatgtggtccttccagaagaaagaccaatctagaatatggaactctaatcacttctagtatttcaacttcctagcagaaatgaacttggccctagacctagggataagcaatgttctttatgtagccaatgctacgaaacaaaagaggtgaaagagacccttttttatacttaatgtacatatattgactttttgagcaagaatgccagaaatagccttcatttctaccctgcaaaataatccagatctgctttctaaaatgaatcagtttctaaagtgaaacatgcaatatttatgctctgactgactcctgaattggaagaggaagaacttctgtttacagaaaactgtattgttatatatgtcaggctgtgtattgtgactatcagcattctggtgcaaatgaacttttctccatcatcgactgtggaaaattgatacttttaaagcatattcttctatgagcacaggtcctcctagtgaagcttagtttgacaaagggtgtcatatgctttcctaacctgatttgtagttaacattcacagagcctacattttctcattacggttatgatgctcagtatctttccaagtgccaggcacgggcttccttttctgatcaaacataccattttttatatttcacaactatagacagtcacttctgcagtcccaatttaaaaatgcagaactgctttatccaagaatgctgaaaaatactgttctatccaggtttcctaaactataaaagcagattttgcttttgtttgttaatcataggcatggccgagcattgtggattagcctgaggcttaaaatcagatgcatgtctggtaagatgaccactgtctcactatcaagagcctgcagagccattttccagacctgtgattgcccagaacacatagtccccacgtttctaatttggagcaaatctaaaaggtgctgagggattggacagctctgactttcctcgagactatggatatagtccttctcagattagctggaaatggggacagagttctcatttatcccagatatatacattggcttttttggaatctatagattgagattttgatgaatttatattggttttaatgagacccaaatgactctctcttaacaattcaagcagtagacaaagttgctcacaaatacagaaaacatctttttgtctacttcgcaagtctcaaaacgtgataatatttaagcccatttgtagaagaaatcttgtatatactattattacaccttgatatctatacaaaacatcacttgtattaaaatatatagataactttctggcatttagaattttgttccattcatttaatttgttcatctgagaatttttttttttgcctgaaaacccattaaaagaaaacgtgccttctgtataagtttatgtttattcctacattttattcatttttaatgtatgggtaattggtggcacatgactttacataatgactttctagactctgaaaaaaatgcttttatcatttttgcaattcagacaagggtaaacattttactttatgtaattgccacatcccaagatgtaaaacggcagtaatttatgaccacgtatggaagaaattcttcaaatagctaccttacatttctgcgtatatatgaaaactgaatgatatttctcagtgtatttccttgcatttgaatggttcaattctgttgtgtttatgtagaaaattcacaaatctgttcatttaattttttaatttgagaatttttatttcttttgactgaaaacacattagaacctatgagtaaattctgaaggttttaagatttacttcagcttgtcaccagtttcaaataaatccctaataggtaacaagtaaaatacaaattcttgtctactttcatgtggttttaaatggcagggacttcgctgagtcagtaagtataatcactctagtttattcaaggatgtgtggcaactttcaacttccatacgtatatatgtatgtatggaaggccatgtcaatactagtatcattggatataactttgattcttaatcagagggcaaattcattagagaagaatttttagtagatacacagactaatatttgtgtggaggttcttttgaccaattttattcctaagaataaacaaacccctacagttaaaatgcaaagatgcctgtcatctaagtattgaaagaatttttgccttatcaagagttgttttttaaaaatttaataaattcataaaaaagactcatatctttgcaaacaaaagaagggcagatactgggcttctacatgctatccttaagagcttctccccctcacccattcctagtgctcttggtatacacttgggaaaataatgtcctccaggagaaagtgttagagggaactaacattttaggaatgcttattcagaaaaaaatcctagagttgattcattgttttcctccatcctgcaaaagaagatccctttgttaagcagctcacttggaaatatgattcttggagtcaatgatctctaaacaaactggattatcaactatttacaacgtctatacagtataaactacctcacttgcctttcttgggaaaaaaaaaatgaatggactttaacaattgttgttacaaactgtgcctgaatcttattatttaaatcacttcagttagctttcagtgtatgtttaataatatacatttaatgatgaaaaatattttcagcaaagctttaaaaccagaaatactgtgtaactgtgatctatgtggtatactctgagagaattctgtgtcctgctcattgtcttgagtttctaaccatgtgcagatgcaagcgttcaggagtaggaattaatgtccatcttttctttcaggcattttcatctgctgtccacgtatttcacttgactgaaagctcatatgagttaaaatgtcccttcttcctagcgagcatatttcaactgttcttcataaatgtttatgtgccttaaaagactttatgttaaaggattaaatagtttctctgacaggcagtttttaactgttttccacaaataaaaataatatgtcatgggattaaaatgtttgttttcaagcatttttaacagttttacacacttacatacaccttaattaaaaatttttttctgtcagacatttaccaactattttctaaaactaatttgacaaatcatgacactagaaaacgccaatgttttatgtctttgcccatctcaaaagctaatattgattcttctgttccatcagctttcattgttaagtagaatatgtatgttgcattttatccataagaaataaag

SEQ ID NO: 26283 - DNA, 1857 bp, Homo sapiens
  source 1..1857: mol_type = unassigned DNA
caggaagctagcagagtttgcttctgagacgaattctgttacagtacatggcatttatgaggatcaatgtaattatgaatgaattgcctcgtgatacctgtggcaaccacactaatcagctggatggcaccaaggaagaaagagagcttccaagagttatcaagacaagtggttccatgccagatgatgcttctctcaacagtactaccctgtctgacgcatcccaggataaagaagggagttttgcggttcccaggagtgactctgtggctatacttgagaccattccagttctaccagttcattccaatggatcaccggagcctggacagccagttcagaatgcgataagtgatgatgattttctggaaaagaacattccaccagaggctgaagagctgtcatttgaagtgtcttattcagaaatggttacggaggctctaaaaagaaataaacttaagaaatcagagattaagaaagaagactatgttttaactaaatttaatgttcagaaaaccagatttggcttaactgaagcaggagatctgtctgctgaagacatgaagaaaatccgccatctctctctgattgaattgactgccttttttgatgcctttggaattcaactgaaaaggaacaaaacagagaaagtaaaaggacgagacaatgggatttttggagttccacttacagtcctcctggacggtgaccgaaagaaagaccctggagtgaaagttcccctggtattacaaaaattttttgagaaagttgaggaatcaggtctggaatctgaaggaatttttcgactttcaggatgtactgctaaagtcaagcaataccgtgaagaacttgatgccaagtttaatgctgataaatttaaatgggacaaaatgtgccatagagaagctgcagtaatgttgaaagcgtttttcagagaactacccacctctctcttccctgtggaatatatacctgccttcatcagtctaatggaaagagggcctcacgtcaaagtacagtttcaagccttacacctcatggtcatggcgctgcctgatgccaacagagatgcagctcaggccctcatgacattcttcaataaagtgattgccaatgaatcaaaaaaccgaatgagtctgtggaacatttctacagtgatggcaccaaaccttttcttcagtagaagcaaacactctgattatgaagaattactgttagcaaacactgcggcccacatcatccgcctaatgcttaagtaccagaagattttgtggaaggttccatctttcttaatcactcaagtaagaagaatgaatgaagccacgatgctattgaagaagcagctcccaagtgtcaggaagctgctcaggaggaagaccctcgagcgggagactgcaagccccaagacttcaaaggtactgcaaaaatcaccctcggcaagacgaatgtctgacgtgccggaaggagtcatacgggtccatgctccacttctctccaaggtgtccatggccattcaactcaacaatcaaaccaaagccaaagacatattggcaaaatttcaatatgaaaacagaatactgcactggcagcgagctgcactttccttcctaaatggaaaatgggttaaaaaagaaagagaagagtcgacagagaccaacaggagccccaaacatgtattcctcttcactattggcctggacatctccacataggcagtcatatagagacttgaaatatcattcaagggatttgggtatccagtagacttttagttacatatactacaaaactgactttgtactctcaagtagacctttcgtagaaagaaaatgtttctaataaaaatgtattagaact

SEQ ID NO: 26284 - DNA, 2314 bp, Homo sapiens
  source 1..2314: mol_type = unassigned DNA
atggaggtggaggactcgggcggcgtggtgctgaccgcctaccactcgtacgcgcgcgcccagccccccaacgccgagtcgcgctgcgcgccccgcgccgcagccagccacccgctcagcagaaaatccattcctcgctgccgaagaattaacaggatgctctccaatgaatccctccatcctcctgccttcagccgttccaactcagaagcctccgtagacagcgcctccatggaggatttctggcgggaaatagaaagtattaaagacagcagcatgggagggcaagaagagccaccgccagctgaggtcacacctgtggatgaaggagaacttgaagcagaatggctgcaagatgtgggtttatcaactctgatctcaggtgatgaagaggaagatggcaaagccttgctctccacattgactcgaacccaagcagctgccgtgcaaaagagataccatacctatacccaaaccatgaggaaaaaggataagcaatctatcagggatgtcagagacatttttggagtcagtgaatctcctcctcgtgatacctgtggcaaccacactaatcagctggatggcaccaaggaagaaagagagcttccaagagttatcaagacaagtggttccatgccagatgatgcttctctcaacagtactaccctgtctgacgcatcccaggataaagaagggagttttgcggttcccaggagtgactctgtggctatacttgagaccattccagttctaccagttcattccaatggatcaccggagcctggacagccagttcagaatgcgataagtgatgatgattttctggaaaagaacattccaccagaggctgaagagctgtcatttgaagtgtcttattcagaaatggttacggaggctctaaaaagaaataaacttaagaaatcagagattaagaaagaagactatgttttaactaaatttaatgttcagaaaaccagatttggcttaactgaagcaggagatctgtctgctgaagacatgaagaaaatccgccatctctctctgattgaattgactgccttttttgatgcctttggaattcaactgaaaaggaacaaaacagagaaagtaaaaggacgagacaatgggatttttggagttccacttacagtcctcctggacggtgaccgaaagaaagaccctggagtgaaagttcccctggtattacaaaaattttttgagaaagttgaggaatcaggtctggaatctgaaggaatttttcgactttcaggatgtactgctaaagtcaagcaataccgtgaagaacttgatgccaagtttaatgctgataaatttaaatgggacaaaatgtgccatagagaagctgcagtaatgttgaaagcgtttttcagagaactacccacctctctcttccctgtggaatatatacctgccttcatcagtctaatggaaagagggcctcacgtcaaagtacagtttcaagccttacacctcatggtcatggcgctgcctgatgccaacagagatgcagctcaggccctcatgacattcttcaataaagtgattgccaatgaatcaaaaaaccgaatgagtctgtggaacatttctacagtgatggcaccaaaccttttcttcagtagaagcaaacactctgattatgaagaattactgttagcaaacactgcggcccacatcatccgcctaatgcttaagtaccagaagattttgtggaaggttccatctttcttaatcactcaagtaagaagaatgaatgaagccacgatgctattgaagaagcagctcccaagtgtcaggaagctgctcaggaggaagaccctcgagcgggagactgcaagccccaagacttcaaaggtactgcaaaaatcaccctcggcaagacgaatgtctgacgtgccggaaggagtcatacgggtccatgctccacttctctccaaggtgtccatggccattcaactcaacaatcaaaccaaagccaaagacatattggcaaaatttcaatatgaaaacagaatactgcactggcagcgagctgcactttccttcctaaatggaaaatgggttaaaaaagaaagagaagagtcgacagagaccaacaggagccccaaacatgtattcctcttcactattggcctggacatctccacataggcagtcatatagagacttgaaatatcattcaagggatttgggtatccagtagacttttagttacatatactacaaaactgactttgtactctcaagtagacctttcgtagaaagaaaatgtttctaataaaaatgtattagaact

SEQ ID NO: 26285 - DNA, 1848 bp, Homo sapiens
  source 1..1848: mol_type = unassigned DNA
acagaaggagaacttgaagcagaatggctgcaagatgtgggtttatcaactctgatctcaggtgatgaagaggaagatggcaaagccttgctctccacattgactcgaacccaagcagctgccgtgcaaaagagataccatacctatacccaaaccatgaggaaaaaggataagcaatctatcagggatgtcagagacatttttggagtcagtgaatctcctcctcgtgatacctgtggcaaccacactaatcagctggatggcaccaaggaagaaagagagcttccaagagttatcaagacaagtggttccatgccagatgatgcttctctcaacagtactaccctgtctgacgcatcccaggataaagaagggagttttgcggttcccaggagtgactctgtggctatacttgagaccattccagttctaccagttcattccaatggatcaccggagcctggacagccagttcagaatgcgataagtgatgatgattttctggaaaagaacattccaccagaggctgaagagctgtcatttgaagtgtcttattcagaaatggttacggaggctctaaaaagaaataaacttaagaaatcagagattaagaaagaagactatgttttaactaaatttaatgttcagaaaaccagatttggcttaactgaagcaggagatctgtctgctgaagacatgaagaaaatccgccatctctctctgattgaattgactgccttttttgatgcctttggaattcaactgaaaaggaacaaaacagagaaagtaaaaggacgagacaatgggatttttggagttccacttacagtcctcctggacggtgaccgaaagaaagaccctggagtgaaagttcccctggtattacaaaaattttttgagaaagttgaggaatcaggtctggaatctgaaggaatttttcgactttcaggatgtactgctaaagtcaagcaataccgtgaagaacttgatgccaagtttaatgctgataaatttaaatgggacaaaatgtgccatagagaagctgcagtaatgttgaaagcgtttttcagagaactacccacctctctcttccctgtggaatatatacctgccttcatcagtctaatggaaagagggcctcacgtcaaagtacagtttcaagccttacacctcatggtcatggcgctgcctgatgccaacagagatgcagctcaggccctcatgacattcttcaataaagtgattgccaatgaatcaaaaaaccgaatgagtctgtggaacatttctacagtgatggcaccaaaccttttcttcagtagaagcaaacactctgattatgaagaattactgttagcaaacactgcggcccacatcatccgcctaatgcttaagtaccagaagattttgtggaaggttccatctttcttaatcactcaagtaagaagaatgaatgaagccacgatgctattgaagaagcagctcccaagtgtcaggaagctgctcaggaggaagaccctcgagcgggagactgcaagccccaagacttcaaaggtactgcaaaaatcaccctcggcaagacgaatgtctgacgtgccggaaggagtcatacgggtccatgctccacttctctccaaggtgtccatggccattcaactcaacaatcaaaccaaagccaaagacatattggcaaaatttcaatatgaaaacagaatactgcactggcagcgagctgcactttccttcctaaatggaaaatgggttaaaaaagaaagagaagagtcgacagagaccaacaggagccccaaacatgtattcctcttcactattggcctggacatctccacatag

SEQ ID NO: 26286 - DNA, 5492 bp, Homo sapiens
  source 1..5492: mol_type = unassigned DNA
aaagtaggccagtattgccagagaacaggagaggaggagagtatggtataagcatgtccagaaataaggagaacttgaagcagaatggctgcaagatgtgggtttatcaactctgatctcaggtgatgaagaggaagatggcaaagccttgctctccacattgactcgaacccaagcagctgccgtgcaaaagagataccatacctatacccaaaccatgaggaaaaaggataagcaatctatcagggatgtcagagacatttttggagtcagtgaatctcctcctcgtgatacctgtggcaaccacactaatcagctggatggcaccaaggaagaaagagagcttccaagagttatcaagacaagtggttccatgccagatgatgcttctctcaacagtactaccctgtctgacgcatcccaggataaagaagggagttttgcggttcccaggagtgactctgtggctatacttgagaccattccagttctaccagttcattccaatggatcaccggagcctggacagccagttcagaatgcgataagtgatgatgattttctggaaaagaacattccaccagaggctgaagagctgtcatttgaagtgtcttattcagaaatggttacggaggctctaaaaagaaataaacttaagaaatcagagattaagaaagaagactatgttttaactaaatttaatgttcagaaaaccagatttggcttaactgaagcaggagatctgtctgctgaagacatgaagaaaatccgccatctctctctgattgaattgactgccttttttgatgcctttggaattcaactgaaaaggaacaaaacagagaaagtaaaaggacgagacaatgggatttttggagttccacttacagtcctcctggacggtgaccgaaagaaagaccctggagtgaaagttcccctggtattacaaaaattttttgagaaagttgaggaatcaggtctggaatctgaaggaatttttcgactttcaggatgtactgctaaagtcaagcaataccgtgaagaacttgatgccaagtttaatgctgataaatttaaatgggacaaaatgtgccatagagaagctgcagtaatgttgaaagcgtttttcagagaactacccacctctctcttccctgtggaatatatacctgccttcatcagtctaatggaaagagggcctcacgtcaaagtacagtttcaagccttacacctcatggtcatggcgctgcctgatgccaacagagatgcagctcaggccctcatgacattcttcaataaagtgattgccaatgaatcaaaaaaccgaatgagtctgtggaacatttctacagtgatggcaccaaaccttttcttcagtagaagcaaacactctgattatgaagaattactgttagcaaacactgcggcccacatcatccgcctaatgcttaagtaccagaagattttgtggaaggttccatctttcttaatcactcaagtaagaagaatgaatgaagccacgatgctattgaagaagcagctcccaagtgtcaggaagctgctcaggaggaagaccctcgagcgggagactgcaagccccaagacttcaaaggtactgcaaaaatcaccctcggcaagacgaatgtctgacgtgccggaaggagtcatacgggtccatgctccacttctctccaaggtgtccatggccattcaactcaacaatcaaaccaaagccaaagacatattggcaaaatttcaatatgaaaacagtcatggttcatcagaatgtattaagattcagaaccaaaggttatatgaaattggaggaaatataggagagcattgcttggatccagatgcttatatattggatgtatatcgtataaatcctcaagcagaatgggtgattaaaccccaacaaagttcttaaaatatcctcgagagagctgctatcatgtattatatgccaaaaagatcctacattttggtagggaaaaaacaacactgtgtttgacgtatttgttcctacagcattctcagtatttctggccctcagcagtgggcattgtaagcatgaactatggaagaggcgccggttcaccaattcaactgaagctttctcatgacttttttttttataaaagtaaaggaaagatgatgtggtccttccagaagaaagaccaatctagaatatggaactctaatcacttctagtatttcaacttcctagcagaaatgaacttggccctagacctagggataagcaatgttctttatgtagccaatgctacgaaacaaaagaggtgaaagagacccttttttatacttaatgtacatatattgactttttgagcaagaatgccagaaatagccttcatttctaccctgcaaaataatccagatctgctttctaaaatgaatcagtttctaaagtgaaacatgcaatatttatgctctgactgactcctgaattggaagaggaagaacttctgtttacagaaaactgtattgttatatatgtcaggctgtgtattgtgactatcagcattctggtgcaaatgaacttttctccatcatcgactgtggaaaattgatacttttaaagcatattcttctatgagcacaggtcctcctagtgaagcttagtttgacaaagggtgtcatatgctttcctaacctgatttgtagttaacattcacagagcctacattttctcattacggttatgatgctcagtatctttccaagtgccaggcacgggcttccttttctgatcaaacataccattttttatatttcacaactatagacagtcacttctgcagtcccaatttaaaaatgcagaactgctttatccaagaatgctgaaaaatactgttctatccaggtttcctaaactataaaagcagattttgcttttgtttgttaatcataggcatggccgagcattgtggattagcctgaggcttaaaatcagatgcatgtctggtaagatgaccactgtctcactatcaagagcctgcagagccattttccagacctgtgattgcccagaacacatagtccccacgtttctaatttggagcaaatctaaaaggtgctgagggattggacagctctgactttcctcgagactatggatatagtccttctcagattagctggaaatggggacagagttctcatttatcccagatatatacattggcttttttggaatctatagattgagattttgatgaatttatattggttttaatgagacccaaatgactctctcttaacaattcaagcagtagacaaagttgctcacaaatacagaaaacatctttttgtctacttcgcaagtctcaaaacgtgataatatttaagcccatttgtagaagaaatcttgtatatactattattacaccttgatatctatacaaaacatcacttgtattaaaatatatagataactttctggcatttagaattttgttccattcatttaatttgttcatctgagaatttttttttttgcctgaaaacccattaaaagaaaacgtgccttctgtataagtttatgtttattcctacattttattcatttttaatgtatgggtaattggtggcacatgactttacataatgactttctagactctgaaaaaaatgcttttatcatttttgcaattcagacaagggtaaacattttactttatgtaattgccacatcccaagatgtaaaacggcagtaatttatgaccacgtatggaagaaattcttcaaatagctaccttacatttctgcgtatatatgaaaactgaatgatatttctcagtgtatttccttgcatttgaatggttcaattctgttgtgtttatgtagaaaattcacaaatctgttcatttaattttttaatttgagaatttttatttcttttgactgaaaacacattagaacctatgagtaaattctgaaggttttaagatttacttcagcttgtcaccagtttcaaataaatccctaataggtaacaagtaaaatacaaattcttgtctactttcatgtggttttaaatggcagggacttcgctgagtcagtaagtataatcactctagtttattcaaggatgtgtggcaactttcaacttccatacgtatatatgtatgtatggaaggccatgtcaatactagtatcattggatataactttgattcttaatcagagggcaaattcattagagaagaatttttagtagatacacagactaatatttgtgtggaggttcttttgaccaattttattcctaagaataaacaaacccctacagttaaaatgcaaagatgcctgtcatctaagtattgaaagaatttttgccttatcaagagttgttttttaaaaatttaataaattcataaaaaagactcatatctttgcaaacaaaagaagggcagatactgggcttctacatgctatccttaagagcttctccccctcacccattcctagtgctcttggtatacacttgggaaaataatgtcctccaggagaaagtgttagagggaactaacattttaggaatgcttattcagaaaaaaatcctagagttgattcattgttttcctccatcctgcaaaagaagatccctttgttaagcagctcacttggaaatatgattcttggagtcaatgatctctaaacaaactggattatcaactatttacaacgtctatacagtataaactacctcacttgcctttcttgggaaaaaaaaaatgaatggactttaacaattgttgttacaaactgtgcctgaatcttattatttaaatcacttcagttagctttcagtgtatgtttaataatatacatttaatgatgaaaaatattttcagcaaagctttaaaaccagaaatactgtgtaactgtgatctatgtggtatactctgagagaattctgtgtcctgctcattgtcttgagtttctaaccatgtgcagatgcaagcgttcaggagtaggaattaatgtccatcttttctttcaggcattttcatctgctgtccacgtatttcacttgactgaaagctcatatgagttaaaatgtcccttcttcctagcgagcatatttcaactgttcttcataaatgtttatgtgccttaaaagactttatgttaaaggattaaatagtttctctgacaggcagtttttaactgttttccacaaataaaaataatatgtcatgggattaaaatgtttgttttcaagcatttttaacagttttacacacttacatacaccttaattaaaaatttttttctgtcagacatttaccaactattttctaaaactaatttgacaaatcatgacactagaaaacgccaatgttttatgtctttgcccatctcaaaagctaatattgattcttctgttccatcagctttcattgttaagtagaatatgtatgttgcattttatccataagaaataaagagaaaaaaactaaaaa

SEQ ID NO: 26287 - DNA, 709 bp, Homo sapiens
  source 1..709: mol_type = unassigned DNA
attagttcttcacttagagaagaaactccattgccctttgtttctggccctgtgcggctggaggcggccagcactgtcctgtcctggttgaagcaattttaatgtgtgtggggtgctgaatgtgggctggggatggcttccctgcctttgggtcatggggagacacacttgcagaggggttttgtgggtcttcctcaagaatatcatccctgaaatttttaacctgctaaaagaatcaccacttcacatctgtaagcagagcgctggctaactctgtggcttaagcagaggtcagaacatctgaagtgatctgcagatatcctgaaaatccattcctcgctgccgaagaattaacaggatgctctccaatgaatccctccatcctcctgccttcagccgttccaactcagaagcctccgtagacagcgcctccatggaggatttctggcgggaaatagaaagtattaaagacagcagcatgggagggcaagaagagccaccgccagctgaggtcacacctgtggatgaaggagaacttgaagcagaatggctgcaagatgtgggtttatcaactctgatctcaggtgatgaagaggaagatggcaaagccttgctctccacattgactcgaacccaagcagctgccgtgcaaaagagataccatacctatacccaaaccatgaggaaaaaggataagcaatctatcagg

SEQ ID NO: 26288 - DNA, 1859 bp, Homo sapiens
  source 1..1859: mol_type = unassigned DNA
caggaagctagcagagtttgcttctgagacgaattctgttacagtacatggcatttatgaggatcaatgtaattatgaatgaattgcctcgtgatacctgtggcaaccacactaatcagctggatggcaccaaggaagaaagagagcttccaagagttatcaagacaagtggttccatgccagatgatgcttctctcaacagtactaccctgtctgacgcatcccaggataaagaagggagttttgcggttcccaggagtgactctgtggctatacttgagaccattccagttctaccagttcattccaatggatcaccggagcctggacagccagttcagaatgcgataagtgatgatgattttctggaaaagaacattccaccagaggctgaagagctgtcatttgaagtgtcttattcagaaatggttacggaggctctaaaaagaaataaacttaagaaatcagagattaagaaagaagactatgttttaactaaatttaatgttcagaaaaccagatttggcttaactgaagcaggagatctgtctgctgaagacatgaagaaaatccgccatctctctctgattgaattgactgccttttttgatgcctttggaattcaactgaaaaggaacaaaacagagaaagtaaaaggacgagacaatgggatttttggagttccacttacagtcctcctggacggtgaccgaaagaaagaccctggagtgaaagttcccctggtattacaaaaattttttgagaaagttgaggaatcaggtctggaatctgaaggaatttttcgactttcaggatgtactgctaaagtcaagcaataccgtgaagaacttgatgccaagtttaatgctgataaatttaaatgggacaaaatgtgccatagagaagctgcagtaatgttgaaagcgtttttcagagaactacccacctctctcttccctgtggaatatatacctgccttcatcagtctaatggaaagagggcctcacgtcaaagtacagtttcaagccttacacctcatggtcatggcgctgcctgatgccaacagagatgcagctcaggccctcatgacattcttcaataaagtgattgccaatgaatcaaaaaaccgaatgagtctgtggaacatttctacagtgatggcaccaaaccttttcttcagtagaagcaaacactctgattatgaagaattactgttagcaaacactgcggcccacatcatccgcctaatgcttaagtaccagaagattttgtggaaggttccatctttcttaatcactcaagtaagaagaatgaatgaagccacgatgctattgaagaagcagctcccaagtgtcaggaagctgctcaggaggaagaccctcgagcgggagactgcaagccccaagacttcaaaggtactgcaaaaatcaccctcggcaagacgaatgtctgacgtgccggaaggagtcatacgggtccatgctccacttctctccaaggtgtccatggccattcaactcaacaatcaaaccaaagccaaagacatattggcaaaatttcaatatgaaaacagaatactgcactggcagcgagctgcactttccttcctaaatggaaaatgggttaaaaaagaaagagaagagtcgacagagaccaacaggagccccaaacatgtattcctcttcactattggcctggacatctccacataggcagtcatatagagacttgaaatatcattcaagggatttgggtatccagtagacttttagttacatatactacaaaactgactttgtactctcaagtagacctttcgtagaaagaaaatgtttctaataaaaatgtattagaactaa

SEQ ID NO: 26289 - DNA, 6087 bp, Homo sapiens
  source 1..6087: mol_type = unassigned DNA
gctgtggctgcggctgcggctgcggctgagatttggccgggcgtccgcaggccgtgggggatgggggcagcgagctccagccctcggcggtggcggcggccgtaggtgtggggcgggcgtccgcgtccggcacgcgagatggagcgccgtggatttcagtttttctgactgttacatgaaaggatgattgctcacaaacagaaaaagacaaagaaaaaacgtgcttgggcatcaggtcaactctctactgatattacaacttctgaaatggggctcaagtccttaagttccaactctatttttgatccggattacatcaaggagttggtgaatgatatcaggaagttctcccacatgttactatatttgaaagaagccatattttcagactgttttaaagaagttattcatatacgtctagaggaactgctccgtgttttaaagtctataatgaataaacatcagaacctcaattctgttgatcttcaaaatgctgcagaaatgctcactgcaaaagtgaaagctgtgaacttcacagaagttaatgaagaaaacaaaaacgatctcttccaggaagtgttttcttctattgaaactttggcatttacctttggaaatatccttacaaacttccttatgggagatgtaggcaatgattcattattgcgactgcctgtttctcgagaaactaagtcgtttgaaaatgtttctgtggaatcagtggactcatccagtgaaaaaggaaatttttcccctttagaactagacaacgtgctgttaaagaacactgactctatcgagctggctttgtcatatgctaaaacttggtcaaaatatactaagaacatagtttcatgggttgaaaaaaagcttaacttggaattggagtccactagaaatatggtcaagttggcagaggcaactagaactaacattggaattcaggagttcatgccactgcagtctctgtttactaatgctcttcttaatgatatagaaagcagtcaccttttacaacaaacaattgcagctctccaggctaacaaatttgtgcagcctctacttggaaggaaaaatgaaatggaaaaacaaaggaaagaaataaaagagctttggaaacaggagcaaaataaaatgcttgaagcagagaatgctctcaaaaaggcaaaattattatgcatgcaacgtcaagatgaatatgagaaagcaaagtcttccatgtttcgtgcagaagaggagcatctgtcttcaagtggcggattagcaaaaaatctcaacaagcaactagaaaaaaagcgaaggttggaagaggaggctctccaaaaagtagaagaagcaaatgaactttacaaagtttgtgtgacaaatgttgaagaaagaagaaatgatctagaaaataccaaaagagaaattttagcacaactccggacacttgttttccagtgtgatcttacccttaaagctgtaacagttaacctcttccacatgcagcatctgcaggctgcttcccttgcagacagtttacagtctctctgtgatagtgccaaactctatgacccaggccaagagtacagtgaatttgtcaaggccacaaattcaactgaagaagaaaaagttgatggaaatgtaaataaacatttaaatagttcccaaccttcaggatttggacctgccaactctttagaggatgttgtacgccttcctgacagttctaataaaattgaagaggacagatgctctaacagtgcagatataacaggtccttcctttataagatcatggacatttgggatgtttagtgattctgagagcactggagggagcagcgaatctagatctctggattcagaatctataagtccaggagactttcatcgaaaacttccacgaacaccatccagtggaactatgtcctctgcagatgatctagatgaaagagagccaccttccccttcagaaactggacccaattcccttggaacatttaagaaaacattgatgtcaaaggcagctctcacacacaagtttcgcaaattgagatcccccacgaaatgtagggattgtgaaggcattgtagtgttccaaggtgttgaatgtgaagagtgtctccttgtttgtcatcgaaagtgtttggaaaatttagtcattatttgtggtcatcagaaacttccaggaaaaatacacttatttggagcagaattcacacaagttgcaaaaaaggaaccagatggtatcccttttatactcaaaatatgtgcctcagagattgaaaatagagctttgtgtctacagggaatttatcgtgtgtgtggaaacaaaataaaaactgaaaaattgtgtcaagctttggaaaatggaatgcacttggtagatatttcagaatttagttcacatgatatctgtgacgtcttgaaattataccttcggcagctcccagaaccatttattttatttcgattgtacaaggaatttatagaccttgcaaaagagatccaacatgtaaatgaagaacaagagacaaaaaagaatagtcttgaagacaaaaaatggccaaatatgtgtatagaaataaaccgaattcttctaaaaagcaaagaccttctaagacaattgccagcatcaaattttaacagtcttcatttccttatagtacatctaaagcgggtagtagatcatgcagaagaaaacaagatgaactccaaaaacttgggggtgatatttggaccaagtctcattaggccaaggcccacaactgctcctatcaccatctcctcccttgcagagtattcaaatcaagcacgcttggtagagtttctcattacttactcacagaagatcttcgatgggtccctacaaccacaagatgttatgtgtagcataggtgttgttgatcaaggctgttttccaaagcctctgttatcaccagaagaaagagacattgaacgttccatgaagtcactatttttttcttcaaaggaagatatccatacttcagagagtgaaagcaaaatttttgaacgagctacatcatttgaggaatcagaacgcaagcaaaatgcgttaggaaaatgtgatgcatgtctcagtgacaaagcacagttgcttctagaccaagaggctgaatcagcatcccaaaagatagaagatggtaaaacccctaagccactttctctgaaatctgataggtcaacaaacaatgtggagaggcatactccaaggaccaagattagacctgtaagtttgcctgtagatagactacttcttgcaagtcctcctaatgagagaaatggcagaaatatgggaaatgtaaatttagacaagttttgcaagaatcctgcctttgaaggagttaatagaaaagacgctgctactactgtttgttccaaatttaatggctttgaccagcaaactctacagaaaattcaggacaaacagtatgaacaaaacagcctaactgccaagactacaatgatcatgcccagtgcactccaggaaaaaggagtgacaacaagcctccagattagtggggaccattctatcaatgccactcaacccagtaagccatatgcagagccagtcaggtcagtgagagaggcatctgagagacggtcttcagattcctaccctctcgctcctgtcagagcacccagaacactgcagcctcaacattggacaacattttataaaccacatgctcccatcatcagtatcagggggaatgaggagaagccagcttcaccctcagcagcagtgcctcctggcacagatcacgatccccacggtctcgtggtgaagtcaatgccagacccagacaaagcatcagcttgtcctgggcaagcaactggtcaacctaaagaagactctgaggagcttggcttgcctgatgtgaatccaatgtgtcagagaccaaggctaaaacgaatgcaacagtttgaagacctcgaaggtgaaattccacaatttgtgtagggatgtcaaatttcagggtttttttgttgttgttgtgttattttgtggtattgtgcttgttttgtgaaagaatgttttgacagggcctcttttgtataggactgccaaatcatgggttttgccttttgttgttgtatttatcctctgttggtaatactgaatggtagaatgttttgatagggtcacatttgtgcctcactggaattatctttaaattctgtatttttaaagttgtgaataagataggtggattcgtattttttaaagttcagttgactttccccaccaaatggtccatttgaatgcatccctaatatatgatatagtctcaactaataggtgcaatttgggaaaatcaggtttattttttggagtggaactgttataagtgcttatttataaaaggaatgtttctgaatgcaagtgcctaaaaagatctttgttggtatgcatatgttttgtcacacaattttatagtgcatctttcaccatttgtgcttttttaagatacgtatgtaagctcttatttttcaattggcaattcagttaatttttaaatgtttacataatggccagaaggcttgcaaatctgtatttaattgcattttaattaattgccagtttttacatgtgatagtcagttgtacaaagaaaatgcacttaaacctgtttctaaattatatattcagttatattatatttggctttagatggttttaatacatttgatagtttttcaccccttggctttattttatataaacttttgtttttcagcagttctgaactttttagtattttataaatggtccaaaaaatgcctgtttcagaagtttttgaattcagtgcatttcctcttgatttgtctgggttaaaaccattccttttgtatgaaatgttttgacttaggaatcattttatgtacttgttctacctggattgtcaacaactgaaagtacatatttcatccaaatcaagctaaaatttatttaagttgattctgagagtacaggtcagtaagcctcattatttggaatttgagagaaggtataggtgatcggatctgtttcatttataaaaggtccagtttttaggactagtacattcctgttattttctgggttttatcattttgcctaaaataggatataaaagggacaaaaaataagtagactgtttttatgtgtgaattatatttctactaaatgtttttgtatgactgtgttatacttgataatatatatatatatatatatcaacttgttaaattatttcatgttcccgtggcttcttttcagttgttgcctattacagtatgagagtttaaggttattaaccattggcttagaagtcaacacctaggatcatacatccgttgactacaatgtggaatgaattttatggaaacctgttttatagttctatgtgatgtaaaggtctagggagcaataaccagcccttttttttctgaaggcttgtttttagtcctcattgtacaaaatataaaataatcatattgctatgaatacctaaaaagaaaattagagcccatgtgtattgagccttctctgtgtgccaggaactttgccaaggtgctacatagattattttatttcaagttcacagcaacctataatgggtgggtaagcatgttattatttctgtgttacagataaggaaactaaggcttagttaaatgacttgcttcagtgttccacaggtgtaacaggtggagtcaaatctcaaacatagggctgtcagattttgatggttagtgctcttaatgactgtgattactaaataatatctggtagtttttaacaatagaaaatgcaactttaaaaaatttttattgtggtaaaatacacataacatttaccatttttaagtatattgtttgaaccatttttaagcatatagttcagtggcattaagtatattcacattgttttgcaaccatgagcacctattcatctccagaacattatcatcatcctatactaaaacttagaaaatgtacttttaaacttcttcagttctcttttaatatatggagcccacccaaaggttatatcatgtaataaactcatttctctgttttccctcacagcttaaaaa

SEQ ID NO: 26290 - DNA, 2043 bp, Homo sapiens
  source 1..2043: mol_type = unassigned DNA
gggcgggcggtgcggccgtggcggtagctgcaggggcggtggcggctgcagtggtggtggtgcctgtggctgtggctgcggctgcggctgcggctgagatttggccgggcgtccgcaggccgtgggggatgggggcagcgagctccagccctcggcggtggcggcggccgtaggtgtggggcgggcgtccgcgtccggcacgcgagatggagcgccgtggatttcagtttttctgactgttacatgaaaggatgattgctcacaaacagaaaaagacaaagaaaaaacgtgcttgggcatcaggtcaactctctactgatattacaacttctgaaatggggctcaagtccttaagttccaactctatttttgatccggattacatcaaggagttggtgaatgatatcaggaagttctcccacatgttactatatttgaaagaagccatattttcagactgttttaaagaagttattcatatacgtctagaggaactgctccgtgttttaaagtctataatgaataaacatcagaacctcaattctgttgatcttcaaaatgctgcagaaatgctcactgcaaaagtgaaagctgtgaacttcacagaagttaatgaagaaaacaaaaacgatctcttccaggaagtgttttcttctattgaaactttggcatttacctttggaaatatccttacaaacttccttatgggagatgtaggcaatgattcattattgcgactgcctgtttctcgagaaactaagtcgtttgaaaatgtttctgtggaatcagtggactcatccagtgaaaaaggaaatttttcccctttagaactagacaacgtgctgttaaagaacactgactctatcgagctggctttgtcatatgctaaaacttggtcaaaatatactaagaacatagtttcatgggttgaaaaaaagcttaacttggaattggagtccactagaaatatggtcaagttggcagaggcaactagaactaacattggaattcaggagttcatgccactgcagtctctgtttactaatgctcttcttaatgatatagaaagcagtcaccttttacaacaaacaattgcagctctccaggctaacaaatttgtgcagcctctacttggaaggaaaaatgaaatggaaaaacaaaggaaagaaataaaagagctttggaaacaggagcaaaataaaatgcttgaagcagagaatgctctcaaaaaggcaaaattattatgcatgcaacgtcaagatgaatatgagaaagcaaagtcttccatgtttcgtgcagaagaggagcatctgtcttcaagtggcggattagcaaaaaatctcaacaagcaactagaaaaaaagcgaaggttggaagaggaggctctccaaaaagtaacgatctttttcttttttatttgcaagttgaattagcggtaatctgccaggagtttggtgtcaaagttctgcgtctgccaagactgcctggaaaggcatgttaaaacatggctaagcccatcccccagagtttctcattcagtaggtcaacattttttaataggctctcaggtcgtgctgatgctgttggtgaagatccacattttgagaaccactatgctgagacctgaattttggagtttgtgaaagaatgtcttagagaaggcagtagtttattttacttgacaagaaagttcaccttttaggcaagtgtgtgtgtgtatgtgtactaattcaggcacctgatagcaaggataggcaaaagctttgtattattgatgaaatgtaattttacgaacaaattctgtaagattatatggaatatagtaaatataaatataaaatgctatttcaaatagaagcaaatattttatagacagtgtactaattataaattgtacatggctgtccattaaaatcaactgcctttgaatcactgaccagaacagattaacttcagaagtattattttgaaaacagaagatttcagaattttcagttatttcaacttagctttactatagtaaatatttgtttaaaatataaa

SEQ ID NO: 26291 - DNA, 4394 bp, Homo sapiens
  source 1..4394: mol_type = unassigned DNA
gttaaggagctgcactgcttcctgccccctaaagctgagcggggcgaggagggcgagtgccaggctgggccacgagacacaggacacaatttcttgccagggtcctggtagcttcctcttcaacagccacttccgtgtggccggggccccaggggcaggagctgctgcccgttgcccaggccaccctccacccccaattgggagccctgcccccctggggccgggccaagcccagcagctggctgggatcccatgggggactggtagggcacaggtcttgggggatagaggtgaccgggccagtgccctggggctctggccatgaagtctcggcagaaaggaaagaagaagggcagcgcaaaggagcgggtttttgggtgcgacttgcaggagcacctgcagcactcaggccaggaggtgccccaggtgctaaagagctgtgcagaatttgtggaggagtatggagtggtggatgggatctaccgcctctcaggggtctcctccaacatccagaagcttcggcaggaatttgagtcagagcggaagccagacctgcgtcgggatgtttacctccaagacattcactgcgtctcctccctgtgcaaggcctatttcagagaactgccggatcccctgctcacttaccggctctatgacaagtttgctgaggctgtaggagtgcaattggaacctgagcgcttggtcaagatcctagaggtgcttcgggaactccctgtcccaaactacaggaccctggagttcctcatgaggcacttggtacacatggcctcattcagtgcccagaccaacatgcatgctcgcaacctggccatcgtgtgggctcccaacctgctgaggtctaaggacatagaggcctcaggcttcaatgggacagcggccttcatggaggtgcgggtacaatccatcgtcgtggagttcatcctcacacacgtggaccagctctttgggggtgctgccctctctggtggtgaggtggagagtgggtggcgatcgcttccagggacccgggcatcaggcagccccgaggaccttatgcccaggccactgccttatcacctgcctagcatactgcaggctggcgatggacccccacagatgcggccctaccatactatcatcgagattgcagagcacaagaggaaggggtctttgaaggtcaggaagtggaggtctatcttcaatttaggtcgctctggccatgagactaagcgtaaacttccacggggggctgaggacagggaggataaatccaacaaggggacactgcggccagccaaaagcatggactcactgagtgctgcagctggggccagtgatgagccagaggggctggtggggcccagcagcccccggccaagcccattgctgcctgagagcttggagaacgattctatagaggcagcagagggtgaacaggagcctgaggcagaagcactgggtggcacaaactctgaaccaggcacaccacgagctgggcggtcagccatccgggctgggggcagcagccgtgcagaacgctgtgctggtgtccacatctcagacccctacaatgtcaacctcccgctacacatcacctctatcctcagtgtgcccccgaacatcatctctaacgtttccttggccaggctcacccgtggccttgagtgccctgctctacagcaccggccaagccctgcctctggccctggccctggccctggccttggccctggccccccagatgaaaagttggaagcaagtccagcctcaagtcccctggcagactcaggcccagacgacttggctcctgccctggaggactcgctgtcccaggaggtgcaggactccttctccttcctagaggactcaagcagctcagaacctgagtgggtgggggcagaggatggggaggtggcccaggcagaagcagcaggagcagccttctcccctggggaggacgaccctgggatgggctacctggaggagctcctgggagttgggcctcaggtggaggagttctctgtggagccacccctggatgacctgtctctggatgaggcacagtttgtcttggcccccagctgctgttccctggactccgctggccccaggcctgaagttgaggaggaaaatggggaggaagttttcctgagtgcctatgatgacctaagtccccttctgggacctaaacccccaatctggaagggttcagggagtctggagggagaggcagcaggatgtggaaggcaggctctgggacagggtggggaagagcaggcatgctgggaagttggggaggacaagcaggctgagcctggaggcaggctagacatcagggaagaggcagagggaagtccagagaccaaggtggaggctggaaaggccagtgaggatagaggggaggctgggggaagccaagagacaaaagtcagattgagagaagggagtagggaagagacagaggccaaggaagagaagtccaaaggtcagaagaaggctgacagtatggaggctaaaggtgtggaggaaccaggaggagatgagtatacagatgagaaggaaaaagaaattgagagagaagaggatgaacaaagagaggaagcccaggtagaagctggaagggacctagagcaaggggcccaggaagatcaagttgctgaggagaaatgggaagttgtacagaaacaagaggctgagggagtcagagaggatgaggacaaaggacagagggagaaggggtaccatgaagcaagaaaagaccaaggagatggtgaagacagcagaagcccagaagcagcaactgaaggaggagcaggggaggtcagcaaggaacgggagagtggggatggagaggctgagggagaccagagggctggagggtactatttagaagaggacaccctctctgaaggttcaggtgtagcgtccctggaggttgactgtgccaaagagggcaatcctcactcttctgagatggaagaggtagccccacagccacctcagccagaggagatggagcctgaggggcagcccagtccagacggctgtctatgcccctgttctcttggcctgggtggcgtgggcatgcgtctagcttccactctggttcaggtccaacaggtccgctctgtgcctgtggtgccccccaagccacagtttgccaagatgcccagtgcaatgtgtagcaagattcatgtggcacctgcaaatccatgcccgaggcctggccggcttgatgggactcctggagaaagggcttgggggtcccgagcttctcgatcctcttggaggaatgggggtagtctttcctttgatgctgctgtggccctagcccgggaccgccaaaggactgaggctcaaggagttcggcgaacccagacctgtactgagggtggggattactgcctcatccccagaacctccccttgtagcatgatctctgcccattctcctcggccccttagctgcctggagctcccatctgaaggtgcagaagggtctggatcccggagtcgtcttagtctgccccccagagaaccccaggttcctgaccccctgttgtcctctcagcgcaggtcatatgcatttgaaacacaggctaaccctgggaaaggtgaaggactgtgattaggaccacagccctgggcaaaggggaccagcaagttgtcttgaatctccagggttcctgactagctgtctcctctgcagcatgagcagctgtagtgcccaactctataggctttggccctccagcttctctctttgactgtgggaggcactgccttggttggtttacctgaacttgtctccgacacaaagcacttatctcttaggagattcccaagaaagtcaacaagatcttgttcccagggagtgggtcattggccaaagggaacataaggtaggcagaaaacttaaaagagtttgttaaagtgaagactggagaaattcctcccttcctctgagctgtgaatctctcttcatgaaagccaaaggtagagacagggaggacagggccaggttagggccttccacacacaaacacttctagagttgcccattcctgttatgttcttggaccctaagatacctcctgtcccttttaaatccagattaagagaaacgtccaggaagagctctttgaagccctcaatatttgttggagggactggactcctctccagctccccaccctctgcctccagtcaccatgtgcaagagaggtcctgtacagatctctctgggctctcctttctcctttggaataacttgttcctatttcaggaaagggaaatggtgtcactcaggccctgggactgcttctccagccaggctggggccacaggtcccactctagtgaaggtcaatgtctcagaataaaagctgtattttta

SEQ ID NO: 26292 - DNA, 3482 bp, Homo sapiens
  source 1..3482: mol_type = unassigned DNA
gggggatagaggtgaccgggccagtgccctggggctctggccatgaagtctcggcagaaaggaaagaagaagggcagcgcaaaggagcgggtttttgggtgcgacttgcaggagcacctgcagcactcaggccaggaggtgccccaggtgctaaagagctgtgcagaatttgtggaggagtatggagtggtggatgggatctaccgcctctcaggggtctcctccaacatccagaagcttcggcaggaatttgagtcagagcggaagccagacctgcgtcgggatgtttacctccaagacattcactgcgtctcctccctgtgcaaggcctatttcagagaactgccggatcccctgctcacttaccggctctatgacaagtttgctgaggctgtaggagtgcaattggaacctgagcgcttggtcaagatcctagaggtgcttcgggaactccctgtcccaaactacaggaccctggagttcctcatgaggcacttggtacacatggcctcattcagtgcccagaccaacatgcatgctcgcaacctggccatcgtgtgggctcccaacctgctgaggtctaaggacatagaggcctcaggcttcaatgggacagcggccttcatggaggtgcgggtacaatccatcgtcgtggagttcatcctcacacacgtggaccagctctttgggggtgctgccctctctggtggtgaggtggagagtgggtggcgatcgcttccagggacccgggcatcaggcagccccgaggaccttatgcccaggccactgccttatcacctgcctagcatactgcaggctggcgatggacccccacagatgcggccctaccatactatcatcgagattgcagagcacaagaggaaggggtctttgaaggtcaggaagtggaggtctatcttcaatttaggtcgctctggccatgagactaagcgtaaacttccacggggggctgaggacagggaggataaatccaacaaggggacactgcggccagccaaaagcatggactcactgagtgctgcagctggggccagtgatgagccagaggggctggtggggcccagcagcccccggccaagcccattgctgcctgagagcttggagaacgattctatagaggcagcagagggtgaacaggagcctgaggcagaagcactgggtggcacaaactctgaaccaggcacaccacgagctgggcggtcagccatccgggctgggggcagcagccgtgcagaacgctgtgctggtgtccacatctcagacccctacaatgtcaacctcccgctacacatcacctctatcctcagtgtgcccccgaacatcatctctaacgtttccttggccaggctcacccgtggccttgagtgccctgctctacagcaccggccaagccctgcctctggccctggccctggccctggccttggccctggccccccagatgaaaagttggaagcaagtccagcctcaagtcccctggcagactcaggcccagacgacttggctcctgccctggaggactcgctgtcccaggaggtgcaggactccttctccttcctagaggactcaagcagctcagaacctgagtgggtgggggcagaggatggggaggtggcccaggcagaagcagcaggagcagccttctcccctggggaggacgaccctgggatgggctacctggaggagctcctgggagttgggcctcaggtggaggagttctctgtggagccacccctggatgacctgtctctggatgaggcacagtttgtcttggcccccagctgctgttccctggactccgctggccccaggcctgaagttgaggaggaaaatggggaggaagttttcctgagtgcctatgatgacctaagtccccttctgggacctaaacccccaatctggaagggttcagggagtctggagggagaggcagcaggatgtggaaggcaggctctgggacagggtggggaagagcaggcatgctgggaagttggggaggacaagcaggctgagcctggaggcaggctagacatcagggaagaggcagagggaaccccacagccacctcagccagaggagatggagcctgaggggcagcccagtccagacggctgtctatgcccctgttctcttggcctgggtggcgtgggcatgcgtctagcttccactctggttcaggtccaacaggtccgctctgtgcctgtggtgccccccaagccacagtttgccaagatgcccagtgcaatgtgtagcaagattcatgtggcacctgcaaatccatgcccgaggcctggccggcttgatgggactcctggagaaagggcttgggggtcccgagcttctcgatcctcttggaggaatgggggtagtctttcctttgatgctgctgtggccctagcccgggaccgccaaaggactgaggctcaaggagttcggcgaacccagacctgtactgagggtggggattactgcctcatccccagaacctccccttgtagcatgatctctgcccattctcctcggccccttagctgcctggagctcccatctgaaggtgcagaagggtctggatcccggagtcgtcttagtctgccccccagagaaccccaggttcctgaccccctgttgtcctctcagcgcaggtcatatgcatttgaaacacaggctaaccctgggaaaggtgaaggactgtgattaggaccacagccctgggcaaaggggaccagcaagttgtcttgaatctccagggttcctgactagctgtctcctctgcagcatgagcagctgtagtgcccaactctataggctttggccctccagcttctctctttgactgtgggaggcactgccttggttggtttacctgaacttgtctccgacacaaagcacttatctcttaggagattcccaagaaagtcaacaagatcttgttcccagggagtgggtcattggccaaagggaacataaggtaggcagaaaacttaaaagagtttgttaaagtgaagactggagaaattcctcccttcctctgagctgtgaatctctcttcatgaaagccaaaggtagagacagggaggacagggccaggttagggccttccacacacaaacacttctagagttgcccattcctgttatgttcttggaccctaagatacctcctgtcccttttaaatccagattaagagaaacgtccaggaagagctctttgaagccctcaatatttgttggagggactggactcctctccagctccccaccctctgcctccagtcaccatgtgcaagagaggtcctgtacagatctctctgggctctcctttctcctttggaataacttgttcctatttcaggaaagggaaatggtgtcactcaggccctgggactgcttctccagccaggctggggccacaggtcccactctagtgaaggtcaatgtctcagaataaaagctgtattttta

SEQ ID NO: 26293 - DNA, 2287 bp, Homo sapiens
  source 1..2287: mol_type = unassigned DNA
gcaaagatgctctaacaggaagtgggttaaggagctgcactgcttcctgccccctaaagctgagcggggcgaggagggcgagtgccaggctgggccacgagacacaggacacaatttcttgccagggtcctggtagcttcctcttcaacagccacttccgtgtggccggggccccaggggcaggagctgctgcccgttgcccaggccaccctccacccccaattgggagccctgcccccctggggccgggccaagcccagcagctggctgggatcccatgggggactggtagggcacaggtcttgggggatagaggtgaccgggccagtgccctggggctctggccatgaagtctcggcagaaaggaaagaagaagggcagcgcaaaggagcgggtttttgggtgcgacttgcaggagcacctgcagcactcaggccaggaggtgccccaggtgctaaagagctgtgcagaatttgtggaggagtatggagtggtggatgggatctaccgcctctcaggggtctcctccaacatccagaagcttcggcaggaatttgagtcagagcggaagccagacctgcgtcgggatgtttacctccaagacattcactgcgtctcctccctgtgcaaggcctatttcagagaactgccggatcccctgctcacttaccggctctatgacaagtttgctgaggctgtaggagtgcaattggaacctgagcgcttggtcaagatcctagaggtgcttcgggaactccctgtcccaaactacaggaccctggagttcctcatgaggcacttggtacacatggcctcattcagtgcccagaccaacatgcatgctcgcaacctggccatcgtgtgggctcccaacctgctgaggtctaaggacatagaggcctcaggcttcaatgggacagcggccttcatggaggtgcgggtacaatccatcgtcgtggagttcatcctcacacacgtggaccagctctttgggggtgctgccctctctggtggtgaggtggagagtgggtggcgatcgcttccagggacccgggcatcaggcagccccgaggaccttatgcccaggccactgccttatcacctgcctagcatactgcaggctggcgatggacccccacagatgcggccctaccatactatcatcgagattgcagagcacaagaggaaggggtctttgaaggtcaggaagtggaggtctatcttcaatttaggtcgctctggccatgagactaagcgtaaacttccacggggggctgaggacagggaggataaatccaacaaggggacactgcggccagccaaaagcatggactcactgagtgctgcagctggggccagtgatgagccagaggggctggtggggcccagcagcccccggccaagcccattgctgcctgagagcttggagaacgattctatagaggcagcagagggtgaacaggagcctgaggcagaagcactgggtggcacaaactctgaaccaggcacaccacgagctgggcggtcagccatccgggctgggggcagcagccgtgcagaacgctgtgctggtgtccacatctcagacccctacaatgtcaacctcccgctacacatcacctctatcctcagtgtgcccccgaacatcatctctaacgtttccttggccaggctcacccgtggccttgagtgccctgctctacagcaccggccaagccctgcctctggccctggccctggccctggccttggccctggccccccagatgaaaagttggaagcaagtccagcctcaagtcccctggcagactcaggcccagacgacttggctcctgccctggaggactcgctgtcccaggaggtgcaggactccttctccttcctagaggactcaagcagctcagaacctgagtgggtgggggcagaggatggggaggtggcccaggcagaagcagcaggagcagccttctcccctggggaggacgaccctgggatgggctacctggaggagctcctgggagttgggcctcaggtggaggagttctctgtggagccacccctggatgacctgtctctggatgaggcacagtttgtcttggcccccagctgctgttccctggactccgctggccccaggcctgaagttgaggaggaaaatggggaggaagttttcctgagtgcctatgatgacctaagtcctgccctgggactgcttctccagccaggctggggccacaggtcccactctagtgaaggtcaatgtctcagaataaaagctgtattttta

SEQ ID NO: 26294 - DNA, 9317 bp, Homo sapiens
  source 1..9317: mol_type = unassigned DNA
ggaaaaaaaggaaggcgtgagggcgggcagcagcgacaggatgcttgtttttcgctctaccaaagtcgtctgaaggcgagacagcgggcccagggcgcaggacccaccgcagccccctgggcagtctcctcgccccgcgtccgcgtcgtctccggggcacttagtaaggggtggggagagcttgccctccctcttaagctgaggagaaacacccgaagacaccgcaggagcctgtgaaagtccctaggactccaagtgaggaagtgacactcccaggcgagccggcccgcggctgccagtctgcacggcctcggcacggcggccccggagcggcgcggggtggatctcaggctctgccggcccgcggcccgcggggtccatgcgcagggcccccagcccaagttcttccatcttccgatgcggccccccagagccgcggggcagccggtgatctagcccgggagcccatcttacagcggtgccaagcagaggggcggcagagacggaggggcagcctctttgggactaactcatgaagaacaagggtgctaagcagaagctgaaacgaaagggagccgccagcgcgtttggctgtgacctgacggagtatctggaaagctcgggacaggatgttccatacgttttgaagagctgtgcagaatttatagagactcacggcatcgtggatggaatctatcggctttcaggagtcacctcaaacatacaacggctaaggcaagagtttggctcagatcaatgtccagatctgacaagggaagtgtacctccaggacatccactgtgtgggctcgctttgcaagctctactttagggagctgcccaaccccctcctgacttatgagctctatgagaaattcacggaggcagtgtcgcattgccctgaagaaggccaactggcccgaatccaaaatgttatccaggagcttcctccatcccactataggaccttggaatacctgattcgacacctggcccatatcgcctccttcagcagcaagaccaacatgcacgcccggaacctggccctggtgtgggcgccaaacctcctcaggtctaaagaaattgaagccactggttgcaatggagatgcagccttccttgcagtccgggtccagcaggtggtgattgagttcatattgaatcatgtagatcaaatctttaacaacggtgcacctgggtctctggagaatgatgaaaaccggcccatcatgaagagcctgaccttgccagccctctccctgcccatgaagctggtgagccttgaggaagctcaagcccgcagcctggccactaaccatcctgctcgcaaggaaaggagggagaacagcctgcctgagattgtccctcccatgggcaccctcttccacactgtccttgagttaccagacaacaagcgaaagctctccagtaaatcaaagaagtggaaatcaatatttaacctgggacgttctggatcagactccaaatcaaaactgagtagaaatgggagtgtatttgtgagaggacagaggctctcggtggaaaaggctactatccgaccagctaaaagcatggactcactatgttcagtgcctgtagaaggaaaagaaaccaagggaaatttcaatcgaacagttaccaccggtggatttttcattccagcaacaaagatgcactccaccggcaccggcagctcatgtgacctcaccaagcaggagggcgaatggggccaggaggggatgcctcccggggctgagggtggctttgatgtgagcagtgatcgcagccatctccagggcgctcaggcccggcccccaccggaacagctgaaggttttccggcctgttgaggatccggagagcgagcaaacagccccaaagatgttgggtatgttctacacttcgaacgacagccctagcaaatccgtcttcaccagcagcctcttccagatggagccctcgccgcgtaaccagcgcaaggcgctgaacatctccgagccctttgcggtatctgtgccgctccgcgtgtccgcagtcatcagcaccaacagcacgccgtgcagaacacccccgaaggagctgcagtctctttccagcctggaagagttttcttttcatggatcagagagcggaggctggccagaagaagagaaaccgctgggagctgagacttctgcagcttctgtacctaagaaggcaggtcttgaggatgccaaggcagtacctgaagcaccggggacagtggaatgcagcaaaggcctgtcccaggagccaggcgcccacctggaggagaagaaaaccccagaaagctccttgagctctcaacatttaaatgaattagagaagaggccaaatccggagaaggtggtggaggagggacgagaggctggtgagatggagtccagcaccctgcaggagagccccagggccagagccgaagctgtgcttctccatgagatggatgaagatgatctggccaatgccctgatctggcctgagattcaacaggagctgaaaatcattgaatctgaggaggagctctcatcgttgccacctcctgctctgaagaccagcccaattcagcctattctcgagtcgagtctggggccctttattccctcagagcctcctgggagcttgccttgtggctccttccctgctccagtctccacccctctggaggtgtggactagggatccagccaatcagagcacacagggggcttccacagcagccagcagagagaagccggaacctgagcagggcctgcacccagacctcgccagcctggctcctctggaaatagttccttttgagaaggcatctccacaagcaacagtggaagtaggaggcccaggcaatctgtctcctccactcccacctgctcctccccctccaactcctctggaggagtcaactccagtcctgctttcaaagggcggcccggaaagagaagactcatccaggaaattgaggacagatctctacatagaccagctgaagtcccaagacagccctgagatctctagcctctgtcagggagaggaggcaaccccaagacacagtgacaagcaaaattcaaagaatgctgcttctgaggggaaaggctgtggttttccaagcccaaccagggaggttgagatcgtctcacaagaagaggaggatgtaacccattcagtacaggagccttcagactgtgacgaagatgacactgtgacagacattgcccagcatggcctggagatggtggagccctgggaggaaccccagtgggtgacgagtccccttcactctcccaccctgaaagacgcgcacaaggcccaggtacagggccttcagggtcaccagttggagaagaggctttcccacaggcccagccttcgccagagccattctctagatagcaaacccacggttaaaagccagtggactctcgaggttccctcctccagcagctgtgctaatcttgaaacagagaggaattctgaccctcttcagccccaggcacccaggagagagattactggatgggatgagaaagccctgaggtccttcagagagttctctggcctgaaaggggcagaggctcctcccaaccagaagggaccaagtggtgtgcaacccaacccagcagaaaccagccccatcagcctagcagagggaaaggagctagggacacacctggggcacagcagtccacagattaggcaaggtggtgttcctgggccagagagcagcaaggagagttcacccagcgtgcaggacagcacttcgcctggagagcaccccgcaaagttacagctaaagagcacagagtgtgggcccccaaaagggaaaaacaggccttcttccctcaacttggaccctgccattcccattgctgacctcttctggtttgagaatgtggcctcatttagttcacctggaatgcaggtctctgagccaggagacccaaaggtcacatggatgacctcatcttactgtaaagcagacccctggagggtttactcccaggacccccaggacctggacattgttgctcatgcactgacaggccgccgtaactcagctcctgtgagtgtgtcagctgtgagaacctccttcatggtcaaaatgtgccaggccagggcggtcccagtcatccctcccaagattcagtacacccagatcccacagcccctgccctctcagagctcaggggagaatggggttcagcctctggagaggagccaggagggacccagctcaaccagtgggaccactcagaaacctgccaaagatgattctccctcctccctggaaagctcaaaggaagaaaaaccaaagcaagatcccggagccattaagtcctcaccagtggatgccactgcaccctgcatgtgcgagggacctaccctttctccagaaccaggctcgtctaacctgctctccacccaggatgcagtagtgcaatgcagaaagcgcatgtcagagacagagccatctggggacaaccttctttcttcaaaactagagcgaccatctgggggttctaagcctttccacaggtcaaggccaggaagacctcagagcctaatcttattcagtcctcctttccccattatggaccacctgcccccttcatccacagtgacagattccaaggtcctgctgtcccctatcagaagtcccacccagacagtttcccctggccttctttgtggagagttggcagaaaacacatgggtcacaccagaaggggttacacttaggaataaaatgaccatccctaagaatggccagagactagagacctcaaccagctgtttttaccagcctcagcggagatcagtaattctggatggaagaagtgggaggcaaatagaatgatttcggttcacctgctggtgtctgaaaaaaaccgtgattcatctggaagttattacagggccagcttgccatattccaggcacacgttatcaagtttgggcctattgtggcctctgacttctctttcttcagccttttgaccacttattaattagtccatttgctagaagagtggtcaagggaaaaacgagagatgaaatttagttaagtctatgtgagcaagtgagagaaggttaggtaaggggagaggatggaatgcttgcctccaatgaactttggagcttgtatgtgagtcagattgctcccctattgctattatctattactcttgagagctggctgtcctttgaaagaaagaagtaatgttctttgaaagaaagaaaaatctcttgctgtgtcaaacctcaaaatgttgctattggggttagaaggcctcctctttatgctttttaatgctctttcaaacgtgttcttttagaccagttttctaataagctttgtaaaatgtactatccaaattagaagcggatttggaaatgcaaactaacgtgcacttagatatccaagtgggtgagcttagccactcttacccatgctctttccctggaatccctggagacctgtccaagatgatttccatataccagcatagaaaatcagaatcaagagcaaactctgagactggcacaatccaagaagatttcctggctctggcttttagtaatttgggactccaactgccactgtactggactgtaatttataaatccagtagctacgcagggtggaggctgggctgaggattaccataatgaaatgtactaaatcttcatttaggtatgcaattgtgaagtgaaggcatctgctttctttacagtatcagagtccaagaacaggatgtcaccatagataaaagcctcatacaaaggcagaactacactccaaatttaatgtgtttaaattggtggggcaccagcagaaaatattctagctcagctttactcttcttccacactaggctgggcccagcaatacaggagaggatgaagggaggagctccaggaggcgagggaagagccctagcagggcggccatcacaaccactcactgagagttgcccttcttaaaaatgtattttattttagccagtgggtcccttcctttctcctttcctctctactgctcaagaacagatttgaggccaggtgcggtgcctcacatctgtaatcccaacactttgggaggctgagatgggtggattgcttgagcccaggagttcaagaccagcctgggcaacacagcgagaccccatctcttaaaaaataacagacttgaggaacccctctcccttccataattcccctcatccaccgcccactccaggcactcactcaaacttgctcttcaactctgtatacaagcagaagcaataaaccaatctgattttcttttcaattatttataactttcaatggttctttcctttccagctggcgagagaaaggagaactaatatacctgctggcagatttttggtgctgcccaaaaaaggacttcacagggcatctcttctcaggttcaagcctggctgaattctgcccagaagctcagtcattgcagaaatttctctaagggctgatagtacctctgggtaggcgtcacaaccaaggctggttctgggcttagtgggggctgagatgaagttacctcctccaatgagaaattgggagctgatgccctgcaacagatatatattcctctctctctctgtctctctatctctctcctccctctccctccctccctccccgccaataagccttacaaacagttttgaaatcttgttctgtaccttttaagccagtgtctgtggcgagggtgactggcaagtcagctgatgagttctgccttctgagagcactgagtgagcaaggcctttcatcagtgttttggccttctcattgggtgaggaagacattgaaccaacagccaacgagatatgaacctgtaagaaaaaagtcctagaatatagtatttttccccaggccagcaaagtgaagaaatacagtggtgacagatgagaaaggccatgttcaagagatctgaaaagtacattcctgccttatcagaaaatgtgtcagacaggttttatgtcagcctcagtgctcctgcggtgtcgacgctctgataaggaccatgttccagttagaatgcgagggagggaaagagctgcactttgcttcaccatcagaactctgagccaaataatgaatatgtaaactattttatgattattttaaatgtttgtttggtaacatttataagatctatttttatttggggatagactgagaagccaccatttacatattaacaagtgacttcagttctaagggttgagatgcctgtgtggatttataaaatggttgcaagatcttttagactctgacatttatagcatcaccttcaggaacacagttctggggatgtcatcatgagacacactgacagctgtggagatagtccctactctcagctttccttgctagtcaagtccaaaaggccttagaagctgactcaccttctcagccagagtcctgctgctcaagtgtggacctccactttgactctcacccagcctgccagccatcacaaaggctttcataaacttcctgtggtctgggctagcctggcactgatgaaattccattctaaagaaagaaaactcatattcctcccccccacaaattgttcccccaaatgctctgggattacctatttcaccactcatttgagtctccgaaaaatgaactccctgagaatggctggatgggaatcagatagtctgcttccattcaggagagggacagaacaggagctgctgtgtttaggaggatttacctggtgccctagaaagggctatgcaatcaaattctcaagggctccttcaaatcagctatcagtcctcaaaatgggggttgctgatgttaaatgatggatttgcagtgaaacgcatgcatgtactgacgttttctttcagcattagtggttgcttaagaaaatagtaacctatattttctgctacacttggaatatgaagaaatctgaacaagaaccccattaagacacctaacctaatctaaaccctaaaattcaaaatattgtccaagtcaaaagtctagactctgaggacattaaaaatgtaaatatcatcatccttagcaaatatttattgggagcttagtaatagtgcactgggtaccttagcactcccaaatcattcaagagtctagtgaaaaagggggagggatggcagcaaataaaacacccccataaacaaccaggagcaaggttgagaaccattaagttgccaaacaaaagcagaaggggaaaaagtgtggcaacaagcatcttttaataggatagttgacggtattcaagtgacctactgactccaaataatcaaattgaacacaattgcaaatccaatagaacatcccagtgagacactcgggtatttgagaactttgcttgatttagaaaactggaaagtggcaactaggctagaatagtggcaactaggttcggaggtttcgtgtggtcataattggtttggtgaagtgtgagatctctgcaaatgagccaggtaagatcagtattccatagtgcttgaaaaggggattttagagacttctgtcatcacaaagcagattaactcctagttaatgatgaagcagtaggcccaagataaactgttcaattcaagataaattgttcttgtcagtgtttggcatatgataatcacatttggctaaaattggatgggacagtcatttgtctacacaggccttccattcctgcatgaagagatactggggagcatacaattattttgtccagtattagagtgggagaagttctcagtaagtccagtcccaccaggatttatttgggccacattctaccacggccagtccaatctgatgaccacatgaattggggttaagtgttgctaagactatgattttagacatgtctggcaggaaggtcagctcaaaatgtggcatgacaaagaatatgtgctctactaccaaaacctttcctagcaaaacaaggccagaagagggagcaagcatctttccaagcatggagaggagggggcaatggtggaagggtgattgcctgaaatcagtgccagtacagatagcataaaattgggggccaccacagattggctggctactgtgtagatcatttagtaatcttgaggtacattaataatgcagagattacttttctgtgagggtaagggggacgtagctaaatataagaagcttacaaggtccatagccatgtattttactggataaatcacaatgctttgcaataacttaatgtcatagtactttctggcttataattctgcaaagtaaagcactttttcaaagga

SEQ ID NO: 26295 - DNA, 3716 bp, Homo sapiens
  source 1..3716: mol_type = unassigned DNA
tcttccatcttccgatgcggccccccagagccgcggggcagccggtgatctagcccgggagcccatcttacagcggtgccaagcagaggggcggcagagacggaggggcagcctctttgggactaactcatgaagaacaagggtgctaagcagaagctgaaacgaaagggagccgccagcgcgtttggctgtgacctgacggagtatctggaaagctcgggacaggatgttccatacgttttgaagagctgtgcagaatttatagagactcacggcatcgtggatggaatctatcggctttcaggagtcacctcaaacatacaacggctaaggcaagagtttggctcagatcaatgtccagatctgacaagggaagtgtacctccaggacatccactgtgtgggctcgctttgcaagctctactttagggagctgcccaaccccctcctgacttatgagctctatgagaaattcacggaggcagtgtcgcattgccctgaagaaggccaactggcccgaatccaaaatgttatccaggagcttcctccatcccactataggaccttggaatacctgattcgacacctggcccatatcgcctccttcagcagcaagaccaacatgcacgcccggaacctggccctggtgtgggcgccaaacctcctcaggtctaaagaaattgaagccactggttgcaatggagatgcagccttccttgcagtccgggtccagcaggtggtgattgagttcatattgaatcatgtagatcaaatctttaacaacggtgcacctgggtctctggagaatgatgaaaaccggcccatcatgaagagcctgaccttgccagccctctccctgcccatgaagctggtgagccttgaggaagctcaagcccgcagcctggccactaaccatcctgctcgcaaggaaaggagggagaacagcctgcctgagattgtccctcccatgggcaccctcttccacactgtccttgagttaccagacaacaagcgaaagctctccagtaaatcaaagaagtggaaatcaatatttaacctgggacgttctggatcagactccaaatcaaaactgagtagaaatgggagtgtatttgtgagaggacagaggctctcggtggaaaaggctactatccgaccagctaaaagcatggactcactatgttcagtgcctgtagaaggaaaagaaaccaagggaaatttcaatcgaacagttaccaccggtggatttttcattccagcaacaaagatgcactccaccggcaccggcagctcatgtgacctcaccaagcaggagggcgaatggggccaggaggggatgcctcccggggctgagggtggctttgatgtgagcagtgatcgcagccatctccagggcgctcaggcccggcccccaccggaacagctgaaggttttccggcctgttgaggatccggagagcgagcaaacagccccaaagatgttgggtatgttctacacttcgaacgacagccctagcaaatccgtcttcaccagcagcctcttccagatggagccctcgccgcgtaaccagcgcaaggcgctgaacatctccgagccctttgcggtatctgtgccgctccgcgtgtccgcagtcatcagcaccaacagcacgccgtgcagaacacccccgaaggagctgcagtctctttccagcctggaagagttttcttttcatggatcagagagcggaggctggccagaagaagagaaaccgctgggagctgagacttctgcagcttctgtacctaagaaggcaggtcttgaggatgccaaggcagtacctgaagcaccggggacagtggaatgcagcaaaggcctgtcccaggagccaggcgcccacctggaggagaagaaaaccccagaaagctccttgagctctcaacatttaaatgaattagagaagaggccaaatccggagaaggtggtggaggagggacgagaggctggtgagatggagtccagcaccctgcaggagagccccagggccagagccgaagctgtgcttctccatgagatggatgaagatgatctggccaatgccctgatctggcctgagattcaacaggagctgaaaatcattgaatctgaggaggagctctcatcgttgccacctcctgctctgaagaccagcccaattcagcctattctcgagtcgagtctggggccctttattccctcagagcctcctgggagcttgccttgtggctccttccctgctccagtctccacccctctggaggtgtggactagggatccagccaatcagagcacacagggggcttccacagcagccagcagagagaagccggaacctgagcagggcctgcacccagacctcgccagcctggctcctctggaaatagttccttttgagaaggcatctccacaagcaacagtggaagtaggaggcccaggcaatctgtctcctccactcccacctgctcctccccctccaactcctctggaggagtcaactccagtcctgctttcaaagggcggcccggaaagagaagactcatccaggaaattgaggacagatctctacatagaccagctgaagtcccaagacagccctgagatctctagcctctgtcagggagaggaggcaaccccaagacacagtgacaagcaaaattcaaagaatgctgcttctgaggggaaaggctgtggttttccaagcccaaccagggaggttgagatcgtctcacaagaagaggaggatgtaacccattcagtacaggagccttcagactgtgacgaagatgacactgtgacagacattgcccagcatggcctggagatggtggagccctgggaggaaccccagtgggtgacgagtccccttcactctcccaccctgaaagacgcgcacaaggcccaggtacagggccttcagggtcaccagttggagaagaggctttcccacaggcccagccttcgccagagccattctctagatagcaaacccacggttaaaagccagtggactctcgaggttccctcctccagcagctgtgctaatcttgaaacagagaggaattctgaccctcttcagccccaggcacccaggagagagattactggatgggatgagaaagccctgaggtccttcagagagttctctggcctgaaaggggcagaggctcctcccaaccagaagggaccaagtggtgtgcaacccaacccagctcaaccagtgggaccactcagaaacctgccaaagatgattctccctcctccctggaaagctcaaaggaagaaaaaccaaagcaagatcccggagccattaagtcctcaccagtggatgccactgcaccctgcatgtgcgagggacctaccctttctccagaaccaggctcgtctaacctgctctccacccaggatgcagtagtgcaatgcagaaagcgcatgtcagagacagagccatctggggacaaccttctttcttcaaaactagagcgaccatctgggggttctaagcctttccacaggtcaaggccaggaagacctcagagcctaatcttattcagtcctcctttccccattatggaccacctgcccccttcatccacagtgacagattccaaggtcctgctgtcccctatcagaagtcccacccagacagtttcccctggccttctttgtggagagttggcagaaaacacatgggtcacacca

SEQ ID NO: 26296 - DNA, 9604 bp, Homo sapiens
  source 1..9604: mol_type = unassigned DNA
ctcggtgagcgcgccgaggaagagaggcgagcggagagtggaggaggaggcggcggcggcgggagcggtccccaggaatgtcgctgccgccgccaccgccggggccgctgccgttgaggaggagacggaggagaccgacgttgttaggaagatgatccctatgatcttgaagatgtttctgcacagaaatgagggaaatacaaagaaccaaatacagttctgaaatttgggatctgtattttgagatgattttattttcagaatgagaagcatatctggttacctttatgaatgtagagacatgagaagagagttatgatggcaaaaaacaaagagcctcgtcccccatcctataccatcagtatagttggactctctgggactgaaaaagacaaaggtaactgtggagttggaaagtcttgtttgtgcaatagatttgtacgctcaaaagcagatgaatattatccagagcatacttctgtgcttagcaccattgactttggaggacgagtagtaaacaatgatcactttttgtactggggtgacataatacaaaatagtgaagatggagtagaatgcaaaattcatgtcattgaacaaacagagttcattgatgaccagactttcttgcctcatcggagtacgaatttgcaaccatatataaaacgtgcagctgcatctaaattgcagtcagcagaaaaactaatgtacatttgcactgatcagctaggcttagaacaagactttgaacagaagcaaatgcctgaagggaagctcaacgtagatggatttttattatgcattgatgtaagtcaaggatgcaataggaagtttgatgatcaacttaaatttgtgaataacctttttgtccagttatcaaaatcaaaaaaacctgtaataatagcagcaactaaatgtgatgaatgcgtggatcattatcttagagaagttcaggcatttgcttcaaataaaaagaaccttcttgtagtggaaacatcagcacgatttaatgtcaacattgaaacatgttttactgcactggtacaaatgttggataaaactcgtagcaagcctaaaattattccctatttggatgcttataaaacacagagacaacttgttgtcacagcaacagataagtttgaaaaacttgtgcagactgtgagagattatcatgcaacttggaaaactgttagtaataaattaaaaaatcatcctgattatgaagaatacatcaacttagagggaacaagaaaggccagaaatacattctcaaaacatatagaacaacttaaacaggaacatataagaaaaaggagagaagagtatataaatactttaccaagagcttttaacactcttttgccaaatctagaagagattgaacatttgaattggtcagaagctttgaagttaatggaaaagagagcagatttccagttatgttttgtggtgctagaaaaaactccttgggatgaaactgaccatatagacaaaattaatgataggcggattccatttgacctcctgagcactttagaagctgaaaaagtctatcagaaccatgtacagcatctgatatccgagaagaggagggtggaaatgaaggaaaaattcaaaaagactttggaaaaaattcaattcatttcaccagggcagccatgggaggaagttatgtgctttgttatggaggatgaagcctacaaatatatcactgaggctgatagcaaagaggtatatggtaggcatcagcgagaaatagttgaaaaagccaaagaagagtttcaagaaatgctttttgagcattctgaacttttttatgatttagatcttaatgcaacacctagttcagataaaatgagtgaaattcatacagttctgagtgaagaacctagatataaagctttacagaaacttgcacctgatagggaatcccttctacttaagcatataggatttgtttatcatcccactaaagaaacatgtcttagtggccaaaattgtacagacattaaagtggagcagttacttgctagtagtcttttacagttggatcatggccgcttaagattatatcacgatagtaccaatatagataaagttaacctttttattttagggaaggatggccttgcccaagaactagcaaatgagataaggacacaatccactgatgatgagtatgccttagatggaaaaatttatgaacttgatcttcggccggttgatgccaaatcgccttactttttgagtcagttatggactgccgcctttaaaccacatgggtgcttctgtgtatttaattccattgagtcattgagttttattggggaatttattgggaaaataagaactgaagcttctcagatcagaaaagataaatacatggctaatcttccatttacattaattctggctaatcagagagattccattagtaagaatctaccaattctcaggcaccaagggcagcagttggcaaacaagttgcaatgtccttttgtagatgtacctgctggtacatatcctcgtaaatttaatgaaacccaaataaagcaagctctcagaggagtattggaatcagttaaacacaatttggatgtggtgagcccaattcctgccaataaggacttatcagaagctgacttgagaattgtcatgtgcgccatgtgtggagatccatttagtgtggatcttattctttcacccttccttgattctcattcttgcagtgctgctcaagctggacagaataattccctaatgcttgataaaatcattggtgaaaaaaggaggcgaatacagatcacaatattatcataccactcttcaattggagtaagaaaagatgaactagttcatgggtatatattagtttactctgcaaaacggaaagcttcgatgggaatgcttcgagcatttctatcagaagttcaagacaccattcctgtacagctggtggcagttactgacagccaagcagatttttttgaaaatgaggctatcaaagagttaatgactgaaggagaacacattgcaactgagatcactgctaaatttacagcactgtattctttatctcagtatcatcggcaaactgaggtctttactctgttttttagtgatgttctagagaaaaaaaatatgatagaaaattcttatttgtctgataatacaagggaatcaacccatcaaagtgaagatgtttttctaccatctcccagagactgttttccctataataactaccctgattcagatgatgacacagaagcaccacctccttatagtccaattggggatgatgtacagttgcttccaacacctagtgaccgttccagatatagattagatttggaaggaaatgagtatcctattcatagtaccccaaactgtcatgaccatgaacgcaaccataaagtgcctccacctattaaacctaaaccagttgtacctaagacaaatgtgaaaaaactcgatccaaaccttttaaaaacaattgaagctggtattggtaaaaatccaagaaagcagacttcccgggtgcctttggcacatcctgaagatatggatccttcagataactatgcggaacccattgatacaattttcaaacagaagggctattctgatgagatttatgttgtcccagatgatagtcaaaatcgtattaaaattcgaaactcatttgtaaataacacccaaggagatgaagaaaatgggttttctgatagaacctcaaaaagtcatggggaacggaggccttcaaaatacaaatataaatctaaaaccttgtttagtaaagccaagtcatactatagaagaacacattcagatgccagtgatgatgaggctttcaccacttctaaaacaaaaagaaaaggaagacatcgtggaagtgaagaagatccacttctttctcctgttgaaacttggaaaggtggtattgataatcctgcaatcacttctgaccaggagttagatgataagaagatgaagaagaaaacccacaaagtgaaagaagataaaaagcagaaaaagaaaactaagaacttcaatccaccaacacgtagaaattgggaaagtaattactttgggatgcccctccaggatctggttacagctgagaagcccataccactatttgttgagaaatgtgtggaatttattgaagatacagggttatgtaccgaaggactctaccgtgtcagcgggaataaaactgaccaagacaatattcaaaagcagtttgatcaagatcataatatcaatctagtgtcaatggaagtaacagtaaatgctgtagctggagcccttaaagctttctttgcagatctgccagatcctttaattccatattctcttcatccagaactattggaagcagcaaaaatcccggataaaacagaacgtcttcatgccttgaaagaaattgttaagaaatttcatcctgtaaactatgatgtattcagatacgtgataacacatctaaacagggttagtcagcaacataaaatcaacctaatgacagcagacaacttatccatctgtttttggccaaccttgatgagacctgattttgaaaatcgagagtttctgtctactactaagattcatcaatctgttgttgaaacattcattcagcagtgtcagtttttcttttacaatggagaaattgtagaaacgacaaacattgtggctcctccaccaccttcaaacccaggacagttggtggaaccaatggtgccacttcagttgccgccaccattgcaacctcagctgatacaaccacaattacaaacggatcctcttggtattatatgagtaggaagtgattgcaaacaggctggatttggacaaaaagcaaatctagacatgcatgtttcagggttcagtagtatacttcatgtttcatacagataattcacattcaaaattacattttctctttgaactagatggtattccttattcacttacattacaaatctaagaccatgtgataagcatgactggagaggtttaatttttataaacaaaaatagctataaagtacaaagctgctgctgcatgcaaccttattgcaatcagtatatcattcctgtggcaatttctgtcaccttatattgtgaataaaatttttctatagaaattaaatgatttaaaaactcacctatatgaaacatttaatgcttttcagcctgctttctggctgattttgttatttgatgtgctaatttgggcaacttaatttacattctggcagtcggtgtagataactaaaagcccagttaagtattttataatttcaggctactgaggccatgcttgggatgttgtttgaaagaaagaaaaaatacacttgacatatttcacatttctgtaccttcatctttacttccaagtaaacccgtggatgatttgatgagggataaatgaacctatttcttttacacacataccaaggacatgcttgtggctaaagtgagttgataatgttgtgcaaaggatagttgtcaccaactcatttctttatggtccataatgaaataaaaattttgtatactgttaattctgtaaacagatgcatgttcaaaagatctatgatggtcttgtaatcttaatctaatatattttagatattttaattttttccctcttggggaacacatttagtatagtgtagaaaatacttccatgacattttcatataaggttatataacttttcatacataaacatgaaatttgttgtagaaaattctttaaaccaaacatttaaatctaggacttcaatttaatttgttccttgaatctatttttatgtggcccttaaaaaatatccaaaaaacccattgctaatatagcaataaaaatactttgggtactgacagactctttggagtgtttatattacaaatttgtattcatattcttttctgtgatgtgttgtactaaaatccaaaatggcttttgcaccatttttaagccaattttttcctttgatgttggtaccagaattactataagtgactgctgcttttgggggtaaacattttgttagtgaagataaaaccagaacactaaattatggataaaattttcagaataggtggcacaggtaaatttcactaggttatattttgtgtagtaaagaaaaaaattatttggtcaatgttatcttaattcatactacaatttaagattatcttatgtgtattatagtaaatagatgattttcagattcaaggctcctaagagtttgatttgctctgttttttcctaaaataaatattgtctctcccaactgttaagttctaggtattgtacttccaattttaacttcagaaccaagatgttggcatgaaccaggctgctgttgaagtacatgtatattataaattatcttatttgtgttatactcttacatgttatcttttctaagaaaacaaagtccctattattcctattgcaaagcacacaggaattaagaaagtacagtaatttttaaaaaaaaatccggtaaatgtagtattcttaacctgttctatattacttatacctattgtctatatagctttaatttatagttgtcagtttaactattggcatgtctggcaaagaaaattaaactttaagagttttataaactgtttctaggttgctaaagaatttatttttctactatatatggtatagacaaagcatcaaactatgtacaggaaaaaagcctgactatttctatttggaagtaggctgaaaagagaattttcaaaactgttcgtgtcttcagttcattctgtcataactttgctattgtaatatgtgaataccagtttatttaagctgttctcttttatactgtattaatttaatgttcatctgcgtttagtaccatttttgttattaaaactggcatttaccgtttttcacattaacccaccttgcaccttcccccaaacttatctccacttttctatgcattctatcattgatttgacacacttcatagtgagtcatttaaatactctacgtttggttcaattaaccagtaggttacagttattgaaaattaaagtacagtttaaagctcagtctgttacactgaattgattgtgtttgtttttgccaagggtttagatatgcttttaaatattagaaacatctaagaacagaataacataattaaacttttttctggtaagttactggaaggtttcactgtttagggacctatcatatgagacttcttaaaggattaaaagaataggatagtctcataattgtgagtaaacatcaaggcattatattttacaatactgaataaaatttcatctacacacatgttgccattgtttcatttaaggttcagtgcttatagttaactacaatattggacctaacaggatctagattagcaatataaagaagcatagtggtactctgtttcacactttcagtagatttattagaagtcaaattctattcaacagacacttattaggatatacaactaatttaagaataaaattccaggcacaatatattttttttaaatggtatttgttagtagtgcttcttccccttaacatttacagtgtaaatactgcaggtaaccgcaatctaagttagccaaaaagcagctttttttcccatactgtatgtaaataatgtagacctgggtttttttgtttatttgggtttgtttttttttttgaggtactggaatctaattaatatctcttaggtatcaacaaaagggaacaattggaatgagaatttaggccttagcttccatggtgatttttagttttttatacagtaataattgtgatgctatttgtcaactggatataaatacacatataattttaaaaagtcaaaagtgcttttgtttctttgtttaatgtaatttttgtgcttcacctacaggatgctgcagtaaattaaatatcagtgaagcttctgatgtataaagaatgctatgaataaaacattaagaagctgtgtaattttaagttatagttgcctctatttttaccatttcattggtaaaaattagctaatttttttcaagtgaaatgaaaaataaaaatataaatttatcaatatgatggaaatcttattaaggagatgtattattgaattttcactgtacctgaaaaggagattcaaaattttttctggggatgtatataggtgaaaatttgattttttaaattatcaggaaaacaagataatgcacagatttctaagactaagatcttacctggatgtgatttttgagctgtggctagacattctttagagccactggaaatattttgaaaactattctagttatagcagagctgctaatattaacgaatatatttgtgtcttcatggtttgtgactattaggccaaattttgtggtatatgttgtcagtctggatctggtgaggtctgttcaacatgaatctttgtgttatcttgaatttagtagtttcaaggtacttaaattcttaacagtttctaatttgtttcaatacatatgggacatggttgatttttttactgtattagaactcttggaagttcttagccttttcaggttatgaaatacctgaaagtaaaattttctaagatttaataagggaagatactattcaaatcattttcttaggatagcatctttacatacaatgagaggattgtacaagcattaatctcatattccaacatccagttacttgatgtgatccaagtaccctggtctttttgaagcagttaaaatctaattaattaactttgggagtcttcactattcaattgatcctcatcattgtcctatttgcatgactccattttttcctccactatatgagttttctttgtcagggggagaggagtgggaagagtcacagaatctcatattcacatcttaattaaattgtgtgaaattagtcttttgtggaaattctgtaggcagtatgattttgaaaagctaaccaatgataattagcattttagttaatactaaatgcataaaattataacccttgaaattaatttggtgctggcagttctggtttagtcatttttaccagtagttagtagtattaagacctgcagtatatgcactttttgagtagctgtcaaataattgtagttgagaaacaacttgtttattctcacaattcagattttctattcagttttgtctcaaatagtaagttattgtgaacaatttaataacggccctcctgttctagtttgcctaatattttagttaagatttagtgttttaacctatttttttaagtttattttttgtattagattttatttgaataagttatgtgggtttagtaattgacctatttattcattgcttcactaattcatccagattagttttaagtgtgtatatgtatttgctcaccagatcattttcttgggaccttgaactgtgaatgttttgtcctaaccatttaatattttctaggtacttgctgcaagttcttgaactattttaccagctttaactttggggctcttagtttcttttctccagattcttgttattttattttatccaaataaatatttaggtgttctaagaa

SEQ ID NO: 26297 - DNA, 4306 bp, Homo sapiens
  source 1..4306: mol_type = unassigned DNA
agagaaatccgtcagcgcgagggagcccgagtggccgccattactgagcccggcgcggcggcgggcgctggggaaggggggagggacgggccgccgctggtggcggggagggagggagggagggtgggtgagctggctgcgggagccgtggggctcagggtttcggggcgtgtgtgtcggggagggcggggggaggtggctgaagggacgcgccgctcggtgagcgcgccgaggaagagaggcgagcggagagtggaggaggaggcggcggcggcgggagcggtccccaggaatgtcgctgccgccgccaccgccggggccgctgccgttgaggaggagacggaggagaccgacgttgttagggttatgtaccgaaggactctaccgtgtcagcgggaataaaactgaccaagacaatattcaaaagcagtttgatcaagatcataatatcaatctagtgtcaatggaagtaacagtaaatgctgtagctggagcccttaaagctttctttgcagatctgccagatcctttaattccatattctcttcatccagaactattggaagcagcaaaaatcccggataaaacagaacgtcttcatgccttgaaagaaattgttaagaaatttcatcctgtaaactatgatgtattcagatacgtgataacacatctaaacagggttagtcagcaacataaaatcaacctaatgacagcagacaacttatccatctgtttttggccaaccttgatgagacctgattttgaaaatcgagagtttctgtctactactaagattcatcaatctgttgttgaaacattcattcagcagtgtcagtttttcttttacaatggagaaattgtagaaacgacaaacattgtggctcctccaccaccttcaaacccaggacagttggtggaaccaatggtgccacttcagttgccgccaccattgcaacctcagctgatacaaccacaattacaaacggatcctcttggtattatatgagtaggaagtgattgcaaacaggctggatttggacaaaaagcaaatctagacatgcatgtttcagggttcagtagtatacttcatgtttcatacagataattcacattcaaaattacattttctctttgaactagatggtattccttattcacttacattacaaatctaagaccatgtgataagcatgactggagaggtttaatttttataaacaaaaatagctataaagtacaaagctgctgctgcatgcaaccttattgcaatcagtatatcattcctgtggcaatttctgtcaccttatattgtgaataaaatttttctatagaaattaaatgatttaaaaactcacctatatgaaacatttaatgcttttcagcctgctttctggctgattttgttatttgatgtgctaatttgggcaacttaatttacattctggcagtcggtgtagataactaaaagcccagttaagtattttataatttcaggctactgaggccatgcttgggatgttgtttgaaagaaagaaaaaatacacttgacatatttcacatttctgtaccttcatctttacttccaagtaaacccgtggatgatttgatgagggataaatgaacctatttcttttacacacataccaaggacatgcttgtggctaaagtgagttgataatgttgtgcaaaggatagttgtcaccaactcatttctttatggtccataatgaaataaaaattttgtatactgttaattctgtaaacagatgcatgttcaaaagatctatgatggtcttgtaatcttaatctaatatattttagatattttaattttttccctcttggggaacacatttagtatagtgtagaaaatacttccatgacattttcatataaggttatataacttttcatacataaacatgaaatttgttgtagaaaattctttaaaccaaacatttaaatctaggacttcaatttaatttgttccttgaatctatttttatgtggcccttaaaaaatatccaaaaaacccattgctaatatagcaataaaaatactttgggtactgacagactctttggagtgtttatattacaaatttgtattcatattcttttctgtgatgtgttgtactaaaatccaaaatggcttttgcaccatttttaagccaattttttcctttgatgttggtaccagaattactataagtgactgctgcttttgggggtaaacattttgttagtgaagataaaaccagaacactaaattatggataaaattttcagaataggtggcacaggtaaatttcactaggttatattttgtgtagtaaagaaaaaaattatttggtcaatgttatcttaattcatactacaatttaagattatcttatgtgtattatagtaaatagatgattttcagattcaaggctcctaagagtttgatttgctctgttttttcctaaaataaatattgtctctcccaactgttaagttctaggtattgtacttccaattttaacttcagaaccaagatgttggcatgaaccaggctgctgttgaagtacatgtatattataaattatcttatttgtgttatactcttacatgttatcttttctaagaaaacaaagtccctattattcctattgcaaagcacacaggaattaagaaagtacagtaatttttaaaaaaaaatccggtaaatgtagtattcttaacctgttctatattacttatacctattgtctatatagctttaatttatagttgtcagtttaactattggcatgtctggcaaagaaaattaaactttaagagttttataaactgtttctaggttgctaaagaatttatttttctactatatatggtatagacaaagcatcaaactatgtacaggaaaaaagcctgactatttctatttggaagtaggctgaaaagagaattttcaaaactgttcgtgtcttcagttcattctgtcataactttgctattgtaatatgtgaataccagtttatttaagctgttctcttttatactgtattaatttaatgttcatctgcgtttagtaccatttttgttattaaaactggcatttaccgtttttcacattaacccaccttgcaccttcccccaaacttatctccacttttctatgcattctatcattgatttgacacacttcatagtgagtcatttaaatactctacgtttggttcaattaaccagtaggttacagttattgaaaattaaagtacagtttaaagctcagtctgttacactgaattgattgtgtttgtttttgccaagggtttagatatgcttttaaatattagaaacatctaagaacagaataacataattaaacttttttctggtaagttactggaaggtttcactgtttagggacctatcatatgagacttcttaaaggattaaaagaataggatagtctcataattgtgagtaaacatcaaggcattatattttacaatactgaataaaatttcatctacacacatgttgccattgtttcatttaaggttcagtgcttatagttaactacaatattggacctaacaggatctagattagcaatataaagaagcatagtggtactctgtttcacactttcagtagatttattagaagtcaaattctattcaacagacacttattaggatatacaactaatttaagaataaaattccaggcacaatatattttttttaaatggtatttgttagtagtgcttcttccccttaacatttacagtgtaaatactgcaggtaaccgcaatctaagttagccaaaaagcagctttttttcccatactgtatgtaaataatgtagacctgggtttttttgtttatttgggtttgtttttttttttgaggtactggaatctaattaatatctcttaggtatcaacaaaagggaacaattggaatgagaatttaggccttagcttccatggtgatttttagttttttatacagtaataattgtgatgctatttgtcaactggatataaatacacatataattttaaaaagtcaaaagtgcttttgtttctttgtttaatgtaatttttgtgcttcacctacaggatgctgcagtaaattaaatatcagtgaagcttctgatgtataaagaatgctatgaataaaacattaagaagctgtgtaattttaagttatagttgcctctatttttaccatttcattggtaaaaattagctaatttttttcaagtgaaatgaaaaataaaaatataaatttatcaatatgatggaaatctta

SEQ ID NO: 26298 - DNA, 9601 bp, Homo sapiens
  source 1..9601: mol_type = unassigned DNA
ctcggtgagcgcgccgaggaagagaggcgagcggagagtggaggaggaggcggcggcggcgggagcggtccccaggaatgtcgctgccgccgccaccgccggggccgctgccgttgaggaggagacggaggagaccgacgttgttaggaagatgatccctatgatcttgaagatgtttctgcacagaaatgagggaaatacaaagaaccaaatacagttctgaaatttgggatctgtattttgagatgattttattttcagaatgagaagcatatctggttacctttatgaatgtagagacatgagaagagagttatgatggcaaaaaacaaagagcctcgtcccccatcctataccatcagtatagttggactctctgggactgaaaaagacaaaggtaactgtggagttggaaagtcttgtttgtgcaatagatttgtacgctcaaaagcagatgaatattatccagagcatacttctgtgcttagcaccattgactttggaggacgagtagtaaacaatgatcactttttgtactggggtgacataatacaaaatagtgaagatggagtagaatgcaaaattcatgtcattgaacaaacagagttcattgatgaccagactttcttgcctcatcggagtacgaatttgcaaccatatataaaacgtgcagctgcatctaaattgcagtcagcagaaaaactaatgtacatttgcactgatcagctaggcttagaacaagactttgaacagaagcaaatgcctgaagggaagctcaacgtagatggatttttattatgcattgatgtaagtcaaggatgcaataggaagtttgatgatcaacttaaatttgtgaataacctttttgtccagttatcaaaatcaaaaaaacctgtaataatagcagcaactaaatgtgatgaatgcgtggatcattatcttagagaagttcaggcatttgcttcaaataaaaagaaccttcttgtagtggaaacatcagcacgatttaatgtcaacattgaaacatgttttactgcactggtacaaatgttggataaaactcgtagcaagcctaaaattattccctatttggatgcttataaaacacagagacaacttgttgtcacagcaacagataagtttgaaaaacttgtgcagactgtgagagattatcatgcaacttggaaaactgttagtaataaattaaaaaatcatcctgattatgaagaatacatcaacttagagggaacaagaaaggccagaaatacattctcaaaacatatagaacaacttaaacaggaacatataagaaaaaggagagaagagtatataaatactttaccaagagcttttaacactcttttgccaaatctagaagagattgaacatttgaattggtcagaagctttgaagttaatggaaaagagagcagatttccagttatgttttgtggtgctagaaaaaactccttgggatgaaactgaccatatagacaaaattaatgataggcggattccatttgacctcctgagcactttagaagctgaaaaagtctatcagaaccatgtacagcatctgatatccgagaagaggagggtggaaatgaaggaaaaattcaaaaagactttggaaaaaattcaattcatttcaccagggcagccatgggaggaagttatgtgctttgttatggaggatgaagcctacaaatatatcactgaggctgatagcaaagaggtatatggtaggcatcagcgagaaatagttgaaaaagccaaagaagagtttcaagaaatgctttttgagcattctgaacttttttatgatttagatcttaatgcaacacctagttcagataaaatgagtgaaattcatacagttctgagtgaagaacctagatataaagctttacagaaacttgcacctgatagggaatcccttctacttaagcatataggatttgtttatcatcccactaaagaaacatgtcttagtggccaaaattgtacagacattaaagtggagcagttacttgctagtagtcttttacagttggatcatggccgcttaagattatatcacgatagtaccaatatagataaagttaacctttttattttagggaaggatggccttgcccaagaactagcaaatgagataaggacacaatccactgatgatgagtatgccttagatggaaaaatttatgaacttgatcttcggccggttgatgccaaatcgccttactttttgagtcagttatggactgccgcctttaaaccacatgggtgcttctgtgtatttaattccattgagtcattgagttttattggggaatttattgggaaaataagaactgaagcttctcagatcagaaaagataaatacatggctaatcttccatttacattaattctggctaatcagagagattccattagtaagaatctaccaattctcaggcaccaagggcagcagttggcaaacaagttgcaatgtccttttgtagatgtacctgctggtacatatcctcgtaaatttaatgaaacccaaataaagcaagctctcagaggagtattggaatcagttaaacacaatttggatgtggtgagcccaattcctgccaataaggacttatcagaagctgacttgagaattgtcatgtgcgccatgtgtggagatccatttagtgtggatcttattctttcacccttccttgattctcattcttgcagtgctgctcaagctggacagaataattccctaatgcttgataaaatcattggtgaaaaaaggaggcgaatacagatcacaatattatcataccactcttcaattggagtaagaaaagatgaactagttcatgggtatatattagtttactctgcaaaacggaaagcttcgatgggaatgcttcgagcatttctatcagaagttcaagacaccattcctgtacagctggtggcagttactgacagccaagcagatttttttgaaaatgaggctatcaaagagttaatgactgaaggagaacacattgcaactgagatcactgctaaatttacagcactgtattctttatctcagtatcatcggcaaactgaggtctttactctgttttttagtgatgttctagagaaaaaaaatatgatagaaaattcttatttgtctgataatacaagggaatcaacccatcaaagtgaagatgtttttctaccatctcccagagactgttttccctataataactaccctgattcagatgatgacacagaagcaccacctccttatagtccaattggggatgatgtacagttgcttccaacacctagtgaccgttccagatatagattagatttggaaggaaatgagtatcctattcatagtaccccaaactgtcatgaccatgaacgcaaccataaagtgcctccacctattaaacctaaaccagttgtacctaagacaaatgtgaaaaaactcgatccaaaccttttaaaaacaattgaagctggtattggtaaaaatccaagaaagcagacttcccgggtgcctttggcacatcctgaagatatggatccttcagataactatgcggaacccattgatacaattttcaaacagaagggctattctgatgagatttatgttgtcccagatgatagtcaaaatcgtattaaaattcgaaactcatttgtaaataacacccaaggagatgaagaaaatgggttttctgatagaacctcaaaaagtcatggggaacggaggccttcaaaatacaaatataaatctaaaaccttgtttagtaaagccaagtcatactatagaagaacacattcagatgccagtgatgatgaggctttcaccacttctaaaacaaaaagaaaaggaagacatcgtggaagtgaagaagatccacttctttctcctgttgaaacttggaaaggtggtattgataatcctgcaatcacttctgaccaggagttagatgataagaagatgaagaagaaaacccacaaagtgaaagaagataaaaagaaaaagaaaactaagaacttcaatccaccaacacgtagaaattgggaaagtaattactttgggatgcccctccaggatctggttacagctgagaagcccataccactatttgttgagaaatgtgtggaatttattgaagatacagggttatgtaccgaaggactctaccgtgtcagcgggaataaaactgaccaagacaatattcaaaagcagtttgatcaagatcataatatcaatctagtgtcaatggaagtaacagtaaatgctgtagctggagcccttaaagctttctttgcagatctgccagatcctttaattccatattctcttcatccagaactattggaagcagcaaaaatcccggataaaacagaacgtcttcatgccttgaaagaaattgttaagaaatttcatcctgtaaactatgatgtattcagatacgtgataacacatctaaacagggttagtcagcaacataaaatcaacctaatgacagcagacaacttatccatctgtttttggccaaccttgatgagacctgattttgaaaatcgagagtttctgtctactactaagattcatcaatctgttgttgaaacattcattcagcagtgtcagtttttcttttacaatggagaaattgtagaaacgacaaacattgtggctcctccaccaccttcaaacccaggacagttggtggaaccaatggtgccacttcagttgccgccaccattgcaacctcagctgatacaaccacaattacaaacggatcctcttggtattatatgagtaggaagtgattgcaaacaggctggatttggacaaaaagcaaatctagacatgcatgtttcagggttcagtagtatacttcatgtttcatacagataattcacattcaaaattacattttctctttgaactagatggtattccttattcacttacattacaaatctaagaccatgtgataagcatgactggagaggtttaatttttataaacaaaaatagctataaagtacaaagctgctgctgcatgcaaccttattgcaatcagtatatcattcctgtggcaatttctgtcaccttatattgtgaataaaatttttctatagaaattaaatgatttaaaaactcacctatatgaaacatttaatgcttttcagcctgctttctggctgattttgttatttgatgtgctaatttgggcaacttaatttacattctggcagtcggtgtagataactaaaagcccagttaagtattttataatttcaggctactgaggccatgcttgggatgttgtttgaaagaaagaaaaaatacacttgacatatttcacatttctgtaccttcatctttacttccaagtaaacccgtggatgatttgatgagggataaatgaacctatttcttttacacacataccaaggacatgcttgtggctaaagtgagttgataatgttgtgcaaaggatagttgtcaccaactcatttctttatggtccataatgaaataaaaattttgtatactgttaattctgtaaacagatgcatgttcaaaagatctatgatggtcttgtaatcttaatctaatatattttagatattttaattttttccctcttggggaacacatttagtatagtgtagaaaatacttccatgacattttcatataaggttatataacttttcatacataaacatgaaatttgttgtagaaaattctttaaaccaaacatttaaatctaggacttcaatttaatttgttccttgaatctatttttatgtggcccttaaaaaatatccaaaaaacccattgctaatatagcaataaaaatactttgggtactgacagactctttggagtgtttatattacaaatttgtattcatattcttttctgtgatgtgttgtactaaaatccaaaatggcttttgcaccatttttaagccaattttttcctttgatgttggtaccagaattactataagtgactgctgcttttgggggtaaacattttgttagtgaagataaaaccagaacactaaattatggataaaattttcagaataggtggcacaggtaaatttcactaggttatattttgtgtagtaaagaaaaaaattatttggtcaatgttatcttaattcatactacaatttaagattatcttatgtgtattatagtaaatagatgattttcagattcaaggctcctaagagtttgatttgctctgttttttcctaaaataaatattgtctctcccaactgttaagttctaggtattgtacttccaattttaacttcagaaccaagatgttggcatgaaccaggctgctgttgaagtacatgtatattataaattatcttatttgtgttatactcttacatgttatcttttctaagaaaacaaagtccctattattcctattgcaaagcacacaggaattaagaaagtacagtaatttttaaaaaaaaatccggtaaatgtagtattcttaacctgttctatattacttatacctattgtctatatagctttaatttatagttgtcagtttaactattggcatgtctggcaaagaaaattaaactttaagagttttataaactgtttctaggttgctaaagaatttatttttctactatatatggtatagacaaagcatcaaactatgtacaggaaaaaagcctgactatttctatttggaagtaggctgaaaagagaattttcaaaactgttcgtgtcttcagttcattctgtcataactttgctattgtaatatgtgaataccagtttatttaagctgttctcttttatactgtattaatttaatgttcatctgcgtttagtaccatttttgttattaaaactggcatttaccgtttttcacattaacccaccttgcaccttcccccaaacttatctccacttttctatgcattctatcattgatttgacacacttcatagtgagtcatttaaatactctacgtttggttcaattaaccagtaggttacagttattgaaaattaaagtacagtttaaagctcagtctgttacactgaattgattgtgtttgtttttgccaagggtttagatatgcttttaaatattagaaacatctaagaacagaataacataattaaacttttttctggtaagttactggaaggtttcactgtttagggacctatcatatgagacttcttaaaggattaaaagaataggatagtctcataattgtgagtaaacatcaaggcattatattttacaatactgaataaaatttcatctacacacatgttgccattgtttcatttaaggttcagtgcttatagttaactacaatattggacctaacaggatctagattagcaatataaagaagcatagtggtactctgtttcacactttcagtagatttattagaagtcaaattctattcaacagacacttattaggatatacaactaatttaagaataaaattccaggcacaatatattttttttaaatggtatttgttagtagtgcttcttccccttaacatttacagtgtaaatactgcaggtaaccgcaatctaagttagccaaaaagcagctttttttcccatactgtatgtaaataatgtagacctgggtttttttgtttatttgggtttgtttttttttttgaggtactggaatctaattaatatctcttaggtatcaacaaaagggaacaattggaatgagaatttaggccttagcttccatggtgatttttagttttttatacagtaataattgtgatgctatttgtcaactggatataaatacacatataattttaaaaagtcaaaagtgcttttgtttctttgtttaatgtaatttttgtgcttcacctacaggatgctgcagtaaattaaatatcagtgaagcttctgatgtataaagaatgctatgaataaaacattaagaagctgtgtaattttaagttatagttgcctctatttttaccatttcattggtaaaaattagctaatttttttcaagtgaaatgaaaaataaaaatataaatttatcaatatgatggaaatcttattaaggagatgtattattgaattttcactgtacctgaaaaggagattcaaaattttttctggggatgtatataggtgaaaatttgattttttaaattatcaggaaaacaagataatgcacagatttctaagactaagatcttacctggatgtgatttttgagctgtggctagacattctttagagccactggaaatattttgaaaactattctagttatagcagagctgctaatattaacgaatatatttgtgtcttcatggtttgtgactattaggccaaattttgtggtatatgttgtcagtctggatctggtgaggtctgttcaacatgaatctttgtgttatcttgaatttagtagtttcaaggtacttaaattcttaacagtttctaatttgtttcaatacatatgggacatggttgatttttttactgtattagaactcttggaagttcttagccttttcaggttatgaaatacctgaaagtaaaattttctaagatttaataagggaagatactattcaaatcattttcttaggatagcatctttacatacaatgagaggattgtacaagcattaatctcatattccaacatccagttacttgatgtgatccaagtaccctggtctttttgaagcagttaaaatctaattaattaactttgggagtcttcactattcaattgatcctcatcattgtcctatttgcatgactccattttttcctccactatatgagttttctttgtcagggggagaggagtgggaagagtcacagaatctcatattcacatcttaattaaattgtgtgaaattagtcttttgtggaaattctgtaggcagtatgattttgaaaagctaaccaatgataattagcattttagttaatactaaatgcataaaattataacccttgaaattaatttggtgctggcagttctggtttagtcatttttaccagtagttagtagtattaagacctgcagtatatgcactttttgagtagctgtcaaataattgtagttgagaaacaacttgtttattctcacaattcagattttctattcagttttgtctcaaatagtaagttattgtgaacaatttaataacggccctcctgttctagtttgcctaatattttagttaagatttagtgttttaacctatttttttaagtttattttttgtattagattttatttgaataagttatgtgggtttagtaattgacctatttattcattgcttcactaattcatccagattagttttaagtgtgtatatgtatttgctcaccagatcattttcttgggaccttgaactgtgaatgttttgtcctaaccatttaatattttctaggtacttgctgcaagttcttgaactattttaccagctttaactttggggctcttagtttcttttctccagattcttgttattttattttatccaaataaatatttaggtgttctaagaa

SEQ ID NO: 26299 - DNA, 3047 bp, Homo sapiens
  source 1..3047: mol_type = unassigned DNA
agagaggcgagcggagagtggaggaggaggcggcggcggcgggagcggtccccaggaatgtcgctgccgccgccaccgccggggccgctgccgttgaggaggagacggaggagaccgacgttgttagaaaaagaaaactaagaacttcaatccaccaacacgtagaaattgggaaagtaattactttgggatgcccctccaggatctggttacagctgagaagcccataccactatttgttgagaaatgtgtggaatttattgaagatacagggttatgtaccgaaggactctaccgtgtcagcgggaataaaactgaccaagacaatattcaaaagcagtttgatcaagatcataatatcaatctagtgtcaatggaagtaacagtaaatgctgtagctggagcccttaaagctttctttgcagatctgccagatcctttaattccatattctcttcatccagaactattggaagcagcaaaaatcccggataaaacagaacgtcttcatgccttgaaagaaattgttaagaaatttcatcctgtaaactatgatgtattcagatacgtgataacacatctaaacagggttagtcagcaacataaaatcaacctaatgacagcagacaacttatccatctgtttttggccaaccttgatgagacctgattttgaaaatcgagagtttctgtctactactaagattcatcaatctgttgttgaaacattcattcagcagtgtcagtttttcttttacaatggagaaattgtagaaacgacaaacattgtggctcctccaccaccttcaaacccaggacagttggtggaaccaatggtgccacttcagttgccgccaccattgcaacctcagctgatacaaccacaattacaaacggatcctcttggtattatatgagtaggaagtgattgcaaacaggctggatttggacaaaaagcaaatctagacatgcatgtttcagggttcagtagtatacttcatgtttcatacagataattcacattcaaaattacattttctctttgaactagatggtattccttattcacttacattacaaatctaagaccatgtgataagcatgactggagaggtttaatttttataaacaaaaatagctataaagtacaaagctgctgctgcatgcaaccttattgcaatcagtatatcattcctgtggcaatttctgtcaccttatattgtgaataaaatttttctatagaaattaaatgatttaaaaactcacctatatgaaacatttaatgcttttcagcctgctttctggctgattttgttatttgatgtgctaatttgggcaacttaatttacattctggcagtcggtgtagataactaaaagcccagttaagtattttataatttcaggctactgaggccatgcttgggatgttgtttgaaagaaagaaaaaatacacttgacatatttcacatttctgtaccttcatctttacttccaagtaaacccgtggatgatttgatgagggataaatgaacctatttcttttacacacataccaaggacatgcttgtggctaaagtgagttgataatgttgtgcaaaggatagttgtcaccaactcatttctttatggtccataatgaaataaaaattttgtatactgttaattctgtaaacagatgcatgttcaaaagatctatgatggtcttgtaatcttaatctaatatattttagatattttaattttttccctcttggggaacacatttagtatagtgtagaaaatacttccatgacattttcatataaggttatataacttttcatacataaacatgaaatttgttgtagaaaattctttaaaccaaacatttaaatctaggacttcaatttaatttgttccttgaatctatttttatgtggcccttaaaaaatatccaaaaaacccattgctaatatagcaataaaaatactttgggtactgacagactctttggagtgtttatattacaaatttgtattcatattcttttctgtgatgtgttgtactaaaatccaaaatggcttttgcaccatttttaagccaattttttcctttgatgttggtaccagaattactataagtgactgctgcttttgggggtaaacattttgttagtgaagataaaaccagaacactaaattatggataaaattttcagaataggtggcacaggtaaatttcactaggttatattttgtgtagtaaagaaaaaaattatttggtcaatgttatcttaattcatactacaatttaagattatcttatgtgtattatagtaaatagatgattttcagattcaaggctcctaagagtttgatttgctctgttttttcctaaaataaatattgtctctcccaactgttaagttctaggtattgtacttccaattttaacttcagaaccaagatgttggcatgaaccaggctgctgttgaagtacatgtatattataaattatcttatttgtgttatactcttacatgttatcttttctaagaaaacaaagtccctattattcctattgcaaagcacacaggaattaagaaagtacagtaatttttaaaaaaaaatccggtaaatgtagtattcttaacctgttctatattacttatacctattgtctatatagctttaatttatagttgtcagtttaactattggcatgtctggcaaagaaaattaaactttaagagttttataaactgtttctaggttgctaaagaatttatttttctactatatatggtatagacaaagcatcaaactatgtacaggaaaaaagcctgactatttctatttggaagtaggctgaaaagagaattttcaaaactgttcgtgtcttcagttcattctgtcataactttgctattgtaatatgtgaataccagtttatttaagctgttctcttttatactgtattaatttaatgttcatctgcgtttagtaccatttttgttattaaaactggcatttaccgtttttcacattaacccaccttgcaccttccc

SEQ ID NO: 26300 - DNA, 4881 bp, Homo sapiens
  source 1..4881: mol_type = unassigned DNA
ctgcgccgccgcgccgccgctccgcccccggtcgggtgtgtggctgcgcgcgccgggagagatgctgaggaagatgatccctatgatcttgaagatgtttctgcacagaaatgagggaaatacaaagaaccaaatacagttctgaaatttgggatctgtattttgagatgattttattttcagaatgagaagcatatctggttacctttatgaatgtagagacatgagaagagagttatgatggcaaaaaacaaagagcctcgtcccccatcctataccatcagtatagttggactctctgggactgaaaaagacaaaggtaactgtggagttggaaagtcttgtttgtgcaatagatttgtacgctcaaaagcagatgaatattatccagagcatacttctgtgcttagcaccattgactttggaggacgagtagtaaacaatgatcactttttgtactggggtgacataatacaaaatagtgaagatggagtagaatgcaaaattcatgtcattgaacaaacagagttcattgatgaccagactttcttgcctcatcggagtacgaatttgcaaccatatataaaacgtgcagctgcatctaaattgcagtcagcagaaaaactaatgtacatttgcactgatcagctaggcttagaacaagactttgaacagaagcaaatgcctgaagggaagctcaacgtagatggatttttattatgcattgatgtaagtcaaggatgcaataggaagtttgatgatcaacttaaatttgtgaataacctttttgtccagttatcaaaatcaaaaaaacctgtaataatagcagcaactaaatgtgatgaatgcgtggatcattatcttagagaagttcaggcatttgcttcaaataaaaagaaccttcttgtagtggaaacatcagcacgatttaatgtcaacattgaaacatgttttactgcactggtacaaatgttggataaaactcgtagcaagcctaaaattattccctatttggatgcttataaaacacagagacaacttgttgtcacagcaacagataagtttgaaaaacttgtgcagactgtgagagattatcatgcaacttggaaaactgttagtaataaattaaaaaatcatcctgattatgaagaatacatcaacttagagggaacaagaaaggccagaaatacattctcaaaacatatagaacaacttaaacaggaacatataagaaaaaggagagaagagtatataaatactttaccaagagcttttaacactcttttgccaaatctagaagagattgaacatttgaattggtcagaagctttgaagttaatggaaaagagagcagatttccagttatgttttgtggtgctagaaaaaactccttgggatgaaactgaccatatagacaaaattaatgataggcggattccatttgacctcctgagcactttagaagctgaaaaagtctatcagaaccatgtacagcatctgatatccgagaagaggagggtggaaatgaaggaaaaattcaaaaagactttggaaaaaattcaattcatttcaccagggcagccatgggaggaagttatgtgctttgttatggaggatgaagcctacaaatatatcactgaggctgatagcaaagaggtatatggtaggcatcagcgagaaatagttgaaaaagccaaagaagagtttcaagaaatgctttttgagcattctgaacttttttatgatttagatcttaatgcaacacctagttcagataaaatgagtgaaattcatacagttctgagtgaagaacctagatataaagctttacagaaacttgcacctgatagggaatcccttctacttaagcatataggatttgtttatcatcccactaaagaaacatgtcttagtggccaaaattgtacagacattaaagtggagcagttacttgctagtagtcttttacagttggatcatggccgcttaagattatatcacgatagtaccaatatagataaagttaacctttttattttagggaaggatggccttgcccaagaactagcaaatgagataaggacacaatccactgatgatgagtatgccttagatggaaaaatttatgaacttgatcttcggccggttgatgccaaatcgccttactttttgagtcagttatggactgccgcctttaaaccacatgggtgcttctgtgtatttaattccattgagtcattgagttttattggggaatttattgggaaaataagaactgaagcttctcagatcagaaaagataaatacatggctaatcttccatttacattaattctggctaatcagagagattccattagtaagaatctaccaattctcaggcaccaagggcagcagttggcaaacaagttgcaatgtccttttgtagatgtacctgctggtacatatcctcgtaaatttaatgaaacccaaataaagcaagctctcagaggagtattggaatcagttaaacacaatttggatgtggtgagcccaattcctgccaataaggacttatcagaagctgacttgagaattgtcatgtgcgccatgtgtggagatccatttagtgtggatcttattctttcacccttccttgattctcattcttgcagtgctgctcaagctggacagaataattccctaatgcttgataaaatcattggtgaaaaaaggaggcgaatacagatcacaatattatcataccactcttcaattggagtaagaaaagatgaactagttcatgggtatatattagtttactctgcaaaacggaaagcttcgatgggaatgcttcgagcatttctatcagaagttcaagacaccattcctgtacagctggtggcagttactgacagccaagcagatttttttgaaaatgaggctatcaaagagttaatgactgaaggagaacacattgcaactgagatcactgctaaatttacagcactgtattctttatctcagtatcatcggcaaactgaggtctttactctgttttttagtgatgttctagagaaaaaaaatatgatagaaaattcttatttgtctgataatacaagggaatcaacccatcaaagtgaagatgtttttctaccatctcccagagactgttttccctataataactaccctgattcagatgatgacacagaagcaccacctccttatagtccaattggggatgatgtacagttgcttccaacacctagtgaccgttccagatatagattagatttggaaggaaatgagtatcctattcatagtaccccaaactgtcatgaccatgaacgcaaccataaagtgcctccacctattaaacctaaaccagttgtacctaagacaaatgtgaaaaaactcgatccaaaccttttaaaaacaattgaagctggtattggtaaaaatccaagaaagcagacttcccgggtgcctttggcacatcctgaagatatggatccttcagataactatgcggaacccattgatacaattttcaaacagaagggctattctgatgagatttatgttgtcccagatgatagtcaaaatcgtattaaaattcgaaactcatttgtaaataacacccaaggagatgaagaaaatgggttttctgatagaacctcaaaaagtcatggggaacggaggccttcaaaatacaaatataaatctaaaaccttgtttagtaaagccaagtcatactatagaagaacacattcagatgccagtgatgatgaggctttcaccacttctaaaacaaaaagaaaaggaagacatcgtggaagtgaagaagatccacttctttctcctgttgaaacttggaaaggtggtattgataatcctgcaatcacttctgaccaggagttagatgataagaagatgaagaagaaaacccacaaagtgaaagaagataaaaagcagaaaaagaaaactaagaacttcaatccaccaacacgtagaaattgggaaagtaattactttgggatgcccctccaggatctggttacagctgagaagcccataccactatttgttgagaaatgtgtggaatttattgaagatacagggttatgtaccgaaggactctaccgtgtcagcgggaataaaactgaccaagacaatattcaaaagcagtttgatcaagatcataatatcaatctagtgtcaatggaagtaacagtaaatgctgtagctggagcccttaaagctttctttgcagatctgccagatcctttaattccatattctcttcatccagaactattggaagcagcaaaaatcccggataaaacagaacgtcttcatgccttgaaagaaattgttaagaaatttcatcctgtaaactatgatgtattcagatacgtgataacacatctaaacagggttagtcagcaacataaaatcaacctaatgacagcagacaacttatccatctgtttttggccaaccttgatgagacctgattttgaaaatcgagagtttctgtctactactaagattcatcaatctgttgttgaaacattcattcagcagtgtcagtttttcttttacaatggagaaattgtagaaacgacaaacattgtggctcctccaccaccttcaaacccaggacagttggtggaaccaatggtgccacttcagttgccgccaccattgcaacctcagctgatacaaccacaattacaaacggatcctcttggtattatatgagtaggaagtgattgcaaacaggctggatttggacaaaaagcaaatctagacatgcatgtttcagggttcagtagtatacttcatgtttcatacagataattcacattcaaaattacattttctctttgaactaga

SEQ ID NO: 26301 - DNA, 543 bp, Homo sapiens
  source 1..543: mol_type = unassigned DNA
agcgttattagaaatgcaagagagctggaggctcggggtgtagctgaggttgaaaggtgcacggaacagaaaaagaaaactaagaacttcaatccaccaacacgtagaaattgggaaagtaattactttgggatgcccctccaggatctggttacagctgagaagcccataccactatttgttgagaaatgtgtggaatttattgaagatacagggttatgtaccgaaggactctaccgtgtcagcgggaataaaactgaccaagacaatattcaaaagcagtttgatcaagatcataatatcaatctagtgtcaatggaagtaacagtaaatgctgtagctggagcccttaaagctttctttgcagatctgccagatcctttaattccatattctcttcatccagaactattggaagcagcaaaaatcccggataaaacagaacgtcttcatgccttgaaagaaattgttaagaaatttcatcctgtaaactatgatgtattcagatacgtgataacacatctaaacagggttagtcagcaa

SEQ ID NO: 26302 - DNA, 583 bp, Homo sapiens
  source 1..583: mol_type = unassigned DNA
actttcacagaacgtactgaatcaggggcctgcatccccgtgccgtgccgagccgacggagaaatggactcctcttctcgctcctgtggagtttcgtcttctggtacggtggtttgctcttgagttacgaccagaaaccggaacagaaggaaagggagaagcaggggaggttcggggacgacggcgctccgggcagtaaggcagtagcttccaaagcgtggaggatgggactgaggaggagcagaatacggagaaagagggaagctgaggaaaaatactcacgccaatgggtaaaagggaaaaggaagatgatccctatgatcttgaagatgtttctgcacagaaatgagggaaatacaaagaaccaaatacagttctgaaatttgggatctgtattttgagatgattttattttcagaatgagaagcatatctggttacctttatgaatgtagagacatgagaagagagttatgatggcaaaaaacaaagagcctcgtcccccatcctataccatcagtatagttggactctctgggactgaaaaagacaaaggtaactgtggagttggaaagtcttgtttg

SEQ ID NO: 26303 - DNA, 654 bp, Homo sapiens
  source 1..654: mol_type = unassigned DNA
agcgttattagaaatgcaagagagctggaggctcggggtgtagctgaggttgaaaggtgcacggaagaagatgatccctatgatcttgaagatgtttctgcacagaaatgagggaaatacaaagaaccaaatacagttctgaaatttgggatctgtattttgagatgattttattttcagaatgagaagcatatctggttacctttatgaatgtagagacatgagaagagagttatgatggcaaaaaacaaagagcctcgtcccccatcctataccatcagtatagttggactctctgggactgaaaaagacaaaggtaactgtggagttggaaagtcttgtttgtgcaatagatttgtacgctcaaaagcagatgaatattatccagagcatacttctgtgcttagcaccattgactttggaggacgagtagtaaacaatgatcactttttgtactggggtgacataatacaaaatagtgaagatggagtagaatgcaaaattcatgtcattgaacaaacagagttcattgatgaccagactttcttgcctcatcggagtacgaatttgcaaccatatataaaacgtgcagctgcatctaaattgcagtcagcagaaaaactaatgtacatttgcactgatcagctaggctta

SEQ ID NO: 26304 - DNA, 4824 bp, Homo sapiens
  source 1..4824: mol_type = unassigned DNA
gcgcgcgtcccgtccaggctgcgccgccgcgccgccgctccgcccccggtcgggtgtgtggctgcgcgcgccgggagagatgctgaggaagatgatccctatgatcttgaagatgtttctgcacagaaatgagggaaatacaaagaaccaaatacagttctgaaatttgggatctgtattttgagatgattttattttcagaatgagaagcatatctggttacctttatgaatgtagagacatgagaagagagttatgatggcaaaaaacaaagagcctcgtcccccatcctataccatcagtatagttggactctctgggactgaaaaagacaaaggtaactgtggagttggaaagtcttgtttgtgcaatagatttgtacgctcaaaagcagatgaatattatccagagcatacttctgtgcttagcaccattgactttggaggacgagtagtaaacaatgatcactttttgtactggggtgacataatacaaaatagtgaagatggagtagaatgcaaaattcatgtcattgaacaaacagagttcattgatgaccagactttcttgcctcatcggagtacgaatttgcaaccatatataaaacgtgcagctgcatctaaattgcagtcagcagaaaaactaatgtacatttgcactgatcagctaggcttagaacaagactttgaacagaagcaaatgcctgaagggaagctcaacgtagatggatttttattatgcattgatgtaagtcaaggatgcaataggaagtttgatgatcaacttaaatttgtgaataacctttttgtccagttatcaaaatcaaaaaaacctgtaataatagcagcaactaaatgtgatgaatgcgtggatcattatcttagagaagttcaggcatttgcttcaaataaaaagaaccttcttgtagtggaaacatcagcacgatttaatgtcaacattgaaacatgttttactgcactggtacaaatgttggataaaactcgtagcaagcctaaaattattccctatttggatgcttataaaacacagagacaacttgttgtcacagcaacagataagtttgaaaaacttgtgcagactgtgagagattatcatgcaacttggaaaactgttagtaataaattaaaaaatcatcctgattatgaagaatacatcaacttagagggaacaagaaaggccagaaatacattctcaaaacatatagaacaacttaaacaggaacatataagaaaaaggagagaagagtatataaatactttaccaagagcttttaacactcttttgccaaatctagaagagattgaacatttgaattggtcagaagctttgaagttaatggaaaagagagcagatttccagttatgttttgtggtgctagaaaaaactccttgggatgaaactgaccatatagacaaaattaatgataggcggattccatttgacctcctgagcactttagaagctgaaaaagtctatcagaaccatgtacagcatctgatatccgagaagaggagggtggaaatgaaggaaaaattcaaaaagactttggaaaaaattcaattcatttcaccagggcagccatgggaggaagttatgtgctttgttatggaggatgaagcctacaaatatatcactgaggctgatagcaaagaggtatatggtaggcatcagcgagaaatagttgaaaaagccaaagaagagtttcaagaaatgctttttgagcattctgaacttttttatgatttagatcttaatgcaacacctagttcagataaaatgagtgaaattcatacagttctgagtgaagaacctagatataaagctttacagaaacttgcacctgatagggaatcccttctacttaagcatataggatttgtttatcatcccactaaagaaacatgtcttagtggccaaaattgtacagacattaaagtggagcagttacttgctagtagtcttttacagttggatcatggccgcttaagattatatcacgatagtaccaatatagataaagttaacctttttattttagggaaggatggccttgcccaagaactagcaaatgagataaggacacaatccactgatgatgagtatgccttagatggaaaaatttatgaacttgatcttcggccggttgatgccaaatcgccttactttttgagtcagttatggactgccgcctttaaaccacatgggtgcttctgtgtatttaattccattgagtcattgagttttattggggaatttattgggaaaataagaactgaagcttctcagatcagaaaagataaatacatggctaatcttccatttacattaattctggctaatcagagagattccattagtaagaatctaccaattctcaggcaccaagggcagcagttggcaaacaagttgcaatgtccttttgtagatgtacctgctggtacatatcctcgtaaatttaatgaaacccaaataaagcaagctctcagaggagtattggaatcagttaaacacaatttggatgtggtgagcccaattcctgccaataaggacttatcagaagctgacttgagaattgtcatgtgcgccatgtgtggagatccatttagtgtggatcttattctttcacccttccttgattctcattcttgcagtgctgctcaagctggacagaataattccctaatgcttgataaaatcattggtgaaaaaaggaggcgaatacagatcacaatattatcataccactcttcaattggagtaagaaaagatgaactagttcatgggtatatattagtttactctgcaaaacggaaagcttcgatgggaatgcttcgagcatttctatcagaagttcaagacaccattcctgtacagctggtggcagttactgacagccaagcagatttttttgaaaatgaggctatcaaagagttaatgactgaaggagaacacattgcaactgagatcactgctaaatttacagcactgtattctttatctcagtatcatcggcaaactgaggtctttactctgttttttagtgatgttctagagaaaaaaaatatgatagaaaattcttatttgtctgataatacaagggaatcaacccatcaaagtgaagatgtttttctaccatctcccagagactgttttccctataataactaccctgattcagatgatgacacagaagcaccacctccttatagtccaattggggatgatgtacagttgcttccaacacctagtgaccgttccagatatagattagatttggaaggaaatgagtatcctattcatagtaccccaaactgtcatgaccatgaacgcaaccataaagtgcctccacctattaaacctaaaccagttgtacctaagacaaatgtgaaaaaactcgatccaaaccttttaaaaacaattgaagctggtattggtaaaaatccaagaaagcagacttcccgggtgcctttggcacatcctgaagatatggatccttcagataactatgcggaacccattgatacaattttcaaacagaagggctattctgatgagatttatgttgtcccagatgatagtcaaaatcgtattaaaattcgaaactcatttgtaaataacacccaaggagatgaagaaaatgggttttctgatagaacctcaaaaagtcatggggaacggaggccttcaaaatacaaatataaatctaaaaccttgtttagtaaagccaagtcatactatagaagaacacattcagatgccagtgatgatgaggctttcaccacttctaaaacaaaaagaaaaggaagacatcgtggaagtgaagaagatccacttctttctcctgttgaaacttggaaaggtggtattgataatcctgcaatcacttctgaccaggagttagatgataagaagatgaagaagaaaacccacaaagtgaaagaagataaaaagaaaaagaaaactaagaacttcaatccaccaacacgtagaaattgggaaagtaattactttgggatgcccctccaggatctggttacagctgagaagcccataccactatttgttgagaaatgtgtggaatttattgaagatacagggttatgtaccgaaggactctaccgtgtcagcgggaataaaactgaccaagacaatattcaaaagcagtttgatcaagatcataatatcaatctagtgtcaatggaagtaacagtaaatgctgtagctggagcccttaaagctttctttgcagatctgccagatcctttaattccatattctcttcatccagaactattggaagcagcaaaaatcccggataaaacagaacgtcttcatgccttgaaagaaattgttaagaaatttcatcctgtaaactatgatgtattcagatacgtgataacacatctaaacagggttagtcagcaacataaaatcaacctaatgacagcagacaacttatccatctgtttttggccaaccttgatgagacctgattttgaaaatcgagagtttctgtctactactaagattcatcaatctgttgttgaaacattcattcagcagtgtcagtttttcttttacaatggagaaattgtagaaacgacaaacattgtggctcctccaccaccttcaaacccaggacagttggtggaaccaatggtgccacttcagttgccgccaccattgcaacctcagctgatacaaccacaattacaaacggatcctcttggtattatatgagtaggaagtgattgcaaacaggctggatttggacaaaaagcaaatctagacatgcatgtttca

SEQ ID NO: 26305 - DNA, 3946 bp, Homo sapiens
  source 1..3946: mol_type = unassigned DNA
gcctgcctctgttctgaaaggacaggaacttctcaatgatccgatgaaaagattgcatatttttggtcccaagattcacagtagcggaggtctctggcaacaaaaggtatcgtgggagtcacagctatgccagctgggccatttctcagacattcaatatgatctgccatttcaggatgcattttttaccaaaaaaataatttttttaaaacagactcaacttcctactgcaagcttagttcagttagattagagaggacagcaaagacgcggctgattataatttatggggtgatttcacctggaacagcatgtcaggccgcagtgtacggctgaggtcagtccccatccagagtctctcagagctggagagggcccggctgcaggaagtggctttttatcagttgcaacaggactgtgacctgagctgtcagatcaccattcccaaagatggacaaaagagaaagaaatctttaagaaagaaactggattcactaggaaaggagaaaaacaaagacaaagaattcatcccacaggcatttggaatgcccttatcccaagtcattgcgaatgacagggcctataaactcaagcaggacttgcagagggacgagcagaaagatgcatctgactttgtggcttccctcctcccatttggaaataaaagacaaaacaaagaactctcaagcagtaactcatctctcagctcaacctcagaaacaccgaatgagtcaacgtccccaaacaccccggaaccggctcctcgggctaggaggaggggtgccatgtcagtggattctatcaccgatcttgatgacaatcagtctcgactactagaagctttacaactttccttgcctgctgaggctcaaagtaaaaaggaaaaagccagagataagaaactcagtctgaatcctatttacagacaggtccctaggctggtggacagctgctgtcagcacctagaaaaacatggcctccagacagtggggatattccgagttggaagctcaaaaaagagagtgagacaattacgtgaggaatttgaccgtgggattgatgtctctctggaggaggagcacagtgttcatgatgtggcagccttgctgaaagagttcctgagggacatgccagacccccttctcaccagggagctgtacacagctttcatcaacactctcttgttggagccggaggaacagctgggcaccttgcagctcctcatataccttctacctccctgcaactgcgacaccctccaccgcctgctacagttcctctccatcgtggccaggcatgccgatgacaacatcagcaaagatgggcaagaggtcactgggaataaaatgacatctctaaacttagccaccatatttggacccaacctgctgcacaagcagaagtcatcagacaaagaattctcagttcagagttcagcccgggctgaggagagcacggccatcatcgctgttgtgcaaaagatgattgaaaattatgaagccctgttcatggttcccccagatctccagaacgaagtgctgatcagcctgttagagaccgatcctgatgtcgtggactatttactcagaagaaaggcttcccaatcatcaagccctgacatgctgcagtcggaagtttccttttccgtgggagggaggcattcatctacagactccaacaaggcctccagcggagacatctccccttatgacaacaactccccagtgctgtctgagcgctccctgctggctatgcaagaggacgcggccccggggggctcggagaagctttacagagtgccagggcagtttatgctggtgggccacttgtcgtcgtcaaagtcaagggaaagttctcctggaccaaggcttgggaaagatctgtcagaggagcctttcgatatctggggaacttggcattcaacattaaaaagcggatccaaagacccaggaatgacaggttcctctggagacatttttgaaagcagctccctaagagcggggccctgctccctttctcaagggaacctgtccccaaattggcctcggtggcaggggagccccgcagagctggacagcgacacgcagggggctcggaggactcaggccgcagcccccgcgacggagggcagggcccaccctgcggtgtcgcgcgcctgcagcacgccccacgtccaggtggcagggaaagccgagcggcccacggccaggtcggagcagtacttgaccctgagcggcgcccacgacctcagcgagagtgagctggatgtggccgggctgcagagccgggccacacctcagtgccaaagaccccatgggagtgggagggatgacaagcggcccccgcctccatacccgggcccagggaagcccgcggcagcggcagcctggatccaggggcccccggaaggcgtggagacacccacggaccagggaggccaagcagccgagcgagagcagcaggtcacgcagaaaaaactgagcagcgccaactccctgccagcgggcgagcaggacagtccgcgcctgggggacgctggctggctcgactggcagagagagcgctggcagatctgggagctcctgtcgaccgacaaccccgatgccctgcccgagacgctggtctgagcccgcacccagccgagccccccctgccccgagccccccgccctccagcccaggggggaccgtgggtggtggccactggcacacttagtgttcttctttcacacttctcaaaagtgacacaagagaaatccagttcacctacagaggtagagcactcacgcccccgccattgagaataaggttccattgcgtagccagccttaggaaaaacaaacagaacccaaaccagatggcaatgtccaatctaaaaacgtccctcttggctctataatataagatacaactcttgcttggtatagcctaaccgtatttatgtgtcttcggttttgactattgtgtattctgtaacagattatgtataatcatatatgatatattcacaaagagaaaacaaaaggaacttttaaaaaaaaaatcacttcacttatattaagcaatgagatatactaaacaatgagattctatagaatgttctagaatgtgcacaagcgggtttctgtgcttttgccatagctttataactggggataacccttccttcgataccaaacactaacaagaggaagcagaatatgagaagccatatttttacataggagtcagatacaaaaagaaaaatcactgaatgcttttagatattgaatacgttttcaggaaaatgctaaatctgatagattacgaaatatatttttagaacttgtttagaaaggattcagttaaccaaacaagaaaaaggcagtgcctcacaaagaaattaagaagttgtccgtcccacgttacatcaaattcagttttatataggccatatataatatatatttataatgtataatttttatgtatttttcaaaactacaaactggaatccaactataaagtgtttaagaatctacacagaatattcaaattatagaacatgttttttccctttgccccataatcagtatttgccaaattacatgcaattccttaaaaactaaatcacatttggtaaaaggcctacagctttgtacttacattgtgccaaaggctgaggaaatgttttctttcgtaattttatgtgtattgtaaaatgttctaccgtactttagtagtttgaagtttttcaagtgcataactatttttgaccagcagatggcgatacgcttcagtattttatgcaattttttttcacttctgaagggaaagtgtattataaaaaaagattttttttttttttataaaacatgctactcttaattttcatgttggtgatgaaattcccagtggtgtttcttaaggttctatcttgtgccatgatgaataaaaagttaagcaaa

SEQ ID NO: 26306 - DNA, 5117 bp, Homo sapiens
  source 1..5117: mol_type = unassigned DNA
ggctgggctgcgaatagcgtgttcctctccggcggaacacacacacccggccttggggctgtctcctgagctccctcctccacggagagcgctgagcgccgccgggaattccatcccaccgtgggcacgcagtctttggaggtcccgggcgcagcacgctcggtgtccccacactgcagcaagacagagaccccgcgggaaccttgagcttggaacaacccttgagcctctgcagtcggaagagtgggcgcagcagcccagcggaggccaggcgcgcaacctcgggcgccggggcaaggagagagtgcagggaggcgcagctcaggcgcccggctcaggagcgggaggaagttctcgcggcgccgggagcgcggtggacgcgccctgggcgcacgcccaggcagccttctccctggccctcgggactgtcctcgggccgcaaggaggagcttgctggagtcttagaggccatccagagccagcgagcaggagcgctgcgtctcccgcctcagctaggaagggggagtggcgctggcaggctggagctgggaacccagcgagcgcctgaccttcctcctcctcttcctgaccctcttcgcgtcttgggctccggaggaaggttctagcggctgcaggaggtccccagacccattttcctagaaggctggtgatggatctgctgctcctgccgccgccggggcacttggagcgcaccggcggcgcgtgagctgggctttgctctccactgccctgggcaaaccccgggccagccccgcctggcacctttgcctgagtccctttcggttcccgacccaaagccaccagcgtccagggagggaggaggaggtggtcctcaggtgcagccccgccgagatgtccgcgcagagcctgctccacagcgtcttctcctgttcctcgcccgcttcaagtagcgcggcctcggccaagggcttctccaagaggaagctgcgccagacccgcagcctggacccggccctgatcggcggctgcgggagcgacgaggcgggcgcggagggcagtgcgcggggagccacggcgggccgcctctactccccatcactcccagccgagagtctcggccctcgcttggcgtcctcttcccggggtccgccccccagggccaccaggctaccgcctcctggacctctttgctcgtccttctccacacccagcaccccgcaggagaagtcaccatccggcagctttcactttgactatgaggttcccctgggtcgcggcggcctcaagaagagcatggcctgggacctgccttctgtcctggccgggccagccagtagccgaagcgcttccagcatcctctgttcatccgggggaggccccaatggcatcttcgcttctcctaggaggtggctccagcagaggaagttccagtccccacccgacagtcgcgggcacccctacgtcgtgtggaaatccgagggtgatttcacctggaacagcatgtcaggccgcagtgtacggctgaggtcagtccccatccagagtctctcagagctggagagggcccggctgcaggaagtggctttttatcagttgcaacaggactgtgacctgagctgtcagatcaccattcccaaagatggacaaaagagaaagaaatctttaagaaagaaactggattcactaggaaaggagaaaaacaaagacaaagaattcatcccacaggcatttggaatgcccttatcccaagtcattgcgaatgacagggcctataaactcaagcaggacttgcagagggacgagcagaaagatgcatctgactttgtggcttccctcctcccatttggaaataaaagacaaaacaaagaactctcaagcagtaactcatctctcagctcaacctcagaaacaccgaatgagtcaacgtccccaaacaccccggaaccggctcctcgggctaggaggaggggtgccatgtcagtggattctatcaccgatcttgatgacaatcagtctcgactactagaagctttacaactttccttgcctgctgaggctcaaagtaaaaaggaaaaagccagagataagaaactcagtctgaatcctatttacagacaggtccctaggctggtggacagctgctgtcagcacctagaaaaacatggcctccagacagtggggatattccgagttggaagctcaaaaaagagagtgagacaattacgtgaggaatttgaccgtgggattgatgtctctctggaggaggagcacagtgttcatgatgtggcagccttgctgaaagagttcctgagggacatgccagacccccttctcaccagggagctgtacacagctttcatcaacactctcttgttggagccggaggaacagctgggcaccttgcagctcctcatataccttctacctccctgcaactgcgacaccctccaccgcctgctacagttcctctccatcgtggccaggcatgccgatgacaacatcagcaaagatgggcaagaggtcactgggaataaaatgacatctctaaacttagccaccatatttggacccaacctgctgcacaagcagaagtcatcagacaaagaattctcagttcagagttcagcccgggctgaggagagcacggccatcatcgctgttgtgcaaaagatgattgaaaattatgaagccctgttcatggttcccccagatctccagaacgaagtgctgatcagcctgttagagaccgatcctgatgtcgtggactatttactcagaagaaaggcttcccaatcatcaagccctgacatgctgcagtcggaagtttccttttccgtgggagggaggcattcatctacagactccaacaaggcctccagcggagacatctccccttatgacaacaactccccagtgctgtctgagcgctccctgctggctatgcaagaggacgcggccccggggggctcggagaagctttacagagtgccagggcagtttatgctggtgggccacttgtcgtcgtcaaagtcaagggaaagttctcctggaccaaggcttgggaaagatctgtcagaggagcctttcgatatctggggaacttggcattcaacattaaaaagcggatccaaagacccaggaatgacaggttcctctggagacatttttgaaagcagctccctaagagcggggccctgctccctttctcaagggaacctgtccccaaattggcctcggtggcaggggagccccgcagagctggacagcgacacgcagggggctcggaggactcaggccgcagcccccgcgacggagggcagggcccaccctgcggtgtcgcgcgcctgcagcacgccccacgtccaggtggcagggaaagccgagcggcccacggccaggtcggagcagtacttgaccctgagcggcgcccacgacctcagcgagagtgagctggatgtggccgggctgcagagccgggccacacctcagtgccaaagaccccatgggagtgggagggatgacaagcggcccccgcctccatacccgggcccagggaagcccgcggcagcggcagcctggatccaggggcccccggaaggcgtggagacacccacggaccagggaggccaagcagccgagcgagagcagcaggtcacgcagaaaaaactgagcagcgccaactccctgccagcgggcgagcaggacagtccgcgcctgggggacgctggctggctcgactggcagagagagcgctggcagatctgggagctcctgtcgaccgacaaccccgatgccctgcccgagacgctggtctgagcccgcacccagccgagccccccctgccccgagccccccgccctccagcccaggggggaccgtgggtggtggccactggcacacttagtgttcttctttcacacttctcaaaagtgacacaagagaaatccagttcacctacagaggtagagcactcacgcccccgccattgagaataaggttccattgcgtagccagccttaggaaaaacaaacagaacccaaaccagatggcaatgtccaatctaaaaacgtccctcttggctctataatataagatacaactcttgcttggtatagcctaaccgtatttatgtgtcttcggttttgactattgtgtattctgtaacagattatgtataatcatatatgatatattcacaaagagaaaacaaaaggaacttttaaaaaaaaaatcacttcacttatattaagcaatgagatatactaaacaatgagattctatagaatgttctagaatgtgcacaagcgggtttctgtgcttttgccatagctttataactggggataacccttccttcgataccaaacactaacaagaggaagcagaatatgagaagccatatttttacataggagtcagatacaaaaagaaaaatcactgaatgcttttagatattgaatacgttttcaggaaaatgctaaatctgatagattacgaaatatatttttagaacttgtttagaaaggattcagttaaccaaacaagaaaaaggcagtgcctcacaaagaaattaagaagttgtccgtcccacgttacatcaaattcagttttatataggccatatataatatatatttataatgtataatttttatgtatttttcaaaactacaaactggaatccaactataaagtgtttaagaatctacacagaatattcaaattatagaacatgttttttccctttgccccataatcagtatttgccaaattacatgcaattccttaaaaactaaatcacatttggtaaaaggcctacagctttgtacttacattgtgccaaaggctgaggaaatgttttctttcgtaattttatgtgtattgtaaaatgttctaccgtactttagtagtttgaagtttttcaagtgcataactatttttgaccagcagatggcgatacgcttcagtattttatgcaattttttttcacttctgaagggaaagtgtattataaaaaaagattttttttttttttataaaacatgctactcttaattttcatgttggtgatgaaattcccagtggtgtttcttaaggttctatcttgtgccatgatgaataaaaagttaagcaaa

SEQ ID NO: 26307 - DNA, 2267 bp, Homo sapiens
  source 1..2267: mol_type = unassigned DNA
ttggagttgtatgatcttcagatcttaggcacaaaaccaccgatgaattccgatacacatcgtaactttgaccccaccgcaacccttagaaatcagggtgatttcacctggaacagcatgtcaggccgcagtgtacggctgaggtcagtccccatccagagtctctcagagctggagagggcccggctgcaggaagtggctttttatcagttgcaacaggactgtgacctgagctgtcagatcaccattcccaaagatggacaaaagagaaagaaatctttaagaaagaaactggattcactaggaaaggagaaaaacaaagacaaagaattcatcccacaggcatttggaatgcccttatcccaagtcattgcgaatgacagggcctataaactcaagcaggacttgcagagggacgagcagaaagatgcatctgactttgtggcttccctcctcccatttggaaataaaagacaaaacaaagaactctcaagcagtaactcatctctcagctcaacctcagaaacaccgaatgagtcaacgtccccaaacaccccggaaccggctcctcgggctaggaggaggggtgccatgtcagtggattctatcaccgatcttgatgacaatcagtctcgactactagaagctttacaactttccttgcctgctgaggctcaaagtaaaaaggaaaaagccagagataagaaactcagtctgaatcctatttacagacaggtccctaggctggtggacagctgctgtcagcacctagaaaaacatggcctccagacagtggggatattccgagttggaagctcaaaaaagagagtgagacaattacgtgaggaatttgaccgtgggattgatgtctctctggaggaggagcacagtgttcatgatgtggcagccttgctgaaagagttcctgagggacatgccagacccccttctcaccagggagctgtacacagctttcatcaacactctcttgttggagccggaggaacagctgggcaccttgcagctcctcatataccttctacctccctgcaactgcgacaccctccaccgcctgctacagttcctctccatcgtggccaggcatgccgatgacaacatcagcaaagatgggcaagaggtcactgggaataaaatgacatctctaaacttagccaccatatttggacccaacctgctgcacaagcagaagtcatcagacaaagaattctcagttcagagttcagcccgggctgaggagagcacggccatcatcgctgttgtgcaaaagatgattgaaaattatgaagccctgttcatggttcccccagatctccagaacgaagtgctgatcagcctgttagagaccgatcctgatgtcgtggactatttactcagaagaaaggcttcccaatcatcaagccctgacatgctgcagtcggaagtttccttttccgtgggagggaggcattcatctacagactccaacaaggcctccagcggagacatctccccttatgacaacaactccccagtgctgtctgagcgctccctgctggctatgcaagaggacgcggccccggggggctcggagaagctttacagagtgccagggcagtttatgctggtgggccacttgtcgtcgtcaaagtcaagggaaagttctcctggaccaaggcttgggaaaggtaactggagcctggccagcaggcgctggccaaaacaagcgaccctcctcttgttgcatgtggcatggtgtggggctcttcggaccttctcttcgtctctcccttatttgatgtttctgtaattcaacctgcatttaccgagtacctgctgaacgcctactctaggaagaggaaggtatggcgagcccagtcgttggctgggagggtccctgcaggccacactccaagtctcagatatctgggaaataaacgcatgcccagaggagccactcctattcccagctgattctttttccctccagcatcctaggaactttatgtatactggatttgggttgcatatttgctagtctgaggtgccacccaattactgctgttacatttctaaagaaaacaagctgaacctactatatgtatgaagacaaccttccagaaccaaatagtgttagtatccaatgacaagagagcactatactgggagtcacaaacctgctctgccactttcaacctgcaggatctccagtgagcgattgagcttcccagagtcccatttcctcctgctgtgaaaactcagaatgataac

SEQ ID NO: 26308 - DNA, 3632 bp, Homo sapiens
  source 1..3632: mol_type = unassigned DNA
ggctgggctgcgaatagcgtgttcctctccggcggaacacacacacccggccttggggctgtctcctgagctccctcctccacggagagcgctgagcgccgccgggaattccatcccaccgtgggcacgcagtctttggaggtcccgggcgcagcacgctcggtgtccccacactgcagcaagacagagaccccgcgggaaccttgagcttggaacaacccttgagcctctgcagtcggaagagtgggcgcagcagcccagcggaggccaggcgcgcaacctcgggcgccggggcaaggagagagtgcagggaggcgcagctcaggcgcccggctcaggagcgggaggaagttctcgcggcgccgggagcgcggtggacgcgccctgggcgcacgcccaggcagccttctccctggccctcgggactgtcctcgggccgcaaggaggagcttgctggagtcttagaggccatccagagccagcgagcaggagcgctgcgtctcccgcctcagctaggaagggggagtggcgctggcaggctggagctgggaacccagcgagcgcctgaccttcctcctcctcttcctgaccctcttcgcgtcttgggctccggaggaaggttctagcggctgcaggaggtccccagacccattttcctagaaggctggtgatggatctgctgctcctgccgccgccggggcacttggagcgcaccggcggcgcgtgagctgggctttgctctccactgccctgggcaaaccccgggccagccccgcctggcacctttgcctgagtccctttcggttcccgacccaaagccaccagcgtccagggagggaggaggaggtggtcctcaggtgcagccccgccgagatgtccgcgcagagcctgctccacagcgtcttctcctgttcctcgcccgcttcaagtagcgcggcctcggccaagggcttctccaagaggaagctgcgccagacccgcagcctggacccggccctgatcggcggctgcgggagcgacgaggcgggcgcggagggcagtgcgcggggagccacggcgggccgcctctactccccatcactcccagccgagagtctcggccctcgcttggcgtcctcttcccggggtccgccccccagggccaccaggctaccgcctcctggacctctttgctcgtccttctccacacccagcaccccgcaggagaagtcaccatccggcagctttcactttgactatgaggttcccctgggtcgcggcggcctcaagaagagcatggcctgggacctgccttctgtcctggccgggccagccagtagccgaagcgcttccagcatcctctgttcatccgggggaggccccaatggcatcttcgcttctcctaggaggtggctccagcagaggaagttccagtccccacccgacagtcgcgggcacccctacgtcgtgtggaaatccgagggtgatttcacctggaacagcatgtcaggccgcagtgtacggctgaggtcagtccccatccagagtctctcagagctggagagggcccggctgcaggaagtggctttttatcagttgcaacaggactgtgacctgagctgtcagatcaccattcccaaagatggacaaaagagaaagaaatctttaagaaagaaactggattcactaggaaaggagaaaaacaaagacaaagaattcatcccacaggcatttggaatgcccttatcccaagtcattgcgaatgacagggcctataaactcaagcaggacttgcagagggacgagcagaaagatgcatctgactttgtggcttccctcctcccatttggaaataaaagacaaaacaaagaactctcaagcagtaactcatctctcagctcaacctcagaaacaccgaatgagtcaacgtccccaaacaccccggaaccggctcctcgggctaggaggaggggtgccatgtcagtggattctatcaccgatcttgatgacaatcagtctcgactactagaagctttacaactttccttgcctgctgaggctcaaagtaaaaaggaaaaagccagagataagaaactcagtctgaatcctatttacagacaggtccctaggctggtggacagctgctgtcagcacctagaaaaacatggcctccagacagtggggatattccgagttggaagctcaaaaaagagagtgagacaattacgtgaggaatttgaccgtgggattgatgtctctctggaggaggagcacagtgttcatgatgtggcagccttgctgaaagagttcctgagggacatgccagacccccttctcaccagggagctgtacacagctttcatcaacactctcttgttggagccggaggaacagctgggcaccttgcagctcctcatataccttctacctccctgcaactgcgacaccctccaccgcctgctacagttcctctccatcgtggccaggcatgccgatgacaacatcagcaaagatgggcaagaggtcactgggaataaaatgacatctctaaacttagccaccatatttggacccaacctgctgcacaagcagaagtcatcagacaaagaattctcagttcagagttcagcccgggctgaggagagcacggccatcatcgctgttgtgcaaaagatgattgaaaattatgaagccctgttcatggttcccccagatctccagaacgaagtgctgatcagcctgttagagaccgatcctgatgtcgtggactatttactcagaagaaaggcttcccaatcatcaagccctgacatgctgcagtcggaagtttccttttccgtgggagggaggcattcatctacagactccaacaaggcctccagcggagacatctccccttatgacaacaactccccagtgctgtctgagcgctccctgctggctatgcaagaggacgcggccccggggggctcggagaagctttacagagtgccagggcagtttatgctggtgggccacttgtcgtcgtcaaagtcaagggaaagttctcctggaccaaggcttgggaaaggtaactggagcctggccagcaggcgctggccaaaacaagcgaccctcctcttgttgcatgtggcatggtgtggggctcttcggaccttctcttcgtctctcccttatttgatgtttctgtaattcaacctgcatttaccgagtacctgctgaacgcctactctaggaagaggaaggtatggcgagcccagtcgttggctgggagggtccctgcaggccacactccaagtctcagatatctgggaaataaacgcatgcccagaggagccactcctattcccagctgattctttttccctccagcatcctaggaactttatgtatactggatttgggttgcatatttgctagtctgaggtgccacccaattactgctgttacatttctaaagaaaacaagctgaacctactatatgtatgaagacaaccttccagaaccaaatagtgttagtatccaatgacaagagagcactatactgggagtcacaaacctgctctgccactttcaacctgcaggatctccagtgagcgattgagcttcccagagtcccatttcctcctgctgtgaaaactcagaatgataac

SEQ ID NO: 26309 - DNA, 2073 bp, Homo sapiens
  source 1..2073: mol_type = unassigned DNA
atgtccgcgcagagcctgctccacagcgtcttctcctgttcctcgcccgcttcaagtagcgcggcctcggccaagggcttctccaagaggaagctgcgccagacccgcagcctggacccggccctgatcggcggctgcgggagcgacgaggcgggcgcggagggcagtgcgcggggagccacggcgggccgcctctactccccatcactcccagccgagagtctcggccctcgcttggcgtcctcttcccggggtccgccccccagggccaccaggctaccgcctcctggacctctttgctcgtccttctccacacccagcaccccgcaggagaagtcaccatccggcagctttcactttgactatgaggttcccctgggtcgcggcggcctcaagaagagcatggcctgggacctgccttctgtcctggccgggccagccagtagccgaagcgcttccagcatcctctgttcatccgggggaggccccaatggcatcttcgcttctcctaggaggtggctccagcagaggaagttccagtccccacccgacagtcgcgggcacccctacgtcgtgtggaaatccgagttggagttgtatgatcttcagatcttaggcacaaaaccaccgatgaattccgatacacatcgtaactttgaccccaccgcaacccttagaaatcagggtgatttcacctggaacagcatgtcaggccgcagtgtacggctgaggtcagtccccatccagagtctctcagagctggagagggcccggctgcaggaagtggctttttatcagttgcaacaggactgtgacctgagctgtcagatcaccattcccaaagatggacaaaagagaaagaaatctttaagaaagaaactggattcactaggaaaggagaaaaacaaagacaaagaattcatcccacaggcatttggaatgcccttatcccaagtcattgcgaatgacagggcctataaactcaagcaggacttgcagagggacgagcagaaagatgcatctgactttgtggcttccctcctcccatttggaaataaaagacaaaacaaagaactctcaagcagtaactcatctctcagctcaacctcagaaacaccgaatgagtcaacgtccccaaacaccccggaaccggctcctcgggctaggaggaggggtgccatgtcagtggattctatcaccgatcttgatgacaatcagtctcgactactagaagctttacaactttccttgcctgctgaggctcaaagtaaaaaggaaaaagccagagataagaaactcagtctgaatcctatttacagacaggtccctaggctggtggacagctgctgtcagcacctagaaaaacatggcctccagacagtggggatattccgagttggaagctcaaaaaagagagtgagacaattacgtgaggaatttgaccgtgggattgatgtctctctggaggaggagcacagtgttcatgatgtggcagccttgctgaaagagttcctgagggacatgccagacccccttctcaccagggagctgtacacagctttcatcaacactctcttgttggagccggaggaacagctgggcaccttgcagctcctcatataccttctacctccctgcaactgcgacaccctccaccgcctgctacagttcctctccatcgtggccaggcatgccgatgacaacatcagcaaagatgggcaagaggtcactgggaataaaatgacatctctaaacttagccaccatatttggacccaacctgctgcacaagcagaagtcatcagacaaagaattctcagttcagagttcagcccgggctgaggagagcacggccatcatcgctgttgtgcaaaagatgattgaaaattatgaagccctgttcatggttcccccagatctccagaacgaagtgctgatcagcctgttagagaccgatcctgatgtcgtggactatttactcagaagaaaggcttcccaatcatcaacaagttctgtgcttccggctgcagtgcaggcctgcccacagtaccctgccagcatgtttacgccctga

SEQ ID NO: 26310 - DNA, 3883 bp, Homo sapiens
  source 1..3883: mol_type = unassigned DNA
ccggctccgcagcggcagcgggacgctgtgccaggggcgctttgcacagcactcggcacgcacggagcagggctcgcgcccaggggctgccccaggatggcagtgaagtgcggggaactcagagagacaccgtgaccccaggctgagcccaaggcgcgccactcctcccggaggcgacatggggcacccggtgtaccgcggcgagaagccccagctgcactacgcgggtgatttcacctggaacagcatgtcaggccgcagtgtacggctgaggtcagtccccatccagagtctctcagagctggagagggcccggctgcaggaagtggctttttatcagttgcaacaggactgtgacctgagctgtcagatcaccattcccaaagatggacaaaagagaaagaaatctttaagaaagaaactggattcactaggaaaggagaaaaacaaagacaaagaattcatcccacaggcatttggaatgcccttatcccaagtcattgcgaatgacagggcctataaactcaagcaggacttgcagagggacgagcagaaagatgcatctgactttgtggcttccctcctcccatttggaaataaaagacaaaacaaagaactctcaagcagtaactcatctctcagctcaacctcagaaacaccgaatgagtcaacgtccccaaacaccccggaaccggctcctcgggctaggaggaggggtgccatgtcagtggattctatcaccgatcttgatgacaatcagtctcgactactagaagctttacaactttccttgcctgctgaggctcaaagtaaaaaggaaaaagccagagataagaaactcagtctgaatcctatttacagacaggtccctaggctggtggacagctgctgtcagcacctagaaaaacatggcctccagacagtggggatattccgagttggaagctcaaaaaagagagtgagacaattacgtgaggaatttgaccgtgggattgatgtctctctggaggaggagcacagtgttcatgatgtggcagccttgctgaaagagttcctgagggacatgccagacccccttctcaccagggagctgtacacagctttcatcaacactctcttgttggagccggaggaacagctgggcaccttgcagctcctcatataccttctacctccctgcaactgcgacaccctccaccgcctgctacagttcctctccatcgtggccaggcatgccgatgacaacatcagcaaagatgggcaagaggtcactgggaataaaatgacatctctaaacttagccaccatatttggacccaacctgctgcacaagcagaagtcatcagacaaagaattctcagttcagagttcagcccgggctgaggagagcacggccatcatcgctgttgtgcaaaagatgattgaaaattatgaagccctgttcatggttcccccagatctccagaacgaagtgctgatcagcctgttagagaccgatcctgatgtcgtggactatttactcagaagaaaggcttcccaatcatcaagccctgacatgctgcagtcggaagtttccttttccgtgggagggaggcattcatctacagactccaacaaggcctccagcggagacatctccccttatgacaacaactccccagtgctgtctgagcgctccctgctggctatgcaagaggacgcggccccggggggctcggagaagctttacagagtgccagggcagtttatgctggtgggccacttgtcgtcgtcaaagtcaagggaaagttctcctggaccaaggcttgggaaagatctgtcagaggagcctttcgatatctggggaacttggcattcaacattaaaaagcggatccaaagacccaggaatgacaggttcctctggagacatttttgaaagcagctccctaagagcggggccctgctccctttctcaagggaacctgtccccaaattggcctcggtggcaggggagccccgcagagctggacagcgacacgcagggggctcggaggactcaggccgcagcccccgcgacggagggcagggcccaccctgcggtgtcgcgcgcctgcagcacgccccacgtccaggtggcagggaaagccgagcggcccacggccaggtcggagcagtacttgaccctgagcggcgcccacgacctcagcgagagtgagctggatgtggccgggctgcagagccgggccacacctcagtgccaaagaccccatgggagtgggagggatgacaagcggcccccgcctccatacccgggcccagggaagcccgcggcagcggcagcctggatccaggggcccccggaaggcgtggagacacccacggaccagggaggccaagcagccgagcgagagcagcaggtcacgcagaaaaaactgagcagcgccaactccctgccagcgggcgagcaggacagtccgcgcctgggggacgctggctggctcgactggcagagagagcgctggcagatctgggagctcctgtcgaccgacaaccccgatgccctgcccgagacgctggtctgagcccgcacccagccgagccccccctgccccgagccccccgccctccagcccaggggggaccgtgggtggtggccactggcacacttagtgttcttctttcacacttctcaaaagtgacacaagagaaatccagttcacctacagaggtagagcactcacgcccccgccattgagaataaggttccattgcgtagccagccttaggaaaaacaaacagaacccaaaccagatggcaatgtccaatctaaaaacgtccctcttggctctataatataagatacaactcttgcttggtatagcctaaccgtatttatgtgtcttcggttttgactattgtgtattctgtaacagattatgtataatcatatatgatatattcacaaagagaaaacaaaaggaacttttaaaaaaaaaatcacttcacttatattaagcaatgagatatactaaacaatgagattctatagaatgttctagaatgtgcacaagcgggtttctgtgcttttgccatagctttataactggggataacccttccttcgataccaaacactaacaagaggaagcagaatatgagaagccatatttttacataggagtcagatacaaaaagaaaaatcactgaatgcttttagatattgaatacgttttcaggaaaatgctaaatctgatagattacgaaatatatttttagaacttgtttagaaaggattcagttaaccaaacaagaaaaaggcagtgcctcacaaagaaattaagaagttgtccgtcccacgttacatcaaattcagttttatataggccatatataatatatatttataatgtataatttttatgtatttttcaaaactacaaactggaatccaactataaagtgtttaagaatctacacagaatattcaaattatagaacatgttttttccctttgccccataatcagtatttgccaaattacatgcaattccttaaaaactaaatcacatttggtaaaaggcctacagctttgtacttacattgtgccaaaggctgaggaaatgttttctttcgtaattttatgtgtattgtaaaatgttctaccgtactttagtagtttgaagtttttcaagtgcataactatttttgaccagcagatggcgatacgcttcagtattttatgcaattttttttcacttctgaagggaaagtgtattataaaaaaagattttttttttttttataaaacatgctactcttaattttcatgttggtgatgaaattcccagtggtgtttcttaaggttctatcttgtgccatgatgaataaaaagttaagcaaag

SEQ ID NO: 26311 - DNA, 1795 bp, Homo sapiens
  source 1..1795: mol_type = unassigned DNA
ctactctaatcacttccaacgccactatccagcaggacgagatggaggggaatcctagaggaatccttctctagccttcaagtctggggagagcctgccctgttcctggcctggctcacttgggtcgactgttctcatgtacaggatatttggtgatttcacctggaacagcatgtcaggccgcagtgtacggctgaggtcagtccccatccagagtctctcagagctggagagggcccggctgcaggaagtggctttttatcagttgcaacaggactgtgacctgagctgtcagatcaccattcccaaagatggacaaaagagaaagaaatctttaagaaagaaactggattcactaggaaaggagaaaaacaaagacaaagaattcatcccacaggcatttggaatgcccttatcccaagtcattgcgaatgacagggcctataaactcaagcaggacttgcagagggacgagcagaaagatgcatctgactttgtggcttccctcctcccatttggaaataaaagacaaaacaaagaactctcaagcagtaactcatctctcagctcaacctcagaaacaccgaatgagtcaacgtccccaaacaccccggaaccggctcctcgggctaggaggaggggtgccatgtcagtggattctatcaccgatcttgatgacaatcagtctcgactactagaagctttacaactttccttgcctgctgaggctcaaagtaaaaaggaaaaagccagagataagaaactcagtctgaatcctatttacagacaggtccctaggctggtggacagctgctgtcagcacctagaaaaacatggcctccagacagtggggatattccgagttggaagctcaaaaaagagagtgagacaattacgtgaggaatttgaccgtgggattgatgtctctctggaggaggagcacagtgttcatgatgtggcagccttgctgaaagagttcctgagggacatgccagacccccttctcaccagggagctgtacacagctttcatcaacactctcttgttggagccggaggaacagctgggcaccttgcagctcctcatataccttctacctccctgcaactgcgacaccctccaccgcctgctacagttcctctccatcgtggccaggcatgccgatgacaacatcagcaaagatgggcaagaggtcactgggaataaaatgacatctctaaacttagccaccatatttggacccaacctgctgcacaagcagaagtcatcagacaaagaattctcagttcagagttcagcccgggctgaggagagcacggccatcatcgctgttgtgcaaaagatgattgaaaattatgaagccctgttcatggttcccccagatctccagaacgaagtgctgatcagcctgttagagaccgatcctgatgtcgtggactatttactcagaagaaaggcttcccaatcatcaacaagttctgtgcttccggctgcagtgcaggcctgcccacagtaccctgccagcatgtttacgccctgacctggagggaccagctaaggaagccctgacatgctgcagtcggaagtttccttttccgtgggagggaggcattcatctacagactccaacaaggcctccagcggagacatctccccttatgacaacaactccccagtgctgtctgagcgctccctgctggctatgcaagaggacgcggccccggggggctcggagaagctttacagagtgccagggcagtttatgctggtgggccacttgtcgtcgtcaaagtca

SEQ ID NO: 26312 - DNA, 2096 bp, Homo sapiens
  source 1..2096: mol_type = unassigned DNA
actcatttgtgcacttactcagggacacagcctgcctctgttctgaaaggacaggaacttctcaatgatccgatgaaaagattgcatatttttggtcccaagattcacagtagcggaggtctctggcaacaaaagggtgatttcacctggaacagcatgtcaggccgcagtgtacggctgaggtcagtccccatccagagtctctcagagctggagagggcccggctgcaggaagtggctttttatcagttgcaacaggactgtgacctgagctgtcagatcaccattcccaaagatggacaaaagagaaagaaatctttaagaaagaaactggattcactaggaaaggagaaaaacaaagacaaagaattcatcccacaggcatttggaatgcccttatcccaagtcattgcgaatgacagggcctataaactcaagcaggacttgcagagggacgagcagaaagatgcatctgactttgtggcttccctcctcccatttggaaataaaagacaaaacaaagaactctcaagcagtaactcatctctcagctcaacctcagaaacaccgaatgagtcaacgtccccaaacaccccggaaccggctcctcgggctaggaggaggggtgccatgtcagtggattctatcaccgatcttgatgacaatcagtctcgactactagaagctttacaactttccttgcctgctgaggctcaaagtaaaaaggaaaaagccagagataagaaactcagtctgaatcctatttacagacaggtccctaggctggtggacagctgctgtcagcacctagaaaaacatggcctccagacagtggggatattccgagttggaagctcaaaaaagagagtgagacaattacgtgaggaatttgaccgtgggattgatgtctctctggaggaggagcacagtgttcatgatgtggcagccttgctgaaagagttcctgagggacatgccagacccccttctcaccagggagctgtacacagctttcatcaacactctcttgttggagccggaggaacagctgggcaccttgcagctcctcatataccttctacctccctgcaactgcgacaccctccaccgcctgctacagttcctctccatcgtggccaggcatgccgatgacaacatcagcaaagatgggcaagaggtcactgggaataaaatgacatctctaaacttagccaccatatttggacccaacctgctgcacaagcagaagtcatcagacaaagaattctcagttcagagttcagcccgggctgaggagagcacggccatcatcgctgttgtgcaaaagatgattgaaaattatgaagccctgttcatggttcccccagatctccagaacgaagtgctgatcagcctgttagagaccgatcctgatgtcgtggactatttactcagaagaaaggcttcccaatcatcaagccctgacatgctgcagtcggaagtttccttttccgtgggagggaggcattcatctacagactccaacaaggcctccagcggagacatctccccttatgacaacaactccccagtgctgtctgagcgctccctgctggctatgcaagaggacgcggccccggggggctcggagaagctttacagagtgccagggcagtttatgctggtgggccacttgtcgtcgtcaaagtcaagggaaagttctcctggaccaaggcttgggaaagatctgtcagaggagcctttcgatatctggggaacttggcattcaacattaaaaagcggatccaaagacccaggaatgacaggaactactcctctccttaacatctcttctcaagaggatcacaggcaaaaagatctaaggctcattttcaagatttacccatgatcatggagcagcactataaatccaaagctactatagaagcattgaaaacaaatataaaaggttcaccttagtctcattttactgagtcacagtaaaccagacttacagaatcatctatttttaaggtgacaattgttcagatagtaccactgatcaatgatcccctaactttttctaaacattttatctaacagtgttttcagtttttt

SEQ ID NO: 26313 - DNA, 1484 bp, Homo sapiens
  source 1..1484: mol_type = unassigned DNA
gggggccggcggggtccgtggccagagctgcagagagacaaggcggcggcggctgctgtgctgggtgcagtgaggaagaggccctcggtggtgcccatggctggccaggatcctgcgctgagcacgagtcacccgttctacgacgtggccagacatggcattctgcaggtggcaggggatgaccgctttggaagacgtgttgtcacgttcagctgctgccggatgccaccctcccacgagctggaccaccagcggctgctggagtatttgaagtacacactggaccaatacgttgagaacgattataccatcgtctatttccactacgggctgaacagccggaacaagccttccctgggctggctccagagcgcatacaaggagttcgataggaagtacaagaagaacttgaaggccctctacgtggtgcaccccaccagcttcatcaaggtcctgtggaacatcttgaagcccctcatcagtcacaagtttgggaagaaagtcatctatttcaactacctgagtgagctccacgaacaccttaaatacgaccagctggtcatccctcccgaagttttgcggtacgatgagaagctccagagcctgcacgagggccggacgccgcctcccaccaagacaccaccgccgcggcccccgctgcccacacagcagtttggcgtcagtctgcaatacctcaaagacaaaaatcaaggcgaactcatcccccctgtgctgaggttcacagtgacgtacctgagagagaaaggcctgcgcaccgagggcctgttccggagatccgccagcgtgcagaccgtccgcgagatccagaggctctacaaccaagggaagcccgtgaactttgacgactacggggacattcacatccctgccgtgatcctgaagaccttcctgcgagagctgccccagccgcttctgaccttccaggcctacgagcagattctcgggatcacctgtgtcccgggagagcatcttcaacaaaatgaacagctctaacctggcctgtgtcttcgggctgaatttgatctggccatcccagggggtctcctccctgagtgcccttgtgcccctgaacatgttcactgaactgctgatcgagtactatgaaaagatcttcagcaccccggaggcacctggggagcacggcctggcaccatgggaacaggggagcagggcagcccctttgcaggaggctgtgccacggacacaagccacgggcctcaccaagcctaccctacctccgagtcccctgatggcagccagaagacgtctctagtgttgcgaacactctgtatatttcgagctacctcccacacctgtctgtgcacttgtatgttttgtaaacttggcatctgtaaaaataaccagccattagatgaattcagaaccttctaatgaaaactccatgcctctggtccttggactcttgtccatggttcctgagctgtggaccgggatagaataat

SEQ ID NO: 26314 - DNA, 1584 bp, Homo sapiens
  source 1..1584: mol_type = unassigned DNA
ggccggcggggtccgtggccagagctgcagagagacaaggcggcggcggctgctgtgctgggtgcagtgaggaagaggccctcggtggtgcccatggctggccaggatcctgcgctgagcacgagtcacccgttctacgacgtggccagacatggcattctgcaggtggcaggggatgaccgctttggaagacgtgttgtcacgttcagctgctgccggatgccaccctcccacgagctggaccaccagcggctgctggagtatttgaagtacacactggaccaatacgttgagaacgattataccatcgtctatttccactacgggctgaacagccggaacaagccttccctgggctggctccagagcgcatacaaggagttcgataggaagtacaagaagaacttgaaggccctctacgtggtgcaccccaccagcttcatcaaggtcctgtggaacatcttgaagcccctcatcagtcacaagtttgggaagaaagtcatctatttcaactacctgagtgagctccacgaacaccttaaatacgaccagctggtcatccctcccgaagttttgcggtacgatgagaagctccagagcctgcacgagggccggacgccgcctcccaccaagacaccaccgccgcggcccccgctgcccacacagcagtttggcgtcagtctgcaatacctcaaagacaaaaatcaaggcgaactcatcccccctgtgctgaggttcacagtgacgtacctgagagagaaaggcctgcgcaccgagggcctgttccggagatccgccagcgtgcagaccgtccgcgagatccagaggctctacaaccaagggaagcccgtgaactttgacgactacggggacattcacatccctgccgtgatcctgaagaccttcctgcgagagctgccccagccgcttctgaccttccaggcctacgagcagattctcgggatcacctgtgtggagagcagcctgcgtgtcactggctgccgccagatcttacggagcctcccagagcacaactacgtcgtcctccgctacctcatgggcttcctgcatgcggtgtcccgggagagcatcttcaacaaaatgaacagctctaacctggcctgtgtcttcgggctgaatttgatctggccatcccagggggtctcctccctgagtgcccttgtgcccctgaacatgttcactgaactgctgatcgagtactatgaaaagatcttcagcaccccggaggcacctggggagcacggcctggcaccatgggaacaggggagcagggcagcccctttgcaggaggctgtgccacggacacaagccacgggcctcaccaagcctaccctacctccgagtcccctgatggcagccagaagacgtctctagtgttgcgaacactctgtatatttcgagctacctcccacacctgtctgtgcacttgtatgttttgtaaacttggcatctgtaaaaataaccagccattagatgaattcagaaccttctaatgaaaactccatgcctctggtccttggactcttgtccatggttcctgagctgtggaccgggatagaataa

SEQ ID NO: 26315 - DNA, 1857 bp, Homo sapiens
  source 1..1857: mol_type = unassigned DNA
atgagttcgcccagcctcagtgacctgggcaagagagagccggccgccgccgcggacgagcggggcacgcagcagcgccgggcctgcgccaacgccacctggaacagcatccacaacggggtgatcgccgtcttccagcgcaaggggctgcccgaccaggagctcttcagcctcaacgagggcgtccggcagctgttgaagacagagctggggtccttcttcacggagtacctgcagaaccagctgctgacaaaaggcatggtgatccttcgggacaagattcgcttctatgaggagctgcagagagacaaggcggcggcggctgctgtgctgggtgcagtgaggaagaggccctcggtggtgcccatggctggccaggatcctgcgctgagcacgagtcacccgttctacgacgtggccagacatggcattctgcaggtggcaggggatgaccgctttggaagacgtgttgtcacgttcagctgctgccggatgccaccctcccacgagctggaccaccagcggctgctggagtatttgaagtacacactggaccaatacgttgagaacgattataccatcgtctatttccactacgggctgaacagccggaacaagccttccctgggctggctccagagcgcatacaaggagttcgataggaagtacaagaagaacttgaaggccctctacgtggtgcaccccaccagcttcatcaaggtcctgtggaacatcttgaagcccctcatcagtcacaagtttgggaagaaagtcatctatttcaactacctgagtgagctccacgaacaccttaaatacgaccagctggtcatccctcccgaagttttgcggtacgatgagaagctccagagcctgcacgagggccggacgccgcctcccaccaagacaccaccgccgcggcccccgctgcccacacagcagtttggcgtcagtctgcaatacctcaaagacaaaaatcaaggcgaactcatcccccctgtgctgaggttcacagtgacgtacctgagagagaaaggcctgcgcaccgagggcctgttccggagatccgccagcgtgcagaccgtccgcgagatccagaggctctacaaccaagggaagcccgtgaactttgacgactacggggacattcacatccctgccgtgatcctgaagaccttcctgcgagagctgccccagccgcttctgaccttccaggcctacgagcagattctcgggatcacctgtgtggagagcagcctgcgtgtcactggctgccgccagatcttacggagcctcccagagcacaactacgtcgtcctccgctacctcatgggcttcctgcatgcggtgtcccgggagagcatcttcaacaaaatgaacagctctaacctggcctgtgtcttcgggctgaatttgatctggccatcccagggggtctcctccctgagtgcccttgtgcccctgaacatgttcactgaactgctgatcgagtactatgaaaagatcttcagcaccccggaggcacctggggagcacggcctggcaccatgggaacaggggagcagggcagcccctttgcaggaggctgtgccacggacacaagccacgggcctcaccaagcctaccctacctccgagtcccctgatggcagccagaagacgtctctagtgttgcgaacactctgtatatttcgagctacctcccacacctgtctgtgcacttgtatgttttgtaaacttggcatctgtaaaaataaccagccattagatgaattcagaaccttctaatgaaaactccatgcctctggtccttggactcttgtccatggttcctgagctgtggaccgggatagaataa

SEQ ID NO: 26316 - DNA, 1725 bp, Homo sapiens
  source 1..1725: mol_type = unassigned DNA
acgtccggggaggggccaggtgagcggcagacccggcacgcaggtgggggccggcggggtccgtggccagagctgcagagagacaaggcggcggcggctgctgtgctgggtgcagtgaggaagaggccctcggtggtgcccatggctggccaggatcctgcgctgagcacgagtcacccgttctacgacgtggccagacatggcattctgcaggtggcaggggatgaccgctttggaagacgtgttgtcacgttcagctgctgccggatgccaccctcccacgagctggaccaccagcggctgctggagtatttgaagtacacactggaccaatacgttgagaacgattataccatcgtctatttccactacgggctgaacagccggaacaagccttccctgggctggctccagagcgcatacaaggagttcgataggaaagacggggatctcactatgtggcccaggctggtctcgaactccaagctcaagcgatcctcccacctcagcctcccaaagtactgggattacaggtacaagaagaacttgaaggccctctacgtggtgcaccccaccagcttcatcaaggtcctgtggaacatcttgaagcccctcatcagtcacaagtttgggaagaaagtcatctatttcaactacctgagtgagctccacgaacaccttaaatacgaccagctggtcatccctcccgaagttttgcggtacgatgagaagctccagagcctgcacgagggccggacgccgcctcccaccaagacaccaccgccgcggcccccgctgcccacacagcagtttggcgtcagtctgcaatacctcaaagacaaaaatcaaggcgaactcatcccccctgtgctgaggttcacagtgacgtacctgagagagaaaggcctgcgcaccgagggcctgttccggagatccgccagcgtgcagaccgtccgcgagatccagaggctctacaaccaagggaagcccgtgaactttgacgactacggggacattcacatccctgccgtgatcctgaagaccttcctgcgagagctgccccagccgcttctgaccttccaggcctacgagcagattctcgggatcacctgtgtggagagcagcctgcgtgtcactggctgccgccagatcttacggagcctcccagagcacaactacgtcgtcctccgctacctcatgggcttcctgcatgcggtgtcccgggagagcatcttcaacaaaatgaacagctctaacctggcctgtgtcttcgggctgaatttgatctggccatcccagggggtctcctccctgagtgcccttgtgcccctgaacatgttcactgaactgctgatcgagtactatgaaaagatcttcagcaccccggaggcacctggggagcacggcctggcaccatgggaacaggggagcagggcagcccctttgcaggaggctgtgccacggacacaagccacgggcctcaccaagcctaccctacctccgagtcccctgatggcagccagaagacgtctctagtgttgcgaacactctgtatatttcgagctacctcccacacctgtctgtgcacttgtatgttttgtaaacttggcatctgtaaaaataaccagccattagatgaattcagaaccttctaatgaaaactccatgcctctggtccttggactcttgtccatggttcctgagctgtggaccgggatagaataa

SEQ ID NO: 26317 - DNA, 573 bp, Homo sapiens
  source 1..573: mol_type = unassigned DNA
agacccggcacgcaggtgggggccggcggggtccgtggccaggcatactctaccacctcccgctgggcccaggccttccccttggcacagttggagcagcctctgttatgagctgcagagagacaaggcggcggcggctgctgtgctgggtgcagtgaggaagaggccctcggtggtgcccatggctggccaggatcctgcgctgagcacgagtcacccgttctacgacgtggccagacatggcattctgcaggtggcaggggatgaccgctttggaagacgtgttgtcacgttcagctgctgccggatgccaccctcccacgagctggaccaccagcggctgctggagtatttgaagtacacactggaccaatacgttgagaacgattataccatcgtctatttccactacgggctgaacagccggaacaagccttccctgggctggctccagagcgcatacaaggagttcgataggaaagacggggatctcactatgtggcccaggctggtctcgaactccaagctcaagcgatcctcccacctcagcctcccaaagtactgggattacag

SEQ ID NO: 26318 - DNA, 581 bp, Homo sapiens
  source 1..581: mol_type = unassigned DNA
ccagggcgtgtacggggacaaggggccgctggccgggcatactctaccacctcccgctgggcccaggccttccccttggcacagttggagcagcctctgttatggtcttatttttctccctccatggtgctggacactggatgggcacttggtgtacaaccgagagctgcagagagacaaggcggcggcggctgctgtgctgggtgcagtgaggaagaggccctcggtggtgcccatggctggccaggatcctgcgctgagcacgagtcacccgttctacgacgtggccagacatggcattctgcaggtggcaggggatgaccgctttggaagacgtgttgtcacgttcagctgctgccggatgccaccctcccacgagctggaccaccagcggctgctggagtatttgaagtacacactggaccaatacgttgagaacgattataccatcgtctatttccactacgggctgaacagccggaacaagccttccctgggctggctccagagcgcatacaaggagttcgataggaagtacaagaagaacttgaaggccctctacgtggtgcaccccaccagct

SEQ ID NO: 26319 - DNA, 2043 bp, Homo sapiens
  source 1..2043: mol_type = unassigned DNA
atgaggactctccgcaggttgaagttcatgagttcgcccagcctcagtgacctgggcaagagagagccggccgccgccgcggacgagcggggcacgcagcagcgccgggcctgcgccaacgccacctggaacagcatccacaacggggtgatcgccgtcttccagcgcaaggggctgcccgaccaggagctcttcagcctcaacgagggcgtccggcagctgttgaagacagagctggggtccttcttcacggagtacctgcagaaccagctgctgacaaaaggcatggtgatccttcgggacaagattcgcttctatgagggacagaagctgctggactcactggcagagacctgggacttcttcttcagtgacgtgctgcccatgctgcaggccatcttctacccggtgcagggcaaggagccatcggtgcgccagctggccctgctgcacttccggaatgccatcaccctcagtgtgaagctagaggatgcgctggcccgggcccatgcccgtgtgccccctgccatcgtgcagatgctgctggtgctgcagggggtacatgagtccaggggcgtgactgaggactacctgcgcctggagacgctggtccagaaggtggtgtcgccatacctgggcacctacggcctccactccagcgaggggcccttcacccattcctgcatcctggagctgcagagagacaaggcggcggcggctgctgtgctgggtgcagtgaggaagaggccctcggtggtgcccatggctggccaggatcctgcgctgagcacgagtcacccgttctacgacgtggccagacatggcattctgcaggtggcaggggatgaccgctttggaagacgtgttgtcacgttcagctgctgccggatgccaccctcccacgagctggaccaccagcggctgctggagtacaagaagaacttgaaggccctctacgtggtgcaccccaccagcttcatcaaggtcctgtggaacatcttgaagcccctcatcagtcacaagtttgggaagaaagtcatctatttcaactacctgagtgagctccacgaacaccttaaatacgaccagctggtcatccctcccgaagttttgcggtacgatgagaagctccagagcctgcacgagggccggacgccgcctcccaccaagacaccaccgccgcggcccccgctgcccacacagcagtttggcgtcagtctgcaatacctcaaagacaaaaatcaaggcgaactcatcccccctgtgctgaggttcacagtgacgtacctgagagagaaaggcctgcgcaccgagggcctgttccggagatccgccagcgtgcagaccgtccgcgagatccagaggctctacaaccaagggaagcccgtgaactttgacgactacggggacattcacatccctgccgtgatcctgaagaccttcctgcgagagctgccccagccgcttctgaccttccaggcctacgagcagattctcgggatcacctgtgtggagagcagcctgcgtgtcactggctgccgccagatcttacggagcctcccagagcacaactacgtcgtcctccgctacctcatgggcttcctgcatgcggtgtcccgggagagcatcttcaacaaaatgaacagctctaacctggcctgtgtcttcgggctgaatttgatctggccatcccagggggtctcctccctgagtgcccttgtgcccctgaacatgttcactgaactgctgatcgagtactatgaaaagatcttcagcaccccggaggcacctggggagcacggcctggcaccatgggaacaggggagcagggcagcccctttgcaggaggctgtgccacggacacaagccacgggcctcaccaagcctaccctacctccgagtcccctgatggcagccagaagacgtctctagtgttgcgaacactctgtatatttcgagctacctcccacacctgtctgtgcacttgtatgttttgtaaacttggcatctgtaaaaataaccagccattagatgaattcagaa

SEQ ID NO: 26320 - DNA, 2573 bp, Homo sapiens
  source 1..2573: mol_type = unassigned DNA
caaacccaaacagaaagcctcacattgtgcagtggagaagctgagagaagaggaaaagaggagtggccagactcccaccactacccaggaccaactcctgctcctgaatcttctgatgggccccacaaggtgacagtgctggctacaatgctatccagccggtggtggccaagttcctgggggatcctagggctgggcccccgaagccctcctcggggatcccagctctgtgccctctatgcctttacttatactggggcagatggccagcaggtgtctctggctgaaggggataggttcctactgcttcgaaagaccaactccgactggtggttggcaagacgcctagaagctccctccacctctcgacccatcttcgtcccagcagcctatatgatagaggaatccatcccttcccagagtccaactaccgtcatccccggccaattgctctggactcctgggccgaagttgtttcatggttccctggaggagttgtctcaggccctcccaagcagggctcaggctagctcggagcagcctcctccacttccccgcaaaatgtgtaggagcgtcagcactgacaatctgagccccagccttctgaagcctttccaggaaggaccaagcggaagatccctctcccaggaagacttgccgtcagaagccagtgccagcacagcaggcccccagcccctcatgtcagagccccctgtgtactgtaacctggtggaccttcgccgctgtcctcggtccccacccccaggccctgcatgccccctgctgcagaggctggatgcctgggagcagcacctggaccccaactctggacgctgcttctacataaattcactgactggctgcaagtcctggaagcccccgcgccgcagtcgcagcgagacgaaccctggctccatggaggggacacagaccctgaagaggaacaatgatgtcctgcaacctcaggcaaagggcttcagatctgacacagggaccccagaaccgcttgacccacagggttcactcagcctcagccaacgcacctcgcagcttgaccctccagccttgcaggcccctcgacctctgccgcagctcctggacgacccccatgaggtggaaaagtcgggtctgctcaacatgaccaagattgcccaaggggggcgcaagctcaggaagaactggggcccgtcttgggtggtgttaacgggtaacagcctggtgttctaccgagagccaccgccgacagcgccctcctcaggctggggaccagcgggtagccggcccgaaagtagcgtggacctgcgcggggcggccctggcgcacggccgccacctgtccagccgccgcaacgtcctgcacatccgcacgatccctggccacgagttcctgctgcagtcggaccacgagacagagctgcgagcctggcaccgcgcgctgcggactgtcatcgagcggctggatcgggagaaccccctggagctgcgtctgtcgggctctggacccgcggagctgagcgccggggaggacgaagaagaggagtcggagctggtgtccaagccgctgctgcgcctcagcagccgccggagctccattcgggggcccgaaggcaccgagcagaaccgcgtgcgcaacaaactaaagcggctcatcgcgaagagaccgcccttacaaagcctgcaggagcggggtctgctccgagaccaggtgttcggctgccagttggaatcactctgccagcgggaaggagacacggtgcccagctttttgcggctctgcattgctgctgtggataaaagaggtctagatgtggatggcatttatcgggtgagcgggaacttggcagtggtccagaagcttcgctttctggtggacagagagcgtgcggtcacctccgatgggaggtatgtgttcccagaacagccaggacaagaaggtcggttagatttggacagtactgagtgggatgacattcatgtggtcaccggagccctgaagctttttctccgggagctgccccagcctctggtgccaccactgctgctgccccatttccgtgctgcccttgcactctctcagatacaagaattaataggctcaatgccaaagcccaaccatgacactctacggtacctcctggagcatttatgcagggtgatagcacactcagataagaatcgcatgacaccccacaacctgggaattgtgtttggaccaaccctgtttcggccagagcaggagacatctgacccagcagcccatgctctctacccagggcagctggtccagctgatgctcaccaacttcaccagcctcttcccctgatgcagggaaggaagaagagaaaacatatttccggtcatctctggtggtgagaggctggtgttctgttttgaggatatccctttaaatctcccaaatgactgtctctatcttcatgagtgtgacttgaggtgttgggatgggtgagggagcttctctaaagaggaaagtgagtggattaacccctgcttctcttcttgttccctgttatcattcctccccaacataataatacataaagtggcatggtattt

SEQ ID NO: 26321 - DNA, 2653 bp, Homo sapiens
  source 1..2653: mol_type = unassigned DNA
ctccctgtttctgtcttgaacctgattctttcttcttatctccttcctgtgtccacctcaagactcccaccactacccaggaccaactcctgctcctgaatcttctgatgggccccacaaggtgacagtgctggctacaatgctatccagccggtggtggccaagttcctgggggatcctagggctgggcccccgaagccctcctcggggatcccagctctgtgccctctatgcctttacttatactggggcagatggccagcaggtgtctctggctgaaggggataggttcctactgcttcgaaagaccaactccgactggtggttggcaagacgcctagaagctccctccacctctcgacccatcttcgtcccagcagcctatatgatagaggaatccatcccttcccagagtccaactaccgtcatccccggccaattgctctggactcctgggccgaagttgtttcatggttccctggaggagttgtctcaggccctcccaagcagggctcaggctagctcggagcagcctcctccacttccccgcaaaatgtgtaggagcgtcagcactgacaatctgagccccagccttctgaagcctttccaggaaggaccaagcggaagatccctctcccaggaagacttgccgtcagaagccagtgccagcacagcaggcccccagcccctcatgtcagagccccctgtgtactgtaacctggtggaccttcgccgctgtcctcggtccccacccccaggccctgcatgccccctgctgcagaggctggatgcctgggagcagcacctggaccccaactctggacgctgcttctacataaattcactgactggctgcaagtcctggaagcccccgcgccgcagtcgcagcgagacgaaccctggctccatggaggggacacagaccctgaagaggaacaatgatgtcctgcaacctcaggcaaagggcttcagatctgacacagggaccccagaaccgcttgacccacagggttcactcagcctcagccaacgcacctcgcagcttgaccctccagccttgcaggcccctcgacctctgccgcagctcctggacgacccccatgaggtggaaaagtcgggtctgctcaacatgaccaagattgcccaaggggggcgcaagctcaggaagaactggggcccgtcttgggtggtgttaacgggtaacagcctggtgttctaccgagagccaccgccgacagcgccctcctcaggctggggaccagcgggtagccggcccgaaagtagcgtggacctgcgcggggcggccctggcgcacggccgccacctgtccagccgccgcaacgtcctgcacatccgcacgatccctggccacgagttcctgctgcagtcggaccacgagacagagctgcgagcctggcaccgcgcgctgcggactgtcatcgagcggctggttagatgggtggaggcccggagggaggctccgaccggccgggaccaagggagtggggatcgggagaaccccctggagctgcgtctgtcgggctctggacccgcggagctgagcgccggggaggacgaagaagaggagtcggagctggtgtccaagccgctgctgcgcctcagcagccgccggagctccattcgggggcccgaaggcaccgagcagaaccgcgtgcgcaacaaactaaagcggctcatcgcgaagagaccgcccttacaaagcctgcaggagcggggtctgctccgagaccaggtgttcggctgccagttggaatcactctgccagcgggaaggagacacggtgcccagctttttgcggctctgcattgctgctgtggataaaagaggtctagatgtggatggcatttatcgggtgagcgggaacttggcagtggtccagaagcttcgctttctggtggacagagagcgtgcggtcacctccgatgggaggtatgtgttcccagaacagccaggacaagaaggtcggttagatttggacagtactgagtgggatgacattcatgtggtcaccggagccctgaagctttttctccgggagctgccccagcctctggtgccaccactgctgctgccccatttccgtgctgcccttgcactctccgaatcagagcagtgcctctctcagatacaagaattaataggctcaatgccaaagcccaaccatgacactctacggtacctcctggagcatttatgcagggtgatagcacactcagataagaatcgcatgacaccccacaacctgggaattgtgtttggaccaaccctgtttcggccagagcaggagacatctgacccagcagcccatgctctctacccagggcagctggtccagctgatgctcaccaacttcaccagcctcttcccctgatgcagggaaggaagaagagaaaacatatttccggtcatctctggtggtgagaggctggtgttctgttttgaggatatccctttaaatctcccaaatgactgtctctatcttcatgagtgtgacttgaggtgttgggatgggtgagggagcttctctaaagaggaaagtgagtggattaacccctgcttctcttcttgttccctgttatcattcctccccaacataataatacataaagtggcatggtattttttctgatgc

SEQ ID NO: 26322 - DNA, 2597 bp, Homo sapiens
  source 1..2597: mol_type = unassigned DNA
ctccctgtttctgtcttgaacctgattctttcttcttatctccttcctgtgtccacctcaagactcccaccactacccaggaccaactcctgctcctgaatcttctgatgggccccacaaggtgacagtgctggctacaatgctatccagccggtggtggccaagttcctgggggatcctagggctgggcccccgaagccctcctcggggatcccagctctgtgccctctatgcctttacttatactggggcagatggccagcaggtgtctctggctgaaggggataggttcctactgcttcgaaagaccaactccgactggtggttggcaagacgcctagaagctccctccacctctcgacccatcttcgtcccagcagcctatatgatagaggaatccatcccttcccagagtccaactaccgtcatccccggccaattgctctggactcctgggccgaagttgtttcatggttccctggaggagttgtctcaggccctcccaagcagggctcaggctagctcggagcagcctcctccacttccccgcaaaatgtgtaggagcgtcagcactgacaatctgagccccagccttctgaagcctttccaggaaggaccaagcggaagatccctctcccaggaagacttgccgtcagaagccagtgccagcacagcaggcccccagcccctcatgtcagagccccctgtgtactgtaacctggtggaccttcgccgctgtcctcggtccccacccccaggccctgcatgccccctgctgcagaggctggatgcctgggagcagcacctggaccccaactctggacgctgcttctacataaattcactgactggctgcaagtcctggaagcccccgcgccgcagtcgcagcgagacgaaccctggctccatggaggggacacagaccctgaagaggaacaatgatgtcctgcaacctcaggcaaagggcttcagatctgacacagggaccccagaaccgcttgacccacagggttcactcagcctcagccaacgcacctcgcagcttgaccctccagccttgcaggcccctcgacctctgccgcagctcctggacgacccccatgaggtggaaaagtcgggtctgctcaacatgaccaagattgcccaaggggggcgcaagctcaggaagaactggggcccgtcttgggtggtgttaacgggtaacagcctggtgttctaccgagagccaccgccgacagcgccctcctcaggctggggaccagcgggtagccggcccgaaagtagcgtggacctgcgcggggcggccctggcgcacggccgccacctgtccagccgccgcaacgtcctgcacatccgcacgatccctggccacgagttcctgctgcagtcggaccacgagacagagctgcgagcctggcaccgcgcgctgcggactgtcatcgagcggctggatcgggagaaccccctggagctgcgtctgtcgggctctggacccgcggagctgagcgccggggaggacgaagaagaggagtcggagctggtgtccaagccgctgctgcgcctcagcagccgccggagctccattcgggggcccgaaggcaccgagcagaaccgcgtgcgcaacaaactaaagcggctcatcgcgaagagaccgcccttacaaagcctgcaggagcggggtctgctccgagaccaggtgttcggctgccagttggaatcactctgccagcgggaaggagacacggtgcccagctttttgcggctctgcattgctgctgtggataaaagaggtctagatgtggatggcatttatcgggtgagcgggaacttggcagtggtccagaagcttcgctttctggtggacagagagcgtgcggtcacctccgatgggaggtatgtgttcccagaacagccaggacaagaaggtcggttagatttggacagtactgagtgggatgacattcatgtggtcaccggagccctgaagctttttctccgggagctgccccagcctctggtgccaccactgctgctgccccatttccgtgctgcccttgcactctccgaatcagagcagtgcctctctcagatacaagaattaataggctcaatgccaaagcccaaccatgacactctacggtacctcctggagcatttatgcagggtgatagcacactcagataagaatcgcatgacaccccacaacctgggaattgtgtttggaccaaccctgtttcggccagagcaggagacatctgacccagcagcccatgctctctacccagggcagctggtccagctgatgctcaccaacttcaccagcctcttcccctgatgcagggaaggaagaagagaaaacatatttccggtcatctctggtggtgagaggctggtgttctgttttgaggatatccctttaaatctcccaaatgactgtctctatcttcatgagtgtgacttgaggtgttgggatgggtgagggagcttctctaaagaggaaagtgagtggattaacccctgcttctcttcttgttccctgttatcattcctccccaacataataatacataaagtggcatggtattttttctgatgca

SEQ ID NO: 26323 - DNA, 2912 bp, Homo sapiens
  source 1..2912: mol_type = unassigned DNA
gctggaagcaacagatggggactgcagaggaggtggtggtattgggatagtgctgcagccaagaacttaacgactgaaagtaactgggatatcttcataattatctgaaggtcacagtgggagaacaaaattaaaagaactgagaagacttacaagagaacctcctaagagtcacccaaacaatcggctgagaatgagaagaggttcaagtgattcttgtgcctcaggctcccaagtagctgggactacagtagctgggccagcacacccagaaagcctcacattgtgcagtggagaagctgagagaagaggaaaagaggagtggccagactcccaccactacccaggaccaactcctgctcctgaatcttctgatgggccccacaaggtgacagtgctggctacaatgctatccagccggtggtggccaagttcctgggggatcctagggctgggcccccgaagccctcctcggggatcccagctctgtgccctctatgcctttacttatactggggcagatggccagcaggtgtctctggctgaaggggataggttcctactgcttcgaaagaccaactccgactggtggttggcaagacgcctagaagctccctccacctctcgacccatcttcgtcccagcagcctatatgatagaggaatccatcccttcccagagtccaactaccgtcatccccggccaattgctctggactcctgggccgaagttgtttcatggttccctggaggagttgtctcaggccctcccaagcagggctcaggctagctcggagcagcctcctccacttccccgcaaaatgtgtaggagcgtcagcactgacaatctgagccccagccttctgaagcctttccaggaaggaccaagcggaagatccctctcccaggaagacttgccgtcagaagccagtgccagcacagcaggcccccagcccctcatgtcagagccccctgtgtactgtaacctggtggaccttcgccgctgtcctcggtccccacccccaggccctgcatgccccctgctgcagaggctggatgcctgggagcagcacctggaccccaactctggacgctgcttctacataaattcactgactggctgcaagtcctggaagcccccgcgccgcagtcgcagcgagacgaaccctggctccatggaggggacacagaccctgaagaggaacaatgatgtcctgcaacctcaggcaaagggcttcagatctgacacagggaccccagaaccgcttgacccacagggttcactcagcctcagccaacgcacctcgcagcttgaccctccagccttgcaggcccctcgacctctgccgcagctcctggacgacccccatgaggtggaaaagtcgggtctgctcaacatgaccaagattgcccaaggggggcgcaagctcaggaagaactggggcccgtcttgggtggtgttaacgggtaacagcctggtgttctaccgagagccaccgccgacagcgccctcctcaggctggggaccagcgggtagccggcccgaaagtagcgtggacctgcgcggggcggccctggcgcacggccgccacctgtccagccgccgcaacgtcctgcacatccgcacgatccctggccacgagttcctgctgcagtcggaccacgagacagagctgcgagcctggcaccgcgcgctgcggactgtcatcgagcggctggttagatgggtggaggcccggagggaggctccgaccggccgggaccaagggagtggggatcgggagaaccccctggagctgcgtctgtcgggctctggacccgcggagctgagcgccggggaggacgaagaagaggagtcggagctggtgtccaagccgctgctgcgcctcagcagccgccggagctccattcgggggcccgaaggcaccgagcagaaccgcgtgcgcaacaaactaaagcggctcatcgcgaagagaccgcccttacaaagcctgcaggagcggggtctgctccgagaccaggtgttcggctgccagttggaatcactctgccagcgggaaggagacacggtgcccagctttttgcggctctgcattgctgctgtggataaaagaggtctagatgtggatggcatttatcgggtgagcgggaacttggcagtggtccagaagcttcgctttctggtggacagagagcgtgcggtcacctccgatgggaggtatgtgttcccagaacagccaggacaagaaggtcggttagatttggacagtactgagtgggatgacattcatgtggtcaccggagccctgaagctttttctccgggagctgccccagcctctggtgccaccactgctgctgccccatttccgtgctgcccttgcactctccgaatcagagcagtgcctctctcagatacaagaattaataggctcaatgccaaagcccaaccatgacactctacggtacctcctggagcatttatgcagggtgatagcacactcagataagaatcgcatgacaccccacaacctgggaattgtgtttggaccaaccctgtttcggccagagcaggagacatctgacccagcagcccatgctctctacccagggcagctggtccagctgatgctcaccaacttcaccagcctcttcccctgatgcagggaaggaagaagagaaaacatatttccggtcatctctggtggtgagaggctggtgttctgttttgaggatatccctttaaatctcccaaatgactgtctctatcttcatgagtgtgacttgaggtgttgggatgggtgagggagcttctctaaagaggaaagtgagtggattaacccctgcttctcttcttgttccctgttatcattcctccccaacataataatacataaagtggcatggtattttt

SEQ ID NO: 26324 - DNA, 2461 bp, Homo sapiens
  source 1..2461: mol_type = unassigned DNA
ctccctgtttctgtcttgaacctgattctttcttcttatctccttcctgtgtccacctcaagactcccaccactacccaggaccaactcctgctcctgaatcttctgatgggccccacaaggtgacagtgctggctacaatgctatccagccggtggtggccaagttcctgggggatcctagggctgggcccccgaagccctcctcggggatcccagctctgtgccctctatgcctttacttatactggggcagatggccagcaggtgtctctggctgaaggggataggttcctactgcttcgaaagaccaactccgactggtggttggcaagacgcctagaagctccctccacctctcgacccatcttcgtcccagcagcctatatgatagaggaatccatcccttcccagagtccaactaccgtcatccccggccaattgctctggactcctgggccgaagttgtttcatggttccctggaggagttgtctcaggccctcccaagcagggctcaggctagctcggagcagcctcctccacttccccgcaaaatgtgtaggagcgtcagcactgacaatctgagccccagccttctgaagcctttccaggaaggaccaagcggaagatccctctcccaggaagacttgccgtcagaagccagtgccagcacagcaggcccccagcccctcatgtcagagccccctgtgtactgtaacctggtggaccttcgccgctgtcctcggtccccacccccaggccctgcatgccccctgctgcagaggctggatgcctgggagcagcacctggaccccaactctggacgctgcttctacataaattcactgactggctgcaagtcctggaagcccccgcgccgcagtcgcagcgagacgaaccctggctccatggaggggacacagaccctgaagaggaacaatgatgtcctgcaacctcaggcaaagggcttcagatctgacacagggaccccagaaccgcttgacccacagggttcactcagcctcagccaacgcacctcgcagcttgaccctccagccttgcaggcccctcgacctctgccgcagctcctggacgacccccatgaggtggaaaagtcgggtctgctcaacatgaccaagattgcccaaggggggcgcaagctcaggaagaactggggcccgtcttgggtggtgttaacgggtaacagcctggtgttctaccgagagccaccgccgacagcgccctcctcaggctggggaccagcgggtagccggcccgaaagtagcgtggacctgcgcggggcggccctggcgcacggccgccacctgtccagccgccgcaacgtcctgcacatccgcacgatccctggccacgagttcctgctgcagtcggaccacgagacagagctgcgagcctggcaccgcgcgctgcggactgtcatcgagcggctggatcgggagaaccccctggagctgcgtctgtcgggctctggacccgcggagctgagcgccggggaggacgaagaagaggagtcggagctggtgtccaagccgctgctgcgcctcagcagccgccggagctccattcgggggcccgaaggcaccgagcagaaccgcgtgcgcaacaaactaaagcggctcatcgcgaagagaccgcccttacaaagcctgcaggagcggggtctgctccgagaccaggtgttcggctgccagttggaatcactctgccagcgggaaggagacacggtgcccagctttttgcggctctgcattgctgctgtggataaaagaggtctagatgtggatggcatttatcgggtgagcgggaacttggcagtggtccagaagcttcgctttctggtggacagagagcgtgcggtcacctccgatgggaggtatgtgttcccagaacagccaggacaagcactctccgaatcagagcagtgcctctctcagatacaagaattaataggctcaatgccaaagcccaaccatgacactctacggtacctcctggagcatttatgcagggtgatagcacactcagataagaatcgcatgacaccccacaacctgggaattgtgtttggaccaaccctgtttcggccagagcaggagacatctgacccagcagcccatgctctctacccagggcagctggtccagctgatgctcaccaacttcaccagcctcttcccctgatgcagggaaggaagaagagaaaacatatttccggtcatctctggtggtgagaggctggtgttctgttttgaggatatccctttaaatctcccaaatgactgtctctatcttcatgagtgtgacttgaggtgttgggatgggtgagggagcttctctaaagaggaaagtgagtggattaacccctgcttctcttcttgttccctgttatcattcctccccaacataataatacataaagtggcatggtattttttctgatgc

SEQ ID NO: 26325 - DNA, 2569 bp, Homo sapiens
  source 1..2569: mol_type = unassigned DNA
acatacttcctcaccagacaccaccaggagttctcagcccccaaaacctgtcaccgatcctcaccaggctgtttgctctaccctctcccccaactcaagggctcccgtcctcacctccctgcaacactgctcctagaaccatgtctgtctacctggagacagccaggcctattcccttctgggtctccagtgtccctttttctcacaggtgacagtgctggctacaatgctatccagccggtggtggccaagttcctgggggatcctagggctgggcccccgaagccctcctcggggatcccagctctgtgccctctatgcctttacttatactggggcagatggccagcaggtgtctctggctgaaggggataggttcctactgcttcgaaagaccaactccgactggtggttggcaagacgcctagaagctccctccacctctcgacccatcttcgtcccagcagcctatatgatagaggaatccatcccttcccagagtccaactaccgtcatccccggccaattgctctggactcctgggccgaagttgtttcatggttccctggaggagttgtctcaggccctcccaagcagggctcaggctagctcggagcagcctcctccacttccccgcaaaatgtgtaggagcgtcagcactgacaatctgagccccagccttctgaagcctttccaggaaggaccaagcggaagatccctctcccaggaagacttgccgtcagaagccagtgccagcacagcaggcccccagcccctcatgtcagagccccctgtgtactgtaacctggtggaccttcgccgctgtcctcggtccccacccccaggccctgcatgccccctgctgcagaggctggatgcctgggagcagcacctggaccccaactctggacgctgcttctacataaattcactgactggctgcaagtcctggaagcccccgcgccgcagtcgcagcgagacgaaccctggctccatggaggggacacagaccctgaagaggaacaatgatgtcctgcaacctcaggcaaagggcttcagatctgacacagggaccccagaaccgcttgacccacagggttcactcagcctcagccaacgcacctcgcagcttgaccctccagccttgcaggcccctcgacctctgccgcagctcctggacgacccccatgaggtggaaaagtcgggtctgctcaacatgaccaagattgcccaaggggggcgcaagctcaggaagaactggggcccgtcttgggtggtgttaacgggtaacagcctggtgttctaccgagagccaccgccgacagcgccctcctcaggctggggaccagcgggtagccggcccgaaagtagcgtggacctgcgcggggcggccctggcgcacggccgccacctgtccagccgccgcaacgtcctgcacatccgcacgatccctggccacgagttcctgctgcagtcggaccacgagacagagctgcgagcctggcaccgcgcgctgcggactgtcatcgagcggctggatcgggagaaccccctggagctgcgtctgtcgggctctggacccgcggagctgagcgccggggaggacgaagaagaggagtcggagctggtgtccaagccgctgctgcgcctcagcagccgccggagctccattcgggggcccgaaggcaccgagcagaaccgcgtgcgcaacaaactaaagcggctcatcgcgaagagaccgcccttacaaagcctgcaggagcggggtctgctccgagaccaggtgttcggctgccagttggaatcactctgccagcgggaaggagacacggtgcccagctttttgcggctctgcattgctgctgtggataaaagaggtctagatgtggatggcatttatcgggtgagcgggaacttggcagtggtccagaagcttcgctttctggtggacagagagcgtgcggtcacctccgatgggaggtatgtgttcccagaacagccaggacaagaaggtcggttagatttggacagtactgagtgggatgacattcatgtggtcaccggagccctgaagctttttctccgggagctgccccagcctctggtgccaccactgctgctgccccatttccgtgctgcccttgggtgatagcacactcagataagaatcgcatgacaccccacaacctgggaattgtgtttggaccaaccctgtttcggccagagcaggagacatctgacccagcagcccatgctctctacccagggcagctggtccagctgatgctcaccaacttcaccagcctcttcccctgatgcagggaaggaagaagagaaaacatatttccggtcatctctggtggtgagaggctggtgttctgttttgaggatatccctttaaatctcccaaatgactgtctctatcttcatgagtgtgacttgaggtgttgggatgggtgagggagcttctctaaagaggaaagtgagtggattaacccctgcttctcttcttgttccctgttatcattcctccccaacataataatacataaagtggcatggtattttt

SEQ ID NO: 26326 - DNA, 2323 bp, Homo sapiens
  source 1..2323: mol_type = unassigned DNA
gtgctcttccttcctccagactcctagcccagggcagggtttttctgtgttctgcttgcctgataggctacagcaggtctcctctagagatgtgacttgcccagcccttccctctctttcttaaccgtgggtggaaaggggctcctcttcccttctgtagacccttctctgtcttcttttaccttgcaggatgtgagggtggggcacccccttcaacattccccccaccccacaaaaagcctgttcccctttcctgtggccctgaggtgggggtggggtgggggaggcgggaagttggcaacaggaagtgaggagaagagcaaagaaaactgtgagagagagaatttttaaaaagcagctggggcctgaggtttctcccccagtaccctgggtcacctcagcccagagctggcggcaggcccccagcccctcatgtcagagccccctgtgtactgtaacctggtggaccttcgccgctgtcctcggtccccacccccaggccctgcatgccccctgctgcagaggctggatgcctgggagcagcacctggaccccaactctggacgctgcttctacataaattcactgactggctgcaagtcctggaagcccccgcgccgcagtcgcagcgagacgaaccctggctccatggaggggacacagaccctgaagaggaacaatgatgtcctgcaacctcaggcaaagggcttcagatctgacacagggaccccagaaccgcttgacccacagggttcactcagcctcagccaacgcacctcgcagcttgaccctccagccttgcaggcccctcgacctctgccgcagctcctggacgacccccatgaggtggaaaagtcgggtctgctcaacatgaccaagattgcccaaggggggcgcaagctcaggaagaactggggcccgtcttgggtggtgttaacgggtaacagcctggtgttctaccgagagccaccgccgacagcgccctcctcaggctggggaccagcgggtagccggcccgaaagtagcgtggacctgcgcggggcggccctggcgcacggccgccacctgtccagccgccgcaacgtcctgcacatccgcacgatccctggccacgagttcctgctgcagtcggaccacgagacagagctgcgagcctggcaccgcgcgctgcggactgtcatcgagcggctggatcgggagaaccccctggagctgcgtctgtcgggctctggacccgcggagctgagcgccggggaggacgaagaagaggagtcggagctggtgtccaagccgctgctgcgcctcagcagccgccggagctccattcgggggcccgaaggcaccgagcagaaccgcgtgcgcaacaaactaaagcggctcatcgcgaagagaccgcccttacaaagcctgcaggagcggggtctgctccgagaccaggtgttcggctgccagttggaatcactctgccagcgggaaggagacacggtgcccagctttttgcggctctgcattgctgctgtggataaaagaggtctagatgtggatggcatttatcgggtgagcgggaacttggcagtggtccagaagcttcgctttctggtggacagagagcgtgcggtcacctccgatgggaggtatgtgttcccagaacagccaggacaagaaggtcggttagatttggacagtactgagtgggatgacattcatgtggtcaccggagccctgaagctttttctccgggagctgccccagcctctggtgccaccactgctgctgccccatttccgtgctgcccttgcactctccgaatcagagcagtgcctctctcagatacaagaattaataggctcaatgccaaagcccaaccatgacactctacggtacctcctggagcatttatgcagggtgatagcacactcagataagaatcgcatgacaccccacaacctgggaattgtgtttggaccaaccctgtttcggccagagcaggagacatctgacccagcagcccatgctctctacccagggcagctggtccagctgatgctcaccaacttcaccagcctcttcccctgatgcagggaaggaagaagagaaaacatatttccggtcatctctggtggtgagaggctggtgttctgttttgaggatatccctttaaatctcccaaatgactgtctctatcttcatgagtgtgacttgaggtgttgggatgggtgagggagcttctctaaagaggaaagtgagtggattaacccctgcttctcttcttgttccctgttatcattcctccccaacataataatacataaagtggcatggt

SEQ ID NO: 26327 - DNA, 967 bp, Homo sapiens
  source 1..967: mol_type = unassigned DNA
ggctcctcttcccttctgtagacccttctctgtcttcttttaccttgcaggatgtgagggcaggcccccagcccctcatgtcagagccccctgtgtactgtaacctggtggaccttcgccgctgtcctcggtccccacccccaggccctgcatgccccctgctgcagaggctggatgcctgggagcagcacctggaccccaactctggacgctgcttctacataaattcactgactggctgcaagtcctggaagcccccgcgccgcagtcgcagcgagacgaaccctggctccatggaggggacacagaccctgaagaggaacaatgatgtcctgcaacctcaggcaaagggcttcagatctgacacagggaccccagaaccgcttgacccacagggttcactcagcctcagccaacgcacctcgcagcttgaccctccagccttgcaggcccctcgacctctgccgcagctcctggacgacccccatgaggtggaaaagtcgggtctgctcaacatgaccaagattgcccaaggggggcgcaagctcaggaagaactggggcccgtcttgggtggtgttaacgggtaacagcctggtgttctaccgagagccaccgccgacagcgccctcctcaggctggggaccagcgggtagccggcccgaaagtagcgtggacctgcgcggggcggccctggcgcacggccgccacctgtccagccgccgcaacgtcctgcacatccgcacgatccctggccacgagttcctgctgcagtcggaccacgagacagagctgcgagcctggcaccgcgcgctgcggactgtcatcgagcggctggatcgggagaaccccctggagctgcgtctgtcgggctctggacccgcggagctgagcgccggggaggacgaagaagaggagtcggagctggtgtccaagccgctgctgcgcctcagcagccgccggagctc

SEQ ID NO: 26328 - DNA, 563 bp, Homo sapiens
  source 1..563: mol_type = unassigned DNA
gttctgcttgcctgataggctacagcaggtctcctctagagatgtgacttgcccagcccttccctctctttcttaaccgtgggtggaaaggggctcctcttcccttctgtagacccttctctgtcttcttttaccttgcaggatgtgagggtggggcacccccttcaacattccccccaccccacaaaaagcctgttcccctttcctgtggccctgaggtgggggtggggtgggggaggcgggaagttggcaacaggaagtgaggagaagagcaaagaaaactgtgagagagagaatttttaaaaagcagctggggcctgaggtttctcccccagtaccctgggtcacctcagcccagagctggcggcccccagcccctcatgtcagagccccctgtgtactgtaacctggtggaccttcgccgctgtcctcggtccccacccccaggccctgcatgccccctgctgcagaggctggatgcctgggagcagcacctggaccccaactctggacgctgcttctacataaattcactgactggctgcaagtcctggaagcccccg

SEQ ID NO: 26329 - DNA, 722 bp, Homo sapiens
  source 1..722: mol_type = unassigned DNA
gggaaggagacacggtgcccagctttttgcggctctgcattgctgctgtggataaaagaggtctagatgtggatggcatttatcgggtgagcgggaacttggcagtggtccagaagcttcgctttctggtggacagagagcgtgcggtcacctccgatgggaggtatgtgttcccagaacagccaggacaagcactctccgaatcagagcagtgcctctctcagatacaagaattaataggctcaatgccaaagcccaaccatgacactctacggtacctcctggagcatttatgcagggtgatagcacactcagataagaatcgcatgacaccccacaacctgggaattgtgtttggaccaaccctgtttcggccagagcaggagacatctgacccagcagcccatgctctctacccagggcagctggtccagctgatgctcaccaacttcaccagcctcttcccctgatgcagggaaggaagaagagaaaacatatttccggtcatctctggtggtgagaggctggtgttctgttttgaggatatccctttaaatctcccaaatgactgtctctatcttcatgagtgtgacttgaggtgttgggatgggtgagggagcttctctaaagaggaaagtgagtggattaacccctgcttctcttcttgttccctgttatcattcctccccaacataataatacataaagtggcatggtatttt

SEQ ID NO: 26330 - DNA, 624 bp, Homo sapiens
  source 1..624: mol_type = unassigned DNA
ctttccaggaaggaccaagcggaagatccctctcccaggaagacttgccgtcagaagccagtgccagcacagtgagtcacagctcttctgagctgggccctgttctaggcacaggacagacagcacctctgtcttcaggggactcccctggggatgacaaacacaaaaacaaataaataagataacgcttggtactactgataagtctaaaggcaggcccccagcccctcatgtcagagccccctgtgtactgtaacctggtggaccttcgccgctgtcctcggtccccacccccaggccctgcatgccccctgctgcagaggctggatgcctgggagcagcacctggaccccaactctggacgctgcttctacataaattcactgactggctgcaagtcctggaagcccccgcgccgcagtcgcagcgagacgaaccctggctccatggaggggacacagaccctgaagaggaacaatgatgtcctgcaacctcaggcaaagggcttcagatctgacacagggaccccagaaccgcttgacccacagggttcactcagcctcagccaacgcacctcgcagcttgaccctccagccttgcaggcccctcgacctctgccgcagc

SEQ ID NO: 26331 - DNA, 2028 bp, Homo sapiens
  source 1..2028: mol_type = unassigned DNA
gagccaggaagcgggagccgggacccagggcccgggatcgccgagcccgacctcgggcgccccgccggtcacctccgcgcggacaccagccctgcagagcccagggagatggaagacttcgcccgaggggcggcctccccaggcccctcccggcctggcctggttcccgtcagcatcatcggggctgaggatgaggattttgagaacgagctggagacaaactcagaagagcaaaacagccagttccagagcctggagcaggtgaagcggcgcccagcccacctcatggccctcctgcagcacgtggccctgcagtttgagccaggacccctgctttgctgtctgcatgccgacatgctgggctcactgggccccaaggaggccaagaaggccttcctggacttctaccacagcttcctggagaagacagcggttctccgggtgccggtccctcccaacgtcgcctttgaacttgaccgcactagggctgacctcatctccgaggatgtccagcggcggttcgtgcaggaggtggtgcaaagccagcaggtagccgtgggccggcagctggaggacttccgttccaagcggctcatgggcatgacgccctgggagcaggagctggcccagctggaggcttgggttgggcgggaccgagccagctacgaggcccgggagcggcacgtggcggagcggctgctcatgcacctggaggagatgcaacataccatctctaccgacgaagaaaagagtgctgccgtggtcaacgccattggcctgtacatgcgccaccttggggtgcggaccaagagtggagacaagaagtcggggaggaacttcttccggaaaaaggtgatggggaaccggcggtcggacgagcctgccaagaccaagaaggggctgagcagcatcctggatgccgcccgctggaaccggggagagccccaggttccagattttcgacacctcaaagcagaggttgatgccgagaagccaggtgctacagaccggaagggaggcgtggggatgccctctcgggaccggaatatcggggctcctgggcaggacacccctggagtctctctgcaccctctgtccctggacagcccagaccgggaaccaggtgctgacgcccccctggagctgggggactcatccccgcagggcccaatgagcctggagtccttggcgcccccagagagtaccgacgagggggccgaaaccgagaggtgcccaggctggggtgcaggggcgggaggtgtggcttactgggcgctggtgggtgggtgcagggtcaccgctgccatctgtgcctgcctgtcccaggctcttgctccccatgctcctctgctgctctctgggtctggccattcctctcccttcttctttccttttctcatctccctcctgcttcctcattgcccccctttccttttatccttcctttttcctctgctccttcctctccttccttttttcactaatccttctcctcctcccttcctctccaccactccttccatctcctttatttcctcccccctcctctctcaccttccccctcctctctttcctccccactcctctctcacctgggttttctttccccaccttccatccccctccgatctccctgccacttttcattttttcagcccttcccccttctctttcaagcccccctgccccctgccccccaccccccgcctcgctcctgcctcctggtgcccgtccctcaaccccccacccctctgctctgtgccctgggggccctgtcccccttacagctggggggcaggctctgcctcctgcccgtccttgtgccgctgctttggggaccctttggtgggtgcggggaggtgggtcaggttccatctgggcccacctctgaccctgtgcccctctctccccagaaggtggaagaggtgggtgcctgggccctgggtgggggaagggctagcccctcccccatttctcccagcccctcccctctccccatggccactccctccccttcactccctgtga

SEQ ID NO: 26332 - DNA, 3231 bp, Homo sapiens
  source 1..3231: mol_type = unassigned DNA
ggtggactcagggcggctagagcgacgcggcggcaggggtggggagagtgcggagcccgagcgcggaggcttcggttccggtggcggcgatggcttctctttccacctggagcagccctgcagagcccagggagatggaagacttcgcccgaggggcggcctccccaggcccctcccggcctggcctggttcccgtcagcatcatcggggctgaggatgaggattttgagaacgagctggagacaaactcagaagagcaaaacagccagttccagagcctggagcaggtgaagcggcgcccagcccacctcatggccctcctgcagcacgtggccctgcagtttgagccaggacccctgctttgctgtctgcatgccgacatgctgggctcactgggccccaaggaggccaagaaggccttcctggacttctaccacagcttcctggagaagacagcggttctccgggtgccggtccctcccaacgtcgcctttgaacttgaccgcactagggctgacctcatctccgaggatgtccagcggcggttcgtgcaggaggtggtgcaaagccagcaggtagccgtgggccggcagctggaggacttccgttccaagcggctcatgggcatgacgccctgggagcaggagctggcccagctggaggcttgggttgggcgggaccgagccagctacgaggcccgggagcggcacgtggcggagcggctgctcatgcacctggaggagatgcaacataccatctctaccgacgaagaaaagagtgctgccgtggtcaacgccattggcctgtacatgcgccaccttggggtgcggaccaagagtggagacaagaagtcggggaggaacttcttccggaaaaaggtgatggggaaccggcggtcggacgagcctgccaagaccaagaaggggctgagcagcatcctggatgccgcccgctggaaccggggagagccccaggttccagattttcgacacctcaaagcagaggttgatgccgagaagccaggtgctacagaccggaagggaggcgtggggatgccctctcgggaccggaatatcggggctcctgggcaggacacccctggagtctctctgcaccctctgtccctggacagcccagaccgggaaccaggtgctgacgcccccctggagctgggggactcatccccgcagggcccaatgagcctggagtccttggcgcccccagagagtaccgacgagggggccgaaaccgagagccccgagcctggagatgagggggagccggggcggtcgggactggagcttgaaccagaagagcctcccggctggcgggaactcgtccccccagacaccctgcacagcctgcccaagagccaggtgaagcggcaggaggtcatcagcgagctgctggtgacagaggcggcccacgtgcgcatgctgcgggtgctgcacgacctcttcttccagcccatggcagaatgcctgttcttccccttggaggagctgcagaacatcttccccagcctggacgagctcatcgaggtgcattccctgttcctcgatcgcctgatgaagcggaggcaggagagtggctacctcatcgaggagatcggagacgtgctgctggcccggtttgatggtgctgagggctcctggttccagaaaatctcctcccgcttctgcagccgccagtcatttgccttagagcagctcaaagccaagcaacgcaaggaccctcggttctgtgccttcgtgcaggaagctgagagccgcccgcggtgccgccgcctgcagctgaaggacatgatccccacggagatgcagcggctgaccaagtaccccctgctcctgcagagcatcgggcagaacacagaagagcccacagaacgggagaaagtggagctggcagccgagtgctgccgggaaattctacaccacgtcaaccaagccgtgcgtgacatggaggacctgctgaggctcaaggactatcagcggcgcctggacttgtcccaccttcggcagagcagcgaccctatgctgagcgagttcaagaacctggacatcaccaagaagaaattggtccacgagggcccactgacgtggcgggtgactaaggacaaggcagtggaggtgcatgtgctgctgctggacgacctgctgctgctgctccagcgccaggacgagcggctgctgctcaagtcccatagccggacactgacgcccacgcccgatggcaagaccatgctgcggcccgtgctgcggctcacctccgccatgacccgcgaggtggccaccgatcacaaagccttctacgtcctttttacctgggaccaggaggcccagatatacgagctggtggcacagactgtgtcggagcggaaaaactggtgtgctctcatcactgagactgccggatccctgaaagtccctgcccctgcctctcgccctaagccccggcccagcccgagcagcacccgagaacccctcctcagcagctctgagaacggcaatggtggccgagagacgtctccagctgatgcccggaccgagagaatcctcagtgacctcctgcccttctgcagaccaggccccgagggccagctcgctgccacggcccttcggaaagtgctgtccctgaagcagcttctgtttccggcggaggaagacaatggggcggggcctcctcgagatggggatggggtcccagggggcggccccctgagcccagcacggacccaggaaatccaggagaacctgctcagcttggaggagaccatgaagcagctggaggagttggaggaggaattttgccgcctgagacccctcctgtctcagcttggggggaactctgtcccccagcctggctgcacttgaggttcccgcccaggaaggccttttgcaagaaggagaggaatgggggagaggacgtgagggaccacccccacccacacagctgccgcagcatctcacaccccgagggcctgaggagagggagctgtgggccacgcctgggaggggcccagctggggttactggccccgcatgagcctcggccatctctccctcctgccctctgcttgggggactcagggctccattctggagggcaccacggtgacccgggccatctcagtattgcctgtgggggccacccctccacccccacccccaagtgccttcgctctgtttttataccctgaattggaggtttattttttaatatatattatct

SEQ ID NO: 26333 - DNA, 3107 bp, Homo sapiens
  source 1..3107: mol_type = unassigned DNA
agagccaggaagcgggagccgggacccagggcccgggatcgccgagcccgacctcgggcgccccgccggtcacctccgcgcggacaccagccctgcagagcccagggagatggaagacttcgcccgaggggcggcctccccaggcccctcccggcctggcctggttcccgtcagcatcatcggggctgaggatgaggattttgagaacgagctggagacaaactcagaagagcaaaacagccagttccagagcctggagcaggtgaagcggcgcccagcccacctcatggccctcctgcagcacgtggccctgcagtttgagccaggacccctggttctccgggtgccggtccctcccaacgtcgcctttgaacttgaccgcactagggctgacctcatctccgaggatgtccagcggcggttcgtgcaggaggtggtgcaaagccagcaggtagccgtgggccggcagctggaggacttccgttccaagcggctcatgggcatgacgccctgggagcaggagctggcccagctggaggcttgggttgggcgggaccgagccagctacgaggcccgggagcggcacgtggcggagcggctgctcatgcacctggaggagatgcaacataccatctctaccgacgaagaaaagagtgctgccgtggtcaacgccattggcctgtacatgcgccaccttggggtgcggaccaagagtggagacaagaagtcggggaggaacttcttccggaaaaaggtgatggggaaccggcggtcggacgagcctgccaagaccaagaaggggctgagcagcatcctggatgccgcccgctggaaccggggagagccccaggttccagattttcgacacctcaaagcagaggttgatgccgagaagccaggtgctacagaccggaagggaggcgtggggatgccctctcgggaccggaatatcggggctcctgggcaggacacccctggagtctctctgcaccctctgtccctggacagcccagaccgggaaccaggtgctgacgcccccctggagctgggggactcatccccgcagggcccaatgagcctggagtccttggcgcccccagagagtaccgacgagggggccgaaaccgagagccccgagcctggagatgagggggagccggggcggtcgggactggagcttgaaccagaagagcctcccggctggcgggaactcgtccccccagacaccctgcacagcctgcccaagagccaggtgaagcggcaggaggtcatcagcgagctgctggtgacagaggcggcccacgtgcgcatgctgcgggtgctgcacgacctcttcttccagcccatggcagaatgcctgttcttccccttggaggagctgcagaacatcttccccagcctggacgagctcatcgaggtgcattccctgttcctcgatcgcctgatgaagcggaggcaggagagtggctacctcatcgaggagatcggagacgtgctgctggcccggtttgatggtgctgagggctcctggttccagaaaatctcctcccgcttctgcagccgccagtcatttgccttagagcagctcaaagccaagcaacgcaaggaccctcggttctgtgccttcgtgcaggaagctgagagccgcccgcggtgccgccgcctgcagctgaaggacatgatccccacggagatgcagcggctgaccaagtaccccctgctcctgcagagcatcgggcagaacacagaagagcccacagaacgggagaaagtggagctggcagccgagtgctgccgggaaattctacaccacgtcaaccaagccgtgcgtgacatggaggacctgctgaggctcaaggactatcagcggcgcctggacttgtcccaccttcggcagagcagcgaccctatgctgagcgagttcaagaacctggacatcaccaagaagaaattggtccacgagggcccactgacgtggcgggtgactaaggacaaggcagtggaggtgcatgtgctgctgctggacgacctgctgctgctgctccagcgccaggacgagcggctgctgctcaagtcccatagccggacactgacgcccacgcccgatggcaagaccatgctgcggcccgtgctgcggctcacctccgccatgacccgcgaggtggccaccgatcacaaagccttctacgtcctttttacctgggaccaggaggcccagatatacgagctggtggcacagactgtgtcggagcggaaaaactggtgtgctctcatcactgagactgccggatccctgaaagtccctgcccctgcctctcgccctaagccccggcccagcccgagcagcacccgagaacccctcctcagcagctctgagaacggcaatggtggccgagagacgtctccagctgatgcccggaccgagagaatcctcagtgacctcctgcccttctgcagaccaggccccgagggccagctcgctgccacggcccttcggaaagtgctgtccctgaagcagcttctgtttccggcggaggaagacaatggggcggggcctcctcgagatggggatggggtcccagggggcggccccctgagcccagcacggacccaggaaatccaggagaacctgctcagcttggaggagaccatgaagcagctggaggagttggaggaggaattttgccgcctgagacccctcctgtctcagcttggggggaactctgtcccccagcctggctgcacttgaggttcccgcccaggaaggccttttgcaagaaggagaggaatgggggagaggacgtgagggaccacccccacccacacagctgccgcagcatctcacaccccgagggcctgaggagagggagctgtgggccacgcctgggaggggcccagctggggttactggccccgcatgagcctcggccatctctccctcctgccctctgcttgggggactcagggctccattctggagggcaccacggtgacccgggccatctcagtattgcctgtgggggccacccctccacccccacccccaagtgccttcgctctgtttttataccctgaattggaggtttattttttaatatatattatct

SEQ ID NO: 26334 - DNA, 3206 bp, Homo sapiens
  source 1..3206: mol_type = unassigned DNA
agagccaggaagcgggagccgggacccagggcccgggatcgccgagcccgacctcgggcgccccgccggtcacctccgcgcggacaccagccctgcagagcccagggagatggaagacttcgcccgaggggcggcctccccaggcccctcccggcctggcctggttcccgtcagcatcatcggggctgaggatgaggattttgagaacgagctggagacaaactcagaagagcaaaacagccagttccagagcctggagcaggtgaagcggcgcccagcccacctcatggccctcctgcagcacgtggccctgcagtttgagccaggacccctgctttgctgtctgcatgccgacatgctgggctcactgggccccaaggaggccaagaaggccttcctggacttctaccacagcttcctggagaagacagcggttctccgggtgccggtccctcccaacgtcgcctttgaacttgaccgcactagggctgacctcatctccgaggatgtccagcggcggttcgtgcaggaggtggtgcaaagccagcaggtagccgtgggccggcagctggaggacttccgttccaagcggctcatgggcatgacgccctgggagcaggagctggcccagctggaggcttgggttgggcgggaccgagccagctacgaggcccgggagcggcacgtggcggagcggctgctcatgcacctggaggagatgcaacataccatctctaccgacgaagaaaagagtgctgccgtggtcaacgccattggcctgtacatgcgccaccttggggtgcggaccaagagtggagacaagaagtcggggaggaacttcttccggaaaaaggtgatggggaaccggcggtcggacgagcctgccaagaccaagaaggggctgagcagcatcctggatgccgcccgctggaaccggggagagccccaggttccagattttcgacacctcaaagcagaggttgatgccgagaagccaggtgctacagaccggaagggaggcgtggggatgccctctcgggaccggaatatcggggctcctgggcaggacacccctggagtctctctgcaccctctgtccctggacagcccagaccgggaaccaggtgctgacgcccccctggagctgggggactcatccccgcagggcccaatgagcctggagtccttggcgcccccagagagtaccgacgagggggccgaaaccgagagccccgagcctggagatgagggggagccggggcggtcgggactggagcttgaaccagaagagcctcccggctggcgggaactcgtccccccagacaccctgcacagcctgcccaagagccaggtgaagcggcaggaggtcatcagcgagctgctggtgacagaggcggcccacgtgcgcatgctgcgggtgctgcacgacctcttcttccagcccatggcagaatgcctgttcttccccttggaggagctgcagaacatcttccccagcctggacgagctcatcgaggtgcattccctgttcctcgatcgcctgatgaagcggaggcaggagagtggctacctcatcgaggagatcggagacgtgctgctggcccggtttgatggtgctgagggctcctggttccagaaaatctcctcccgcttctgcagccgccagtcatttgccttagagcagctcaaagccaagcaacgcaaggaccctcggttctgtgccttcgtgcaggaagctgagagccgcccgcggtgccgccgcctgcagctgaaggacatgatccccacggagatgcagcggctgaccaagtaccccctgctcctgcagagcatcgggcagaacacagaagagcccacagaacgggagaaagtggagctggcagccgagtgctgccgggaaattctacaccacgtcaaccaagccgtgcgtgacatggaggacctgctgaggctcaaggactatcagcggcgcctggacttgtcccaccttcggcagagcagcgaccctatgctgagcgagttcaagaacctggacatcaccaagaagaaattggtccacgagggcccactgacgtggcgggtgactaaggacaaggcagtggaggtgcatgtgctgctgctggacgacctgctgctgctgctccagcgccaggacgagcggctgctgctcaagtcccatagccggacactgacgcccacgcccgatggcaagaccatgctgcggcccgtgctgcggctcacctccgccatgacccgcgaggtggccaccgatcacaaagccttctacgtcctttttacctgggaccaggaggcccagatatacgagctggtggcacagactgtgtcggagcggaaaaactggtgtgctctcatcactgagactgccggatccctgaaagtccctgcccctgcctctcgccctaagccccggcccagcccgagcagcacccgagaacccctcctcagcagctctgagaacggcaatggtggccgagagacgtctccagctgatgcccggaccgagagaatcctcagtgacctcctgcccttctgcagaccaggccccgagggccagctcgctgccacggcccttcggaaagtgctgtccctgaagcagcttctgtttccggcggaggaagacaatggggcggggcctcctcgagatggggatggggtcccagggggcggccccctgagcccagcacggacccaggaaatccaggagaacctgctcagcttggaggagaccatgaagcagctggaggagttggaggaggaattttgccgcctgagacccctcctgtctcagcttggggggaactctgtcccccagcctggctgcacttgaggttcccgcccaggaaggccttttgcaagaaggagaggaatgggggagaggacgtgagggaccacccccacccacacagctgccgcagcatctcacaccccgagggcctgaggagagggagctgtgggccacgcctgggaggggcccagctggggttactggccccgcatgagcctcggccatctctccctcctgccctctgcttgggggactcagggctccattctggagggcaccacggtgacccgggccatctcagtattgcctgtgggggccacccctccacccccacccccaagtgccttcgctctgtttttataccctgaattggaggtttattttttaatatatattatct

SEQ ID NO: 26335 - DNA, 2886 bp, Homo sapiens
  source 1..2886: mol_type = unassigned DNA
ggcggcgatggcttctctttccacctggagcagccctgcagagcccagggagatggaagacttcgcccgaggggcggcctccccaggcccctcccggcctggcctggttcccgtcagcatcatcggggctgaggatgaggattttgagaacgagctggagacaaactcagaagagcaaaacagccagttccagagcctggagcaggtgaagcggcgcccagcccacctcatggccctcctgcagcacgtggccctgcagtttgagccaggacccctggttctccgggtgccggtccctcccaacgtcgcctttgaacttgaccgcactagggctgacctcatctccgaggatgtccagcggcggttcgtgcaggaggtggtgcaaagccagcaggtagccgtgggccggcagctggaggacttccgttccaagcggctcatgggcatgacgccctgggagcaggagctggcccagctggaggcttgggttgggcgggaccgagccagctacgaggcccgggagcggcacgtggcggagcggctgctcatgcacctggaggagatgcaacataccatctctaccgacgaagaaaagagtgctgccgtggtcaacgccattggcctgtacatgcgccaccttggggtgcggaccaagagtggagacaagaagtcggggaggaacttcttccggaaaaaggtgatggggaaccggcggtcggacgagcctgccaagaccaagaaggggctgagcagcatcctggatgccgcccgctggaaccggggagagccccaggttccagattttcgacacctcaaagcagaggttgatgccgagaagccaggtgctacagaccggaagggaggcgtggggatgccctctcgggaccggaatatcggggctcctgggcaggacacccctggagtctctctgcaccctctgtccctggacagcccagaccgggaaccaggtgctgacgcccccctggagctgggggactcatccccgcagggcccaatgagcctggagtccttggcgcccccagagagtaccgacgagggggccgaaaccgagagccccgagcctggagatgagggggagccggggcggtcgggactggagcttgaaccagaagagcctcccggctggcgggaactcgtccccccagacaccctgcacagcctgcccaagagccaggtgaagcggcaggaggtcatcagcgagctgctggtgacagaggcggcccacgtgcgcatgctgcgggtgctgcacgacctcttcttccagcccatggcagaatgcctgttcttccccttggaggagctgcagaacatcttccccagcctggacgagctcatcgaggtgcattccctgttcctcgatcgcctgatgaagcggaggcaggagagtggctacctcatcgaggagatcggagacgtgctgctggcccggtttgatggtgctgagggctcctggttccagaaaatctcctcccgcttctgcagccgccagtcatttgccttagagcagctcaaagccaagcaacgcaaggaccctcggttctgtgccttcgtgcaggaagctgagagccgcccgcggtgccgccgcctgcagctgaaggacatgatccccacggagatgcagcggctgaccaagtaccccctgctcctgcagagcatcgggcagaacacagaagagcccacagaacgggagaaagtggagctggcagccgagtgctgccgggaaattctacaccacgtcaaccaagccgtgcgtgacatggaggacctgctgaggctcaaggactatcagcggcgcctggacttgtcccaccttcggcagagcagcgaccctatgctgagcgagttcaagaacctggacatcaccaagaagaaattggtccacgagggcccactgacgtggcgggtgactaaggacaaggcagtggaggtgcatgtgctgctgctggacgacctgctgctgctgctccagcgccaggacgagcggctgctgctcaagtcccatagccggacactgacgcccacgcccgatggcaagaccatgctgcggcccgtgctgcggctcacctccgccatgacccgcgaggtggccaccgatcacaaagccttctacgtcctttttacctgggaccaggaggcccagatatacgagctggtggcacagactgtgtcggagcggaaaaactggtgtgctctcatcactgagactgccggatccctgaaagtccctgcccctgcctctcgccctaagccccggcccagcccgagcagcacccgagaacccctcctcagcagctctgagaacggcaatggtggccgagagacgtctccagctgatgcccggaccgagagaatcctcagtgacctcctgcccttctgcagaccaggccccgagggccagctcgctgccacggcccttcggaaaggagttggaggaggaattttgccgcctgagacccctcctgtctcagcttggggggaactctgtcccccagcctggctgcacttgaggttcccgcccaggaaggccttttgcaagaaggagaggaatgggggagaggacgtgagggaccacccccacccacacagctgccgcagcatctcacaccccgagggcctgaggagagggagctgtgggccacgcctgggaggggcccagctggggttactggccccgcatgagcctcggccatctctccctcctgccctctgcttgggggactcagggctccattctggagggcaccacggtgacccgggccatctcagtattgcctgtgggggccacccctccacccccacccccaagtgccttcgctctgtttttataccctgaattggaggtttattttttaatatatattatct

SEQ ID NO: 26336 - DNA, 5393 bp, Homo sapiens
  source 1..5393: mol_type = unassigned DNA
atgagacctccaggatttctcagcagagctccttcccttaacagagctgagagaggcatctggagctgcagcatggaccagcgagagcccctgcctcccgctcctgcagaaaatgaaatgaaatatgataccaataataatgaagaggaagagggagaacagttcgattttgacagtggagatgaaatcccagaagcggacagacaggccccatccgcccctgagacaggaggtgctggagccagtgaagcccctgcacccacaggaggtgaggatggagctggagcagaaaccaccccagtggcagagcctactaagctggtgctcccgatgaaagtcaacccatattctgtcatcgacatcacgccattccaggaggaccagccgcccacccccgtgcccagcgctgaggaggagaatgtgggtctccatgtgccctgcgggtacttggtgcctgtaccctgcggctatgcggtgccctccaacctgcccctcctgctgcccgcctactccagcccggtcatcatctgcgccacgtccctggacgaagaagcagaaacaccagaagtcacagaagatcgccagcccaattctctgagttccgaggagcctccaaccagtgaagatcaagtcggtcgagaggacagcgcacttgcccgctgggccgcagacccggccaacacagcctggatggagaatccagaggaagcaatttacgatgacgttccaagggaaaactcagactctgaaccagatgaaatgatttatgatgatgttgagaatggggatgaaggtggaaacagctccttggaatacggatggagttcgagtgaatttgaaagttacgaagagcagagtgactcggagtgcaagaatgggattcccaggtccttcctgcgcagcaaccacaaaaagcaactttctcatgacctaacccgtttaaaggagcactatgagaaaaagatgagagatttgatggcaagcacggtgggcgtggtggagattcagcagctcaggcagaagcatgaactgaagatgcagaagctcgtgaaggccgcgaaggacggcaccaaggacgggctggagaggaccagggcagccgtgaagaggggccgctccttcatcaggaccaagtctctcatcgcacaggatcacagatcttctcttgaggaagaacagaatttgttcattgatgttgactgcaagcacccggaagccatcttgaccccgatgcccgagggtttatctcagcagcaggttgtaagaagatatatactgggttcagttgtcgacagtgaaaagaactacgtagatgctcttaagaggattttggagcaatatgagaagccgctgtctgagatggagccaaaggttctgagtgagaggaagctgaagacggtgttctaccgagtcaaagagatcctgcagtgccactcgctatttcagatcgcgctggccagccgcgtttccgagtgggactccgtggaaatgataggcgatgtcttcgtggcttcgttttctaagtccatggtgctggatgcatacagtgaatatgtgaacaatttcagcacagccgtggcagtcctcaagaaaacatgtgccacaaagcccgcttttcttgaatttttaaagcaggaacaggaggccagccccgatcgaaccacgctctacagcctgatgatgaagcccatccagaggttcccacagttcatcctcctgctccaggacatgctgaagaacacctccaaaggccaccccgacaggctgcctcttcagatggccctgacagagctcgaaacactagcagagaagttaaatgaaagaaagagagatgctgatcaacgctgtgaagtgaagcaaatagccaaagccataaacgaaagatacctgaacaagcttctcagcagtggaagccgatacctcattcgatcagatgatatgatagaaacagtttacaacgacagaggagagattgttaaaaccaaagaacgccgagtcttcatgttaaatgatgtgttaatgtgtgccaccgtcagctcacgcccctctcatgacagccgtgtgatgagcagccagaggtacttgctgaagtggagcgttccactgggacatgtggacgccatcgagtatggcagcagcgcaggcacgggcgagcacagcaggcaccttgccgttcacccgccggagagcctggccgtggttgctaacgcgaaaccaaacaaagtttacatggggccaggacaactgtatcaagatttacaaaacttgttgcatgacttaaatgtaattggccaaatcactcagctgataggaaaccttaaaggaaactatcagaacttaaaccagtcagtagcccatgactggacatcaggtttacaaaggcttattttgaagaaagaagatgaaatcagagctgcggactgctgcagaattcagttacagcttcccgggaagcaggacaaatctgggcgaccgacgttctttacagctgtgttcaatacgttcacccctgccatcaaggagtcctgggtcaacagcttacagatggccaagctcgccctagaagaggagaaccacatgggctggttctgtgtggaagacgatgggaatcacattaaaaaggagaagcatcctctcctcgtcggacacatgcccgtgatggtggccaagcagcaggagttcaagatcggaagttgcacccatcaaatgggtcagattgccatcgtctcgtttcaaaattccactcccaaagtcattgagtgcttcaacgtggaatctcgcatcctgtgcatgctgtacgttcccgtcgaggagaagcgcagagagcctggggcacccccggaccccgagaccccggccgtgagagcttctgatgtccccacgatctgtgtagggacggaggagggaagcatttccatttataaaagcagtcaaggctccaagaaagtgagacttcagcactttttcactcctgagaagtccacagtcatgagcctggcttgcacgtctcagagcctgtacgctggcctggtcaacggggcagtcgccagctacgccagagccccagatggatcctgggattcagaacctcaaaaagtgatcaagttaggcgtcctaccagttagaagtctactcatgatggaagacacgttgtgggcggcttccggaggtcaagtcttcatcatcagtgtggagactcatgctgtagagggtcagctggaggcccaccaggaggaaggcatggtgatctcccacatggccgtgtccggcgtcgggatctggattgccttcacctcagggtccacgctccgcctttttcacacggaaactctcaagcacctgcaggacatcaacatcgccacccctgttcacaacatgctgccagggcaccagcggctgtcggtgacgagcctgctcgtctgccacggattgctgatggtcggcaccagcctgggagtcctcgtggccctgccggtcccacgtctgcaagggattcccaaagtgaccggaagaggcatggtctcctaccatgcacacaacagtcctgtcaaattcatcgtcctggccacggctctgcacgagaaagacaaggacaaatccagggacagcctggctcctggccccgagcctcaggacgaagaccagaaggacgcacttccgagtggaggagctggttcatctctgagccagggtgaccctgacgcagccatctggttgggagattcgctgggatcgatgactcagaaaagcgacctgtcctcctcatctgggtccctgagcttgtctcacggctccagctctctagagcacagatcagaggacagcaccatctatgatctcctgaaggatcctgtctcgctgagaagcaaagcacgccgggccaagaaagccaaggccagctcggcgctggtggtctgtggagggcagggccaccgccgggtgcacaggaaggcccggcagccccaccaggaagagctggcgccgaccgtcatggtctggcagatccctctgctgaatatataagcaggacggccgccttctgctgtcagaatttgcaatcaagggtgacttctcagctaatcctacagcctgagtggttaagctgtgtctacactggttgggaataaattaaaaacagtatttgggggagaaacgtgcaatagcgtaatggtggtgtccctgccaattccttccttctcttctgtacagcagaagtaattacaagcacttctcacgaaggcagaagactgatgcaattttcgagtaattgagtgcagttctgggaaaataccacattctttttgactgctgtagtccatatgtgaatactaaatgttaaacttcatcagcgtcagacctattgtatcatattagagaatttgcagactaagaatttatgagaaaatatatgtattcagtagtgcaggcatttattaacaattcttaaaagttttacctgattcagattcacgacttttatttatattctatatttttgaatttcagagtaaaatttgttaacaattttaaaagccaggtaacacctaccagtccagttagcatgatttgctttcagaagtgagctgggttttccaaagtggtataatgtgtgtactgtatattttaacaaagtaatatttttgtattgcatttttctattaaaaaattaacagttaatgtttcagtcaatgtattatctgtagcatttcacaaataatgtttgctttgaaccaaaatgctcagtgcctatcaacatttggactcaagcatcaacaccaaattattcctcccttctcgtataaatagagtgactatccacaggagaaaagtgtgtgctttagtattagaggagataggcagagaagtcttgcttagttccttcgtgcagcttcttgcccctgttgacgtggaatgctgtgtctgctttagcacgcacgctccgaatgactcctggtgctaggccatgctggctgctgtcactgagcgggactcaggccaagaggcgtgacctcgggccagcctgtctgttgtgcagacgcctcctctgcagaacgcatcagtttctattctgcagttgcagagccagccccgcgtgagaacgtgcataatgagtgcacaccatcatgtcaaggtgcatacttagtgagcgccatcctgctgaacgtgtatttcagtgtttcacttactggacggataacaagaaaaaaatcctaacacaggcaggcaccagaaataaatgtctcagcactttacagatgactaaaaatgttaattttatgacttagccaaatatgttctaggttgcatatatcccccatgtgaaagtgatttcttcccaagcttctcaaactgttagctgctgtctgacttcatcaataaagtatttttatttt

SEQ ID NO: 26337 - DNA, 5590 bp, Homo sapiens
  source 1..5590: mol_type = unassigned DNA
ggggtcgcgggggacgcgggggacgcgggggacggcggggaacggcgggggacggcggggaacagcgggggacggcggggaacagcgggggacggcggggaacagcaggggactgcgggtcgcgtcctggccgccgaggagctccttcccttaacagagctgagagaggcatctggagctgcagcatggaccagcgagagcccctgcctcccgctcctgcagaaaatgaaatgaaatatgataccaataataatgaagaggaagagggagaacagttcgattttgacagtggagatgaaatcccagaagcggacagacaggccccatccgcccctgagacaggaggtgctggagccagtgaagcccctgcacccacaggaggtgaggatggagctggagcagaaaccaccccagtggcagagcctactaagctggtgctcccgatgaaagtcaacccatattctgtcatcgacatcacgccattccaggaggaccagccgcccacccccgtgcccagcgctgaggaggagaatgtgggtctccatgtgccctgcgggtacttggtgcctgtaccctgcggctatgcggtgccctccaacctgcccctcctgctgcccgcctactccagcccggtcatcatctgcgccacgtccctggacgaagaagaaacaccagaagtcacagaagatcgccagcccaattctctgagttccgaggagcctccaaccagtgaagatcaagtcggtcgagaggacagcgcacttgcccgctgggccgcagacccggccaacacagcctggatggagaatccagaggaagcaatttacgatgacgttccaagggaaaactcagactctgaaccagatgaaatgatttatgatgatgttgagaatggggatgaaggtggaaacagctccttggaatacggatggagttcgagtgaatttgaaagttacgaagagcagagtgactcggagtgcaagaatgggattcccaggtccttcctgcgcagcaaccacaaaaagcaactttctcatgacctaacccgtttaaaggagcactatgagaaaaagatgagagatttgatggcaagcacggtgggcgtggtggagattcagcagctcaggcagaagcatgaactgaagatgcagaagctcgtgaaggccgcgaaggacggcaccaaggacgggctggagaggaccagggcagccgtgaagaggggccgctccttcatcaggaccaagtctctcatcgcacaggatcacagatcttctcttgaggaagaacagaatttgttcattgatgttgactgcaagcacccggaagccatcttgaccccgatgcccgagggtttatctcagcagcaggttgtaagaagatatatactgggttcagttgtcgacagtgaaaagaactacgtagatgctcttaagaggattttggagcaatatgagaagccgctgtctgagatggagccaaaggttctgagtgagaggaagctgaagacggtgttctaccgagtcaaagagatcctgcagtgccactcgctatttcagatcgcgctggccagccgcgtttccgagtgggactccgtggaaatgataggcgatgtcttcgtggcttcgttttctaagtccatggtgctggatgcatacagtgaatatgtgaacaatttcagcacagccgtggcagtcctcaagaaaacatgtgccacaaagcccgcttttcttgaatttttaaagcaggaacaggaggccagccccgatcgaaccacgctctacagcctgatgatgaagcccatccagaggttcccacagttcatcctcctgctccaggacatgctgaagaacacctccaaaggccaccccgacaggctgcctcttcagatggccctgacagagctcgaaacactagcagagaagttaaatgaaagaaagagagatgctgatcaacgctgtgaagtgaagcaaatagccaaagccataaacgaaagatacctgaacaagcttctcagcagtggaagccgatacctcattcgatcagatgatatgatagaaacagtttacaacgacagaggagagattgttaaaaccaaagaacgccgagtcttcatgttaaatgatgtgttaatgtgtgccaccgtcagctcacgcccctctcatgacagccgtgtgatgagcagccagaggtacttgctgaagtggagcgttccactgggacatgtggacgccatcgagtatggcagcagcgcaggcacgggcgagcacagcaggcaccttgccgttcacccgccggagagcctggccgtggttgctaacgcgaaaccaaacaaagtttacatggggccaggacaactgtatcaagatttacaaaacttgttgcatgacttaaatgtaattggccaaatcactcagctgataggaaaccttaaaggaaactatcagaacttaaaccagtcagtagcccatgactggacatcaggtttacaaaggcttattttgaagaaagaagatgaaatcagagctgcggactgctgcagaattcagttacagcttcccgggaagcaggacaaatctgggcgaccgacgttctttacagctgtgttcaatacgttcacccctgccatcaaggagtcctgggtcaacagcttacagatggccaagctcgccctagaagaggagaaccacatgggctggttctgtgtggaagacgatgggaatcacattaaaaaggagaagcatcctctcctcgtcggacacatgcccgtgatggtggccaagcagcaggagttcaagattgaatgtgctgcttataaccctgaaccttacctaaataatgaaagccagccagattcattttccacggcacatggtttcctgtggatcggaagttgcacccatcaaatgggtcagattgccatcgtctcgtttcaaaattccactcccaaagtcattgagtgcttcaacgtggaatctcgcatcctgtgcatgctgtacgttcccgtcgaggagaagcgcagagagcctggggcacccccggaccccgagaccccggccgtgagagcttctgatgtccccacgatctgtgtagggacggaggagggaagcatttccatttataaaagcagtcaaggctccaagaaagtgagacttcagcactttttcactcctgagaagtccacagtcatgagcctggcttgcacgtctcagagcctgtacgctggcctggtcaacggggcagtcgccagctacgccagagccccagatggatcctgggattcagaacctcaaaaagtgatcaagttaggcgtcctaccagttagaagtctactcatgatggaagacacgttgtgggcggcttccggaggtcaagtcttcatcatcagtgtggagactcatgctgtagagggtcagctggaggcccaccaggaggaaggcatggtgatctcccacatggccgtgtccggcgtcgggatctggattgccttcacctcagggtccacgctccgcctttttcacacggaaactctcaagcacctgcaggacatcaacatcgccacccctgttcacaacatgctgccagggcaccagcggctgtcggtgacgagcctgctcgtctgccacggattgctgatggtcggcaccagcctgggagtcctcgtggccctgccggtcccacgtctgcaagggattcccaaagtgaccggaagaggcatggtctcctaccatgcacacaacagtcctgtcaaattcatcgtcctggccacggctctgcacgagaaagacaaggacaaatccagggacagcctggctcctggccccgagcctcaggacgaagaccagaaggacgcacttccgagtggaggagctggttcatctctgagccagggtgaccctgacgcagccatctggttgggagattcgctgggatcgatgactcagaaaagcgacctgtcctcctcatctgggtccctgagcttgtctcacggctccagctctctagagcacagatcagaggacagcaccatctatgatctcctgaaggatcctgtctcgctgagaagcaaagcacgccgggccaagaaagccaaggccagctcggcgctggtggtctgtggagggcagggccaccgccgggtgcacaggaaggcccggcagccccaccaggaagagctggcgccgaccgtcatggtctggcagatccctctgctgaatatataagcaggacggccgccttctgctgtcagaatttgcaatcaagggtgacttctcagctaatcctacagcctgagtggttaagctgtgtctacactggttgggaataaattaaaaacagtatttgggggagaaacgtgcaatagcgtaatggtggtgtccctgccaattccttccttctcttctgtacagcagaagtaattacaagcacttctcacgaaggcagaagactgatgcaattttcgagtaattgagtgcagttctgggaaaataccacattctttttgactgctgtagtccatatgtgaatactaaatgttaaacttcatcagcgtcagacctattgtatcatattagagaatttgcagactaagaatttatgagaaaatatatgtattcagtagtgcaggcatttattaacaattcttaaaagttttacctgattcagattcacgacttttatttatattctatatttttgaatttcagagtaaaatttgttaacaattttaaaagccaggtaacacctaccagtccagttagcatgatttgctttcagaagtgagctgggttttccaaagtggtataatgtgtgtactgtatattttaacaaagtaatatttttgtattgcatttttctattaaaaaattaacagttaatgtttcagtcaatgtattatctgtagcatttcacaaataatgtttgctttgaaccaaaatgctcagtgcctatcaacatttggactcaagcatcaacaccaaattattcctcccttctcgtataaatagagtgactatccacaggagaaaagtgtgtgctttagtattagaggagataggcagagaagtcttgcttagttccttcgtgcagcttcttgcccctgttgacgtggaatgctgtgtctgctttagcacgcacgctccgaatgactcctggtgctaggccatgctggctgctgtcactgagcgggactcaggccaagaggcgtgacctcgggccagcctgtctgttgtgcagacgcctcctctgcagaacgcatcagtttctattctgcagttgcagagccagccccgcgtgagaacgtgcataatgagtgcacaccatcatgtcaaggtgcatacttagtgagcgccatcctgctgaacgtgtatttcagtgtttcacttactggacggataacaagaaaaaaatcctaacacaggcaggcaccagaaataaatgtctcagcactttacagatgactaaaaatgttaattttatgacttagccaaatatgttctaggttgcatatatcccccatgtgaaagtgatttcttcccaagcttctcaaactgttagctgctgtctgacttcatcaataaagtatttttatttt

SEQ ID NO: 26338 - DNA, 1996 bp, Homo sapiens
  source 1..1996: mol_type = unassigned DNA
gaacggcgggggacggcggggaacagcgggggacggcggggaacagcgggggacggcggggaacagcaggggactgcgggtcgcgtcctggccgccgagcatttatttgctggctttagcagccaacatcggcagttacggatgcataactctttatagacagatgagacctccaggatttctcagcagagctccttcccttaacagagctgagagaggcatctggagctgcagcatggaccagcgagagcccctgcctcccgctcctgcagaaaatgaaatgaaatatgataccaataataatgaagaggaagagggagaacagttcgattttgacagtggagatgaaatcccagaagcggacagacaggccccatccgcccctgagacaggaggtgctggagccagtgaagcccctgcacccacaggaggtgaggatggagctggagcagaaaccaccccagtggcagagcctactaagctggtgctcccgatgaaagtcaacccatattctgtcatcgacatcacgccattccaggaggaccagccgcccacccccgtgcccagcgctgaggaggagaatgtgggtctccatgtgccctgcgggtacttggtgcctgtaccctgcggctatgcggtgccctccaacctgcccctcctgctgcccgcctactccagcccggtcatcatctgcgccacgtccctggacgaagaagcagaaacaccagaagtcacagaagatcgccagcccaattctctgagttccgaggagcctccaaccagtgaagatcaagtcggtcgagaggacagcgcacttgcccgctgggccgcagacccggccaacacagcctggatggagaatccagaggaagcaatttacgatgacgttccaagggaaaactcagactctgaaccagatgaaatgatttatgatgatgttgagaatggggatgaaggtggaaacagctccttggaatacggatggagttcgagtgaatttgaaagttacgaagagcagagtgactcggagtgcaagaatgggattcccaggtccttcctgcgcagcaaccacaaaaagcaaatgcagaagctcgtgaaggccgcgaaggacggcaccaaggacgggctggagaggaccagggcagccgtgaagaggggccgctccttcatcaggaccaagtctctcatcgcacaggatcacagatcttctcttgaggaagaacagaatttgttcattgatgttgactgcaagcacccggaagccatcttgaccccgatgcccgagggtttatctcagcagcaggttgtaagaagatatatactgggttcagttgtcgacagtgaaaagaactacgtagatgctcttaagaggattttggagcaatatgagaagccgctgtctgagatggagccaaaggttctgagtgagaggaagctgaagacggtgttctaccgagtcaaagagatcctgcagtgccactcgctatttcagatcgcgctggccagccgcgtttccgagtgggactccgtggaaatgataggcgatgtcttcgtggcttcgttttctaagtccatggtgctggatgcatacagtgaatatgtgaacaatttcagcacagccgtggcagtcctcaagaaaacatgtgccacaaagcccgcttttcttgaatttttaaagcaggaacaggaggccagccccgatcgaaccacgctctacagcctgatgatgaagcccatccagaggttcccacagttcatcctcctgctccaggacatgctgaagaacacctccaaaggccaccccgacaggctgcctcttcagatggccctgacagagctcgaaacactagcagagaagttaaatgaaagaaagagagatgctgatcaacgctgtgaagtgaagcaaatagccaaagccataaacgaaagatacctgaacaaggttgagagaggttttcttcaactctattccaaaattatttttgctttgtgctaa

SEQ ID NO: 26339 - DNA, 5480 bp, Homo sapiens
  source 1..5480: mol_type = unassigned DNA
atgagacctccaggatttctcagcagagctccttcccttaacagagctgagagaggcatctggagctgcagcatggaccagcgagagcccctgcctcccgctcctgcagaaaatgaaatgaaatatgataccaataataatgaagaggaagagggagaacagttcgattttgacagtggagatgaaatcccagaagcggacagacaggccccatccgcccctgagacaggaggtgctggagccagtgaagcccctgcacccacaggaggtgaggatggagctggagcagaaaccaccccagtggcagagcctactaagctggtgctcccgatgaaagtcaacccatattctgtcatcgacatcacgccattccaggaggaccagccgcccacccccgtgcccagcgctgaggaggagaatgtgggtctccatgtgccctgcgggtacttggtgcctgtaccctgcggctatgcggtgccctccaacctgcccctcctgctgcccgcctactccagcccggtcatcatctgcgccacgtccctggacgaagaagcagaaacaccagaagtcacagaagatcgccagcccaattctctgagttccgaggagcctccaaccagtgaagatcaagtcggtcgagaggacagcgcacttgcccgctgggccgcagacccggccaacacagcctggatggagaatccagaggaagcaatttacgatgacgttccaagggaaaactcagactctgaaccagatgaaatgatttatgatgatgttgagaatggggatgaaggtggaaacagctccttggaatacggatggagttcgagtgaatttgaaagttacgaagagcagagtgactcggagtgcaagaatgggattcccaggtccttcctgcgcagcaaccacaaaaagcaactttctcatgacctaacccgtttaaaggagcactatgagaaaaagatgagagatttgatggcaagcacggtgggcgtggtggagattcagcagctcaggcagaagcatgaactgaagatgcagaagctcgtgaaggccgcgaaggacggcaccaaggacgggctggagaggaccagggcagccgtgaagaggggccgctccttcatcaggaccaagtctctcatcgcacaggatcacagatcttctcttgaggaagaacagaatttgttcattgatgttgactgcaagcacccggaagccatcttgaccccgatgcccgagggtttatctcagcagcaggttgtaagaagatatatactgggttcagttgtcgacagtgaaaagaactacgtagatgctcttaagaggattttggagcaatatgagaagccgctgtctgagatggagccaaaggttctgagtgagaggaagctgaagacggtgttctaccgagtcaaagagatcctgcagtgccactcgctatttcagatcgcgctggccagccgcgtttccgagtgggactccgtggaaatgataggcgatgtcttcgtggcttcgttttctaagtccatggtgctggatgcatacagtgaatatgtgaacaatttcagcacagccgtggcagtcctcaagaaaacatgtgccacaaagcccgcttttcttgaatttttaaagcaggaacaggaggccagccccgatcgaaccacgctctacagcctgatgatgaagcccatccagaggttcccacagttcatcctcctgctccaggacatgctgaagaacacctccaaaggccaccccgacaggctgcctcttcagatggccctgacagagctcgaaacactagcagagaagttaaatgaaagaaagagagatgctgatcaacgctgtgaagtgaagcaaatagccaaagccataaacgaaagatacctgaacaagcttctcagcagtggaagccgatacctcattcgatcagatgatatgatagaaacagtttacaacgacagaggagagattgttaaaaccaaagaacgccgagtcttcatgttaaatgatgtgttaatgtgtgccaccgtcagctcacgcccctctcatgacagccgtgtgatgagcagccagaggtacttgctgaagtggagcgttccactgggacatgtggacgccatcgagtatggcagcagcgcaggcacgggcgagcacagcaggcaccttgccgttcacccgccggagagcctggccgtggttgctaacgcgaaaccaaacaaagtttacatggggccaggacaactgtatcaagatttacaaaacttgttgcatgacttaaatgtaattggccaaatcactcagctgataggaaaccttaaaggaaactatcagaacttaaaccagtcagtagcccatgactggacatcaggtttacaaaggcttattttgaagaaagaagatgaaatcagagctgcggactgctgcagaattcagttacagcttcccgggaagcaggacaaatctgggcgaccgacgttctttacagctgtgttcaatacgttcacccctgccatcaaggagtcctgggtcaacagcttacagatggccaagctcgccctagaagaggagaaccacatgggctggttctgtgtggaagacgatgggaatcacattaaaaaggagaagcatcctctcctcgtcggacacatgcccgtgatggtggccaagcagcaggagttcaagattgaatgtgctgcttataaccctgaaccttacctaaataatgaaagccagccagattcattttccacggcacatggtttcctgtggatcggaagttgcacccatcaaatgggtcagattgccatcgtctcgtttcaaaattccactcccaaagtcattgagtgcttcaacgtggaatctcgcatcctgtgcatgctgtacgttcccgtcgaggagaagcgcagagagcctggggcacccccggaccccgagaccccggccgtgagagcttctgatgtccccacgatctgtgtagggacggaggagggaagcatttccatttataaaagcagtcaaggctccaagaaagtgagacttcagcactttttcactcctgagaagtccacagtcatgagcctggcttgcacgtctcagagcctgtacgctggcctggtcaacggggcagtcgccagctacgccagagccccagatggatcctgggattcagaacctcaaaaagtgatcaagttaggcgtcctaccagttagaagtctactcatgatggaagacacgttgtgggcggcttccggaggtcaagtcttcatcatcagtgtggagactcatgctgtagagggtcagctggaggcccaccaggaggaaggcatggtgatctcccacatggccgtgtccggcgtcgggatctggattgccttcacctcagggtccacgctccgcctttttcacacggaaactctcaagcacctgcaggacatcaacatcgccacccctgttcacaacatgctgccagggcaccagcggctgtcggtgacgagcctgctcgtctgccacggattgctgatggtcggcaccagcctgggagtcctcgtggccctgccggtcccacgtctgcaagggattcccaaagtgaccggaagaggcatggtctcctaccatgcacacaacagtcctgtcaaattcatcgtcctggccacggctctgcacgagaaagacaaggacaaatccagggacagcctggctcctggccccgagcctcaggacgaagaccagaaggacgcacttccgagtggaggagctggttcatctctgagccagggtgaccctgacgcagccatctggttgggagattcgctgggatcgatgactcagaaaagcgacctgtcctcctcatctgggtccctgagcttgtctcacggctccagctctctagagcacagatcagaggacagcaccatctatgatctcctgaaggatcctgtctcgctgagaagcaaagcacgccgggccaagaaagccaaggccagctcggcgctggtggtctgtggagggcagggccaccgccgggtgcacaggaaggcccggcagccccaccaggaagagctggcgccgaccgtcatggtctggcagatccctctgctgaatatataagcaggacggccgccttctgctgtcagaatttgcaatcaagggtgacttctcagctaatcctacagcctgagtggttaagctgtgtctacactggttgggaataaattaaaaacagtatttgggggagaaacgtgcaatagcgtaatggtggtgtccctgccaattccttccttctcttctgtacagcagaagtaattacaagcacttctcacgaaggcagaagactgatgcaattttcgagtaattgagtgcagttctgggaaaataccacattctttttgactgctgtagtccatatgtgaatactaaatgttaaacttcatcagcgtcagacctattgtatcatattagagaatttgcagactaagaatttatgagaaaatatatgtattcagtagtgcaggcatttattaacaattcttaaaagttttacctgattcagattcacgacttttatttatattctatatttttgaatttcagagtaaaatttgttaacaattttaaaagccaggtaacacctaccagtccagttagcatgatttgctttcagaagtgagctgggttttccaaagtggtataatgtgtgtactgtatattttaacaaagtaatatttttgtattgcatttttctattaaaaaattaacagttaatgtttcagtcaatgtattatctgtagcatttcacaaataatgtttgctttgaaccaaaatgctcagtgcctatcaacatttggactcaagcatcaacaccaaattattcctcccttctcgtataaatagagtgactatccacaggagaaaagtgtgtgctttagtattagaggagataggcagagaagtcttgcttagttccttcgtgcagcttcttgcccctgttgacgtggaatgctgtgtctgctttagcacgcacgctccgaatgactcctggtgctaggccatgctggctgctgtcactgagcgggactcaggccaagaggcgtgacctcgggccagcctgtctgttgtgcagacgcctcctctgcagaacgcatcagtttctattctgcagttgcagagccagccccgcgtgagaacgtgcataatgagtgcacaccatcatgtcaaggtgcatacttagtgagcgccatcctgctgaacgtgtatttcagtgtttcacttactggacggataacaagaaaaaaatcctaacacaggcaggcaccagaaataaatgtctcagcactttacagatgactaaaaatgttaattttatgacttagccaaatatgttctaggttgcatatatcccccatgtgaaagtgatttcttcccaagcttctcaaactgttagctgctgtctgacttcatcaataaagtatttttatttt

SEQ ID NO: 26340 - DNA, 5648 bp, Homo sapiens
  source 1..5648: mol_type = unassigned DNA
gaacggcgggggacggcggggaacagcgggggacggcggggaacagcgggggacggcggggaacagcaggggactgcgggtcgcgtcctggccgccgagcatttatttgctggctttagcagccaacatcggcagttacggatgcataactctttatagacagatgagacctccaggatttctcagcagagctccttcccttaacagagctgagagaggcatctggagctgcagcatggaccagcgagagcccctgcctcccgctcctgcagaaaatgaaatgaaatatgataccaataataatgaagaggaagagggagaacagttcgattttgacagtggagatgaaatcccagaagcggacagacaggccccatccgcccctgagacaggaggtgctggagccagtgaagcccctgcacccacaggaggtgaggatggagctggagcagaaaccaccccagtggcagagcctactaagctggtgctcccgatgaaagtcaacccatattctgtcatcgacatcacgccattccaggaggaccagccgcccacccccgtgcccagcgctgaggaggagaatgtgggtctccatgtgccctgcgggtacttggtgcctgtaccctgcggctatgcggtgccctccaacctgcccctcctgctgcccgcctactccagcccggtcatcatctgcgccacgtccctggacgaagaagcagaaacaccagaagtcacagaagatcgccagcccaattctctgagttccgaggagcctccaaccagtgaagatcaagtcggtcgagaggacagcgcacttgcccgctgggccgcagacccggccaacacagcctggatggagaatccagaggaagcaatttacgatgacgttccaagggaaaactcagactctgaaccagatgaaatgatttatgatgatgttgagaatggggatgaaggtggaaacagctccttggaatacggatggagttcgagtgaatttgaaagttacgaagagcagagtgactcggagtgcaagaatgggattcccaggtccttcctgcgcagcaaccacaaaaagcaactttctcatgacctaacccgtttaaaggagcactatgagaaaaagatgagagatttgatggcaagcacggtgggcgtggtggagattcagcagctcaggcagaagcatgaactgaagatgcagaagctcgtgaaggccgcgaaggacggcaccaaggacgggctggagaggaccagggcagccgtgaagaggggccgctccttcatcaggaccaagtctctcatcgcacaggatcacagatcttctcttgaggaagaacagaatttgttcattgatgttgactgcaagcacccggaagccatcttgaccccgatgcccgagggtttatctcagcagcaggttgtaagaagatatatactgggttcagttgtcgacagtgaaaagaactacgtagatgctcttaagaggattttggagcaatatgagaagccgctgtctgagatggagccaaaggttctgagtgagaggaagctgaagacggtgttctaccgagtcaaagagatcctgcagtgccactcgctatttcagatcgcgctggccagccgcgtttccgagtgggactccgtggaaatgataggcgatgtcttcgtggcttcgttttctaagtccatggtgctggatgcatacagtgaatatgtgaacaatttcagcacagccgtggcagtcctcaagaaaacatgtgccacaaagcccgcttttcttgaatttttaaaggaacaggaggccagccccgatcgaaccacgctctacagcctgatgatgaagcccatccagaggttcccacagttcatcctcctgctccaggacatgctgaagaacacctccaaaggccaccccgacaggctgcctcttcagatggccctgacagagctcgaaacactagcagagaagttaaatgaaagaaagagagatgctgatcaacgctgtgaagtgaagcaaatagccaaagccataaacgaaagatacctgaacaagcttctcagcagtggaagccgatacctcattcgatcagatgatatgatagaaacagtttacaacgacagaggagagattgttaaaaccaaagaacgccgagtcttcatgttaaatgatgtgttaatgtgtgccaccgtcagctcacgcccctctcatgacagccgtgtgatgagcagccagaggtacttgctgaagtggagcgttccactgggacatgtggacgccatcgagtatggcagcagcgcaggcacgggcgagcacagcaggcaccttgccgttcacccgccggagagcctggccgtggttgctaacgcgaaaccaaacaaagtttacatggggccaggacaactgtatcaagatttacaaaacttgttgcatgacttaaatgtaattggccaaatcactcagctgataggaaaccttaaaggaaactatcagaacttaaaccagtcagtagcccatgactggacatcaggtttacaaaggcttattttgaagaaagaagatgaaatcagagctgcggactgctgcagaattcagttacagcttcccgggaagcaggacaaatctgggcgaccgacgttctttacagctgtgttcaatacgttcacccctgccatcaaggagtcctgggtcaacagcttacagatggccaagctcgccctagaagaggagaaccacatgggctggttctgtgtggaagacgatgggaatcacattaaaaaggagaagcatcctctcctcgtcggacacatgcccgtgatggtggccaagcagcaggagttcaagattgaatgtgctgcttataaccctgaaccttacctaaataatgaaagccagccagattcattttccacggcacatggtttcctgtggatcggaagttgcacccatcaaatgggtcagattgccatcgtctcgtttcaaaattccactcccaaagtcattgagtgcttcaacgtggaatctcgcatcctgtgcatgctgtacgttcccgtcgaggagaagcgcagagagcctggggcacccccggaccccgagaccccggccgtgagagcttctgatgtccccacgatctgtgtagggacggaggagggaagcatttccatttataaaagcagtcaaggctccaagaaagtgagacttcagcactttttcactcctgagaagtccacagtcatgagcctggcttgcacgtctcagagcctgtacgctggcctggtcaacggggcagtcgccagctacgccagagccccagatggatcctgggattcagaacctcaaaaagtgatcaagttaggcgtcctaccagttagaagtctactcatgatggaagacacgttgtgggcggcttccggaggtcaagtcttcatcatcagtgtggagactcatgctgtagagggtcagctggaggcccaccaggaggaaggcatggtgatctcccacatggccgtgtccggcgtcgggatctggattgccttcacctcagggtccacgctccgcctttttcacacggaaactctcaagcacctgcaggacatcaacatcgccacccctgttcacaacatgctgccagggcaccagcggctgtcggtgacgagcctgctcgtctgccacggattgctgatggtcggcaccagcctgggagtcctcgtggccctgccggtcccacgtctgcaagggattcccaaagtgaccggaagaggcatggtctcctaccatgcacacaacagtcctgtcaaattcatcgtcctggccacggctctgcacgagaaagacaaggacaaatccagggacagcctggctcctggccccgagcctcaggacgaagaccagaaggacgcacttccgagtggaggagctggttcatctctgagccagggtgaccctgacgcagccatctggttgggagattcgctgggatcgatgactcagaaaagcgacctgtcctcctcatctgggtccctgagcttgtctcacggctccagctctctagagcacagatcagaggacagcaccatctatgatctcctgaaggatcctgtctcgctgagaagcaaagcacgccgggccaagaaagccaaggccagctcggcgctggtggtctgtggagggcagggccaccgccgggtgcacaggaaggcccggcagccccaccaggaagagctggcgccgaccgtcatggtctggcagatccctctgctgaatatataagcaggacggccgccttctgctgtcagaatttgcaatcaagggtgacttctcagctaatcctacagcctgagtggttaagctgtgtctacactggttgggaataaattaaaaacagtatttgggggagaaacgtgcaatagcgtaatggtggtgtccctgccaattccttccttctcttctgtacagcagaagtaattacaagcacttctcacgaaggcagaagactgatgcaattttcgagtaattgagtgcagttctgggaaaataccacattctttttgactgctgtagtccatatgtgaatactaaatgttaaacttcatcagcgtcagacctattgtatcatattagagaatttgcagactaagaatttatgagaaaatatatgtattcagtagtgcaggcatttattaacaattcttaaaagttttacctgattcagattcacgacttttatttatattctatatttttgaatttcagagtaaaatttgttaacaattttaaaagccaggtaacacctaccagtccagttagcatgatttgctttcagaagtgagctgggttttccaaagtggtataatgtgtgtactgtatattttaacaaagtaatatttttgtattgcatttttctattaaaaaattaacagttaatgtttcagtcaatgtattatctgtagcatttcacaaataatgtttgctttgaaccaaaatgctcagtgcctatcaacatttggactcaagcatcaacaccaaattattcctcccttctcgtataaatagagtgactatccacaggagaaaagtgtgtgctttagtattagaggagataggcagagaagtcttgcttagttccttcgtgcagcttcttgcccctgttgacgtggaatgctgtgtctgctttagcacgcacgctccgaatgactcctggtgctaggccatgctggctgctgtcactgagcgggactcaggccaagaggcgtgacctcgggccagcctgtctgttgtgcagacgcctcctctgcagaacgcatcagtttctattctgcagttgcagagccagccccgcgtgagaacgtgcataatgagtgcacaccatcatgtcaaggtgcatacttagtgagcgccatcctgctgaacgtgtatttcagtgtttcacttactggacggataacaagaaaaaaatcctaacacaggcaggcaccagaaataaatgtctcagcactttacagatgactaaaaatgttaattttatgacttagccaaatatgttctaggttgcatatatcccccatgtgaaagtgatttcttcccaagcttctcaaactgttagctgctgtctgacttcatcaataaagtatttttattttaaaatgca

SEQ ID NO: 26341 - DNA, 3443 bp, Homo sapiens
  source 1..3443: mol_type = unassigned DNA
atgttacccagcagctcgtgggggaagaggaagctgcgaggcaggctggggtgggtgcggagtgatgcccggggcgtgatgtgggcccggcaggagggtctgcaccacccccacccccacgccgtcatccgctgtccctcctcctcctcctcctctgtctcctgctcaggtgactcggaggaggaggacatggggctcctggaggtcagcgtttcggacatcaagcccccagccccagagctgggccccatgccagagggcctgagccctcagcaggtggtccggaggcatatcctgggctccatcgtgcagagcgaaggcagctacgtggagtctctgaagcggatactccaggactaccgcaaccccctgatggagatggagcccaaggcgctgagcgcccgcaagtgccaggtggtgttcttccgcgtgaaggagatcctgcactgccactccatgttccagatcgccctgtcctcccgcgtggctgagtgggattccaccgagaagatcggggacctcttcgtggcctcggacatgctgaagaacacccccaggggccatccggacaggctgtcgctgcagctggccctcacagagctggagacgctggctgagaagctgaacgagcagaagcggctggctgaccaggtggctgagatccagcagctgaccaagagcgtcagtgaccgcagcagcctcaacaagctgttgacctcaggccagcggcagctgctcctgtgtgagacgttgacggagaccgtgtacggtgaccgcgggcagctaattaagtccaaggagcgtcgggtcttcctgctcaacgacatgcttgtctgtgccaacatcaacttcaagggccagctggagatcagcagcctggtgcccctggggcccaagtatgtggtgaagtggaacacggcgctgccccaggtgcaggtggtggaggtgggccaggacggtggcacctatgacaaggacaatgtgctcatccagcactcaggcgccaagaaggcctctgcctcagggcaggctcagaataaggtgtacctcggccccccacgcctcttccaggagctgcaggacctgcagaaggacctggccgtggtggagcagatcacgcttctcatcagcacgctgcacggcacctaccagaacctgaacatgactgtggctcaagactggtgcctggccctgcagaggctgatgcgggtgaaggaggaagagatccactcggccaacaagtgccgtctcaggctcctgcttcctgggaaacccgacaagtccggccgccccattagcttcatggtggttttcatcacccccaaccccctgagcaagatttcctgggtcaacaggttacatttggccaaaatcggactccgggaggagaaccagccaggctggctatgcccggatgaggacaagaagagcaaagccccattctggtgcccgatcctggcctgctgcatccctgccttctcctcccgggcactcagcctgcagcttggggccctggtccacagtcctgtcaactgtcccctgctgggtttctcagcagtcagcacctcccttccacagggctacctctgggtcgggggcggacaggaaggcgcagggggccaggtggaaatcttttccttgaaccggccctcgccccgcaccgtcaagtccttcccactggcagcccctgtgctctgcatggagtatatcccggagctggaggaggaggcggagagcagagacgagagcccgacagttgctgacccctcggccacggtgcatccaaccatctgcctcgggctccaggatggcagcatcctcctctacagcagtgtggacactggcacccagtgcctggtgagctgcaggagcccaggtctgcagcctgtgctctgcctgcgacacagccccttccacctgctcgctggcctgcaggatgggacccttgctgcttaccctcggaccagcggaggtgtcctgtgggacctggagagccctcccgtgtgcctgactgtggggcccgggcctgtccgcaccctgttgagcctggaggatgccgtgtgggccagctgtgggccctgggtcactgtcctggaagccaccaccctgcagcctcagcaaagcttcgaggcgcaccaggacgaggcagtgagcgtgacacacatggtgaaggcgggcagcggcgtctggatggccttctcctccggcacctccatccgcctcttccacactgagaccctggagcatctgcaagagatcaacatcgccaccaggaccaccttcctcctgccaggccagaagcacttgtgtgtcaccagcctcctgatctgccagggtctgctctgggtgggcactgaccagggtgtcatcgtcctgctgcccgtgcctcggctggaaggcatccccaagatcacagggaaaggcatggtctcactcaacgggcactgtgggcctgtggccttcctggctgtggctaccagcatcctggcccctgacatcctgcggagtgaccaggaggaggctgaggggccccgggctgaggaggacaagccagacgggcaggcacacgagcccatgcccgatagccacgtgggccgagagctgacccgcaagaagggcatcctcttgcagtaccgcctgcgctccaccgcacacctcccgggcccgctgctctccatgcgggagccggcgcctgctgatggcgcagctttggagcacagcgaggaggacggctccatttacgagatggccgacgaccccgacatctgggtgcgcagccggccctgcgcccgcgacgcccaccgcaaggagatttgctctgtggccatcatctccggcgggcagggctaccgcaactttggcagcgctctgggcagcagtgggaggcaggccccgtgtggggagacggacagcaccctcctcatctggcaggtgcccttgatgctatagcgcctcccctctcccctcagagggcacagctgcaggcctgaccaaggccacgcccggctctcgtgctctaggacctgcacgggacttgtggatgggcctggactctccagaaactacttgggcagagcaaaggaaaacctcttgttttaaaaaaatttttttcagagtgttttggggaggagttttagggcttggggagagggaggacacatctggaggaaatggccttctttttaaaagcaaaaaacacaaaacctcacaactgcctggcaagcccagtatcacttgtttgggccctagcgggactccaaggcagccacacgcccctcctggaagggtgtgtgcgtgtgagtgtgtgcgagtgtgtgggctggtgtgtgaatatctataaataagtatatatggtgtatattatatgtgtataaataaagtctgtacatattggagctctgggagatgctggaataaaagacaagagttacatctggacttgg

SEQ ID NO: 26342 - DNA, 4488 bp, Homo sapiens
  source 1..4488: mol_type = unassigned DNA
gcgccgtcccggccatgggcgcccgcggcggcctgcggagctggaggcgcggcgccggccgccaggcgcctttgtgagcggcgcggacgacaaaggcgcgggcccgggcagccgaggtgtgtagctgggacggtgctggtctgagctggaccttgtctgatggcttcctccaaccctcctccacagcctgccataggagatcagctggttccaggagtcccaggcccctcctctgaggcagaggacgacccaggagaggcgtttgagtttgatgacagtgatgatgaagaggacaccagcgcagccctgggcgtccccagccttgctcctgagagggacacagaccccccactgatccacttggactccatccctgtcactgacccagacccagcagctgctccacccggcacaggggtgccagcctgggtgagcaatggggatgcagcggacgcagccttctccggggcccggcactccagctggaagcggaagagttcccgtcgcattgaccggttcactttccccgccctggaagaggatgtgatttatgacgacgtcccctgcgagagcccagatgcgcatcagcccggggcagagaggaacctgctctacgaggatgcgcaccgggctggggcccctcggcaggcggaggacctaggctggagctccagtgagttcgagagctacagcgaggactcgggggaggaggccaagccggaggtcgaggtcgagcccgccaagcaccgagtgtccttccagcccaagctttctccagacctgactaggctaaaggagagatacgccaggactaagagagacatcttggctttgagagttggggggagagacatgcaggagctgaagcacaagtacgattgtaagatgacccagctcatgaaggccgccaagagcgggaccaaggatgggctggagaagacacggatggccgtgatgcgcaaagtctccttcctgcacaggaaggacgtcctcggtgactcggaggaggaggacatggggctcctggaggtcagcgtttcggacatcaagcccccagccccagagctgggccccatgccagagggcctgagccctcagcaggtggtccggaggcatatcctgggctccatcgtgcagagcgaaggcagctacgtggagtctctgaagcggatactccaggactaccgcaaccccctgatggagatggagcccaaggcgctgagcgcccgcaagtgccaggtggtgttcttccgcgtgaaggagatcctgcactgccactccatgttccagatcgccctgtcctcccgcgtggctgagtgggattccaccgagaagatcggggacctcttcgtggcctcgttttccaagtccatggtgctagatgtgtacagtgactacgtgaacaacttcaccagtgccatgtccatcatcaagaaggcctgcctcaccaagcctgccttcctcgagttcctcaagcgacggcaggtgtgcagcccagaccgtgtcaccctctacgggctgatggtcaagcccatccagaggttcccacagttcatactcctgcttcaggacatgctgaagaacacccccaggggccatccggacaggctgtcgctgcagctggccctcacagagctggagacgctggctgagaagctgaacgagcagaagcggctggctgaccaggtggctgagatccagcagctgaccaagagcgtcagtgaccgcagcagcctcaacaagctgttgacctcaggccagcggcagctgctcctgtgtgagacgttgacggagaccgtgtacggtgaccgcgggcagctaattaagtccaaggagcgtcgggtcttcctgctcaacgacatgcttgtctgtgccaacatcaacttcaagcctgccaaccacaggggccagctggagatcagcagcctggtgcccctggggcccaagtatgtggtgaagtggaacacggcgctgccccaggtgcaggtggtggaggtgggccaggacggtggcacctatgacaaggacaatgtgctcatccagcactcaggcgccaagaaggcctctgcctcagggcaggctcagaataaggtgtacctcggccccccacgcctcttccaggagctgcaggacctgcagaaggacctggccgtggtggagcagatcacgcttctcatcagcacgctgcacggcacctaccagaacctgaacatgactgtggctcaagactggtgcctggccctgcagaggctgatgcgggtgaaggaggaagagatccactcggccaacaagtgccgtctcaggctcctgcttcctgggaaacccgacaagtccggccgccccattagcttcatggtggttttcatcacccccaaccccctgagcaagatttcctgggtcaacaggttacatttggccaaaatcggactccgggaggagaaccagccaggctggctatgcccggatgaggacaagaagagcaaagccccattctggtgcccgatcctggcctgctgcatccctgccttctcctcccgggcactcagcctgcagcttggggccctggtccacagtcctgtcaactgtcccctgctgggtttctcagcagtcagcacctcccttccacagggctacctctgggtcgggggcggacaggaaggcgcagggggccaggtggaaatcttttccttgaaccggccctcgccccgcaccgtcaagtccttcccactggcagcccctgtgctctgcatggagtatatcccggagctggaggaggaggcggagagcagagacgagagcccgacagttgctgacccctcggccacggtgcatccaaccatctgcctcgggctccaggatggcagcatcctcctctacagcagtgtggacactggcacccagtgcctggtgagctgcaggagcccaggtctgcagcctgtgctctgcctgcgacacagccccttccacctgctcgctggcctgcaggatgggacccttgctgcttaccctcggaccagcggaggtgtcctgtgggacctggagagccctcccgtgtgcctgactgtggggcccgggcctgtccgcaccctgttgagcctggaggatgccgtgtgggccagctgtgggccctgggtcactgtcctggaagccaccaccctgcagcctcagcaaagcttcgaggcgcaccaggacgaggcagtgagcgtgacacacatggtgaaggcgggcagcggcgtctggatggccttctcctccggcacctccatccgcctcttccacactgagaccctggagcatctgcaagagatcaacatcgccaccaggaccaccttcctcctgccaggccagaagcacttgtgtgtcaccagcctcctgatctgccagggtctgctctgggtgggcactgaccagggtgtcatcgtcctgctgcccgtgcctcggctggaaggcatccccaagatcacagggaaaggcatggtctcactcaacgggcactgtgggcctgtggccttcctggctgtggctaccagcatcctggcccctgacatcctgcggagtgaccaggaggaggctgaggggccccgggctgaggaggacaagccagacgggcaggcacacgagcccatgcccgatagccacgtgggccgagagctgacccgcaagaagggcatcctcttgcagtaccgcctgcgctccaccgcacacctcccgggcccgctgctctccatgcgggagccggcgcctgctgatggcgcagctttggagcacagcgaggaggacggctccatttacgagatggccgacgaccccgacatctgggtgcgcagccggccctgcgcccgcgacgcccaccgcaaggagatttgctctgtggccatcatctccggcgggcagggctaccgcaactttggcagcgctctgggcagcagtgggaggcaggccccgtgtggggagacggacagcaccctcctcatctggcaggtgcccttgatgctatagcgcctcccctctcccctcagagggcacagctgcaggcctgaccaaggccacgcccggctctcgtgctctaggacctgcacgggacttgtggatgggcctggactctccagaaactacttgggcagagcaaaggaaaacctcttgttttaaaaaaatttttttcagagtgttttggggaggagttttagggcttggggagagggaggacacatctggaggaaatggccttctttttaaaagcaaaaaacacaaaacctcacaactgcctggcaagcccagtatcacttgtttgggccctagcgggactccaaggcagccacacgcccctcctggaagggtgtgtgcgtgtgagtgtgtgcgagtgtgtgggctggtgtgtgaatatctataaataagtatatatggtgtatattatatgtgtataaataaagtctgtacatattggagctctgggagatgctggaataaaagacaagagttacatctgga

SEQ ID NO: 26343 - DNA, 3685 bp, Homo sapiens
  source 1..3685: mol_type = unassigned DNA
attaatagccgtggcagggctcgaatcacaggccaagaatgttacccagcagctcgtgggggaagaggaagctgcgaggcaggctggggtgggtgcggagtgatgcccggggcgtgatgtgggcccggcaggagggtctgcaccacccccacccccacgccgtcatccgctgtccctcctcctcctcctcctctgtctcctgctcaggtgactcggaggaggaggacatggggctcctggaggtcagcgtttcggacatcaagcccccagccccagagctgggccccatgccagagggcctgagccctcagcaggtggtccggaggcatatcctgggctccatcgtgcagagcgaaggcagctacgtggagtctctgaagcggatactccaggactaccgcaaccccctgatggagatggagcccaaggcgctgagcgcccgcaagtgccaggtggtgttcttccgcgtgaaggagatcctgcactgccactccatgttccagatcgccctgtcctcccgcgtggctgagtgggattccaccgagaagatcggggacctcttcgtggcctcgttttccaagtccatggtgctagatgtgtacagtgactacgtgaacaacttcaccagtgccatgtccatcatcaagaaggcctgcctcaccaagcctgccttcctcgagttcctcaagcgacggcaggtgtgcagcccagaccgtgtcaccctctacgggctgatggtcaagcccatccagaggttcccacagttcatactcctgcttcaggacatgctgaagaacacccccaggggccatccggacaggctgtcgctgcagctggccctcacagagctggagacgctggctgagaagctgaacgagcagaagcggctggctgaccaggtggctgagatccagcagctgaccaagagcgtcagtgaccgcagcagcctcaacaagctgttgacctcaggccagcggcagctgctcctgtgtgagacgttgacggagaccgtgtacggtgaccgcgggcagctaattaagtccaaggagcgtcgggtcttcctgctcaacgacatgcttgtctgtgccaacatcaacttcaagggccagctggagatcagcagcctggtgcccctggggcccaagtatgtggtgaagtggaacacggcgctgccccaggtgcaggtggtggaggtgggccaggacggtggcacctatgacaaggacaatgtgctcatccagcactcaggcgccaagaaggcctctgcctcagggcaggctcagaataaggtgtacctcggccccccacgcctcttccaggagctgcaggacctgcagaaggacctggccgtggtggagcagatcacgcttctcatcagcacgctgcacggcacctaccagaacctgaacatgactgtggctcaagactggtgcctggccctgcagaggctgatgcgggtgaaggaggaagagatccactcggccaacaagtgccgtctcaggctcctgcttcctgggaaacccgacaagtccggccgccccattagcttcatggtggttttcatcacccccaaccccctgagcaagatttcctgggtcaacaggttacatttggccaaaatcggactccgggaggagaaccagccaggctggctatgcccggatgaggacaagaagagcaaagccccattctggtgcccgatcctggcctgctgcatccctgccttctcctcccgggcactcagcctgcagcttggggccctggtccacagtcctgtcaactgtcccctgctgggtttctcagcagtcagcacctcccttccacagggctacctctgggtcgggggcggacaggaaggcgcagggggccaggtggaaatcttttccttgaaccggccctcgccccgcaccgtcaagtccttcccactggcagcccctgtgctctgcatggagtatatcccggagctggaggaggaggcggagagcagagacgagagcccgacagttgctgacccctcggccacggtgcatccaaccatctgcctcgggctccaggatggcagcatcctcctctacagcagtgtggacactggcacccagtgcctggtgagctgcaggagcccaggtctgcagcctgtgctctgcctgcgacacagccccttccacctgctcgctggcctgcaggatgggacccttgctgcttaccctcggaccagcggaggtgtcctgtgggacctggagagccctcccgtgtgcctgactgtggggcccgggcctgtccgcaccctgttgagcctggaggatgccgtgtgggccagctgtgggccctgggtcactgtcctggaagccaccaccctgcagcctcagcaaagcttcgaggcgcaccaggacgaggcagtgagcgtgacacacatggtgaaggcgggcagcggcgtctggatggccttctcctccggcacctccatccgcctcttccacactgagaccctggagcatctgcaagagatcaacatcgccaccaggaccaccttcctcctgccaggccagaagcacttgtgtgtcaccagcctcctgatctgccagggtctgctctgggtgggcactgaccagggtgtcatcgtcctgctgcccgtgcctcggctggaaggcatccccaagatcacagggaaaggcatggtctcactcaacgggcactgtgggcctgtggccttcctggctgtggctaccagcatcctggcccctgacatcctgcggagtgaccaggaggaggctgaggggccccgggctgaggaggacaagccagacgggcaggcacacgagcccatgcccgatagccacgtgggccgagagctgacccgcaagaagggcatcctcttgcagtaccgcctgcgctccaccgcacacctcccgggcccgctgctctccatgcgggagccggcgcctgctgatggcgcagctttggagcacagcgaggaggacggctccatttacgagatggccgacgaccccgacatctgggtgcgcagccggccctgcgcccgcgacgcccaccgcaaggagatttgctctgtggccatcatctccggcgggcagggctaccgcaactttggcagcgctctgggcagcagtgggaggcaggccccgtgtggggagacggacagcaccctcctcatctggcaggtgcccttgatgctatagcgcctcccctctcccctcagagggcacagctgcaggcctgaccaaggccacgcccggctctcgtgctctaggacctgcacgggacttgtggatgggcctggactctccagaaactacttgggcagagcaaaggaaaacctcttgttttaaaaaaatttttttcagagtgttttggggaggagttttagggcttggggagagggaggacacatctggaggaaatggccttctttttaaaagcaaaaaacacaaaacctcacaactgcctggcaagcccagtatcacttgtttgggccctagcgggactccaaggcagccacacgcccctcctggaagggtgtgtgcgtgtgagtgtgtgcgagtgtgtgggctggtgtgtgaatatctataaataagtatatatggtgtatattatatgtgtataaataaagtctgtacatattggagctctgggagatgctggaataaaagacaagagttacatctgg

SEQ ID NO: 26344 - DNA, 4035 bp, Homo sapiens
  source 1..4035: mol_type = unassigned DNA
gtgtgtagctgggacggtgctggtctgagctggaccttgtctgatggcttcctccaaccctcctccacagcctgccataggagatcagctggttccaggagtcccaggcccctcctctgaggcagaggacgacccaggagaggcgtttgagtttgatgacagtgatgatgaagaggacaccagcgcagccctgggcgtccccagccttgctcctgagagggacacagaccccccactgatccacttggactccatccctgtcactgacccagacccagcagctgctccacccggcacaggggtgccagcctgggtgagcaatggggatgcagcggacgcagccttctccggggcccggcactccagctggaagcggaagagttcccgtcgcattgaccggttcactttccccgccctggaagaggatgtgatttatgacgacgtcccctgcgagagcccagatgcgcatcagcccggggcagagaggaacctgctctacgaggatgcgcaccgggctggggcccctcggcaggcggaggacctaggctggagctccagtgagttcgagagctacagcgaggactcgggggaggaggccaagccggaggtcgaggtcgagcccgccaagcaccgagtgtccttccagcccaagatgacccagctcatgaaggccgccaagagcgggaccaaggatgggctggagaagacacggatggccgtgatgcgcaaagtctccttcctgcacaggaaggacgtcctcggtgactcggaggaggaggacatggggctcctggaggtcagcgtttcggacatcaagcccccagccccagagctgggccccatgccagagggcctgagccctcagcaggtggtccggaggcatatcctgggctccatcgtgcagagcgaaggcagctacgtggagtctctgaagcggatactccaggactaccgcaaccccctgatggagatggagcccaaggcgctgagcgcccgcaagtgccaggtggtgttcttccgcgtgaaggagatcctgcactgccactccatgttccagatcgccctgtcctcccgcgtggctgagtgggattccaccgagaagatcggggacctcttcgtggcctcgttttccaagtccatggtgctagatgtgtacagtgactacgtgaacaacttcaccagtgccatgtccatcatcaagaaggcctgcctcaccaagcctgccttcctcgagttcctcaagcgacggcaggtgtgcagcccagaccgtgtcaccctctacgggctgatggtcaagcccatccagaggttcccacagttcatactcctgcttcaggacatgctgaagaacacccccaggggccatccggacaggctgtcgctgcagctggccctcacagagctggagacgctggctgagaagctgaacgagcagaagcggctggctgaccaggtggctgagatccagcagctgaccaagagcgtcagtgaccgcagcagcctcaacaagctgttgacctcaggccagcggcagctgctcctgtgtgagacgttgacggagaccgtgtacggtgaccgcgggcagctaattaagtccaaggagcgtcgggtcttcctgctcaacgacatgcttgtctgtgccaacatcaacttcaagcctgccaaccacaggggccagctggagatcagcagcctggtgcccctggggcccaagtatgtggtgaagtggaacacggcgctgccccaggtgcaggtggtggaggtgggccaggacggtggcacctatgacaaggacaatgtgctcatccagcactcaggcgccaagaaggcctctgcctcagggcaggctcagaataaggtgtacctcggccccccacgcctcttccaggagctgcaggacctgcagaaggacctggccgtggtggagcagatcacgcttctcatcagcacgctgcacggcacctaccagaacctgaacatgactgtggctcaagactggtgcctggccctgcagaggctgatgcgggtgaaggaggaagagatccactcggccaacaagtgccgtctcaggctcctgcttcctgggaaacccgacaagtccggccgccccattagcttcatggtggttttcatcacccccaaccccctgagcaagatttcctgggtcaacaggttacatttggccaaaatcggactccgggaggagaaccagccaggctggctatgcccggatgaggacaagaagagcaaagccccattctggtgcccgatcctggcctgctgcatccctgccttctcctcccgggcactcagcctgcagcttggggccctggtccacagtcctgtcaactgtcccctgctgggtttctcagcagtcagcacctcccttccacagggctacctctgggtcgggggcggacaggaaggcgcagggggccaggtggaaatcttttccttgaaccggccctcgccccgcaccgtcaagtccttcccactggcagcccctgtgctctgcatggagtatatcccggagctggaggaggaggcggagagcagagacgagagcccgacagttgctgacccctcggccacggtgcatccaaccatctgcctcgggctccaggatggcagcatcctcctctacagcagtgtggacactggcacccagtgcctggtgagctgcaggagcccaggtctgcagcctgtgctctgcctgcgacacagccccttccacctgctcgctggcctgcaggatgggacccttgctgcttaccctcggaccagcggaggtgtcctgtgggacctggagagccctcccgtgtgcctgactgtggggcccgggcctgtccgcaccctgttgagcctggaggatgccgtgtgggccagctgtgggccctgggtcactgtcctggaagccaccaccctgcagcctcagcaaagcttcgaggcgcaccaggacgaggcagtgagcgtgacacacatggtgaaggcgggcagcggcgtctggatggccttctcctccggcacctccatccgcctcttccacactgagaccctggagcatctgcaagagatcaacatcgccaccaggaccaccttcctcctgccaggccagaagcacttgtgtgtcaccagcctcctgatctgccagggtctgctctgggtgggcactgaccagggtgtcatcgtcctgctgcccgtgcctcggctggaaggcatccccaagatcacagggaaaggcatggtctcactcaacgggcactgtgggcctgtggccttcctggctgtggctaccagcatcctggcccctgacatcctgcggagtgaccaggaggaggctgaggggccccgggctgaggaggacaagccagacgggcaggcacacgagcccatgcccgatagccacgtgggccgagagctgacccgcaagaagggcatcctcttgcagtaccgcctgcgctccaccgcacacctcccgggcccgctgctctccatgcgggagccggcgcctgctgatggcgcagctttggagcacagcgaggaggacggctccatttacgagatggccgacgaccccgacatctgggtgcgcagccggccctgcgcccgcgacgcccaccgcaaggagatttgctctgtggccatcatctccggcgggcagggctaccgcaactttggcagcgctctgggcagcagtgggaggcaggccccgtgtggggagacggacagcaccctcctcatctggcaggtgcccttgatgctatagcgcctcccctctcccctcagagggcacagctgcaggcctgaccaaggccacgcccggctctcgtgctctaggacctgcacgggacttgtggatgggcctggactctccagaaactacttgggcagagcaaaggaaaacctcttgttttaaaaaaatttttttcagagtgttttggggaggagttttagggcttggggagagggaggacacatctggaggaaatggccttctttttaaaagcaaaaaacacaaaacctcacaactgcctg

SEQ ID NO: 26345 - DNA, 2007 bp, Homo sapiens
  source 1..2007: mol_type = unassigned DNA
acaggctctctgtctgctcttcttttgcagacccagacccagcagctgctccacccggcacaggggtgccagcctgggtgagcaatggggatgcagcggacgcagccttctccggggcccggcactccagctggaagcggaagagttcccgtcgcattgaccggttcactttccccgccctggaagaggatgtgatttatgacgacgtcccctgcgagagcccagatgcgcatcagcccggggcagagaggaacctgctctacgaggatgcgcaccgggctggggcccctcggcaggcggaggacctaggctggagctccagtgagttcgagagctacagcgaggactcgggggaggaggccaagccggaggtcgaggtcgagcccgccaagcaccgagtgtccttccagcccaagatgacccagctcatgaaggccgccaagagcgggaccaaggatgggctggagaagacacggatggccgtgatgcgcaaagtctccttcctgcacaggaaggacgtcctcggtgactcggaggaggaggacatggggctcctggaggtcagcgtttcggacatcaagcccccagccccagagctgggccccatgccagagggcctgagccctcagcaggtggtccggaggcatatcctgggctccatcgtgcagagcgaaggcagctacgtggagtctctgaagcggatactccaggactaccgcaaccccctgatggagatggagcccaaggcgctgagcgcccgcaagtgccaggtggtgttcttccgcgtgaaggagatcctgcactgccactccatgttccagatcgccctgtcctcccgcgtggctgagtgggattccaccgagaagatcggggacctcttcgtggcctcgttttccaagtccatggtgctagatgtgtacagtgactacgtgaacaacttcaccagtgccatgtccatcatcaagaaggcctgcctcaccaagcctgccttcctcgagttcctcaagcgacggcaggtgtgcagcccagaccgtgtcaccctctacgggctgatggtcaagcccatccagaggttcccacagttcatactcctgcttcaggacatgctgaagaacacccccaggggccatccggacaggctgtcgctgcagctggccctcacagagctggagacgctggctgagaagctgaacgagcagaagcggctggctgaccaggtggctgagatccagcagctgaccaagagcgtcagtgaccgcagcagcctcaacaagctgttgacctcaggccagcggcagctgctcctgtgtgagacgttgacggagaccgtgtacggtgaccgcgggcagctaattaagtccaaggagcgtcgggtcttcctgctcaacgacatgcttgtctgtgccaacatcaacttcaagcctgccaaccacaggggccagctggagatcagcagcctggtgcccctggggcccaagtatgtggtgaagtggaacacggcgctgccccaggtgcaggtggtggaggtgggccaggacggtggcacctatgacaaggacaatgtgctcatccagcactcaggcgccaagaaggcctctgcctcagggcaggctcagaataaggtgtacctcggccccccacgcctcttccaggagctgcaggacctgcagaaggacctggccgtggtggagcagatcacgcttctcatcagcacgctgcacggcacctaccagaacctgaacatgactgtggctcaagactggtgcctggccctgcagaggctgatgcgggtgaaggaggaagagatccactcggccaacaagtgccgtctcaggctcctgcttcctgggaaacccgacaaaggcacgtggtcagacatgtaaggtgtctaagacctgtggacagctgaccgctgaccaggtggagtcacagcctgcagaggctctgccgggcacaaagccagaggctcctggagccaggctggggagcgtggctcagccaccctgg

SEQ ID NO: 26346 - DNA, 3363 bp, Homo sapiens
  source 1..3363: mol_type = unassigned DNA
gcgccgtcccggccatgggcgcccgcggcggcctgcggagctggaggcgcggcgccggccgccaggcgcctttgtgagcggcgcggacgacaaaggcgcgggcccgggcagccgaggtgtgtagctgggacggtgctggtctgagctggaccttgtctgatggcttcctccaaccctcctccacagcctgccataggagatcagctggttccaggagtcccaggcccctcctctgaggcagaggacgacccaggagaggcgtttgagtttgatgacagtgatgatgaagaggacaccagcgcagccctgggcgtccccagccttgctcctgagagggacacagaccccccactgatccacttggactccatccctgtcactgacccagacccagcagctgctccacccggcacaggggtgccagcctgggtgagcaatggggatgcagcggacgcagccttctccggggcccggcactccagctggaagcggaagagttcccgtcgcattgaccggttcactttccccgccctggaagaggatgtgatttatgacgacgtcccctgcgagagcccagatgcgcatcagcccggggcagagaggaacctgctctacgaggatgcgcaccgggctggggcccctcggcaggcggaggacctaggctggagctccagtgagttcgagagctacagcgaggactcgggggaggaggccaagccggaggtcgaggtcgagcccgccaagcaccgagtgtccttccagcccaagctttctccagacctgactaggctaaaggagagatacgccaggactaagagagacatcttggctttgagagttggggggagagacatgcaggagctgaagcacaagtacgattgtaagatgacccagctcatgaaggccgccaagagcgggaccaaggatgggctggagaagacacggatggccgtgatgcgcaaagtctccttcctgcacaggaaggacgtcctcggtgactcggaggaggaggacatggggctcctggaggtcagcgtttcggacatcaagcccccagccccagagctgggccccatgccagagggcctgagccctcagcaggtggtccggaggcatatcctgggctccatcgtgcagagcgaaggcagctacgtggagtctctgaagcggatactccaggactaccgcaaccccctgatggagatggagcccaaggcgctgagcgcccgcaagtgccaggtggtgttcttccgcgtgaaggagatcctgcactgccactccatgttccagatcgccctgtcctcccgcgtggctgagtgggattccaccgagaagatcggggacctcttcgtggcctcgttttccaagtccatggtgctagatgtgtacagtgactacgtgaacaacttcaccagtgccatgtccatcatcaagaaggcctgcctcaccaagcctgccttcctcgagttcctcaagcgacggcaggtgtgcagcccagaccgtgtcaccctctacgggctgatggtcaagcccatccagaggttcccacagttcatactcctgcttcaggacatgctgaagaacacccccaggggccatccggacaggctgtcgctgcagctggccctcacagagctggagacgctggctgagaagctgaacgagcagaagcggctggctgaccaggtggctgagatccagcagctgaccaagagcgtcagtgaccgcagcagcctcaacaagctgttgacctcaggccagcggcagctgctcctgtgtgagacgttgacggagaccgtgtacggtgaccgcgggcagctaattaagtccaaggagcgtcgggtcttcctgctcaacgacatgcttgtctgtgccaacatcaacttcaagggccagctggagatcagcagcctggtgcccctggggcccaagtatgtggtgaagtggaacacggcgctgccccaggtgcaggtggtggaggtgggccaggacggtggcacctatgacaaggacaatgtgctcatccagcactcaggcgccaagaaggcctctgcctcagggcaggctcagaataaggtgtacctcggccccccacgcctcttccaggagctgcaggacctgcagaaggacctggccgtggtggagcagatcacgcttctcatcagcacgctgcacggcacctaccagaacctgaacatgactgtggctcaagactggtgcctggccctgcagaggctgatgcgggtgaaggaggaagagatccactcggccaacaagtgccgtctcaggctcctgcttcctgggaaacccgacaagtccggccgccccattagcttcatggtggttttcatcacccccaaccccctgagcaagatttcctgggtcaacaggttacatttggccaaaatcggactccgggaggagaaccagccaggctggctatgcccggatgaggacaagaagagcaaagccccattctggtgcccgatcctggcctgctgcatccctgccttctcctcccgggcactcagcctgcagcttggggccctggtccacagtcctgtcaactgtcccctgctgggtttctcagcagtcagcacctcccttccacagggctacctctgggtcgggggcggacaggaaggcgcagggggccaggtggaaatcttttccttgaaccggccctcgccccgcaccgtcaagtccttcccactggcagcccctgtgctctgcatggagtatatcccggagctggaggaggaggcggagagcagagacgagagcccgacagttgctgacccctcggccacggtgcatccaaccatctgcctcgggctccaggatggcagcatcctcctctacagcagtgtggacactggcacccagtgcctggtgagctgcaggagcccaggtctgcagcctgtgctctgcctgcgacacagccccttccacctgctcgctggcctgcaggatgggacccttgctgcttaccctcggaccagcggaggtgtcctgtgggacctggagagccctcccgtgtgcctgactgtggggcccgggcctgtccgcaccctgttgagcctggaggatgccgtgtgggccagctgtgggccctgggtcactgtcctggaagccaccaccctgcagcctcagcaaagcttcgaggcgcaccaggacgaggcagtgagcgtgacacacatggtgaaggcgggcagcggcgtctggatggccttctcctccggcacctccatccgcctcttccacactgagaccctggagcatctgcaagagatcaacatcgccaccaggaccaccttcctcctgccagacaggtcattaataaaatgttctccaagagcctga

SEQ ID NO: 26347 - DNA, 4376 bp, Homo sapiens
  source 1..4376: mol_type = unassigned DNA
gcgccgtcccggccatgggcgcccgcggcggcctgcggagctggaggcgcggcgccggccgccaggcgcctttgtgagcggcgcggacgacaaaggcgcgggcccgggcagccgaggtgtgtagctgggacggtgctggtctgagctggaccttgtctgatggcttcctccaaccctcctccacagcctgccataggagatcagctggttccaggagtcccaggcccctcctctgaggcagaggacgacccaggagaggcgtttgagtttgatgacagtgatgatgaagaggacaccagcgcagccctgggcgtccccagccttgctcctgagagggacacagaccccccactgatccacttggactccatccctgtcactgacccagacccagcagctgctccacccggcacaggggtgccagcctgggtgagcaatggggatgcagcggacgcagccttctccggggcccggcactccagctggaagcggaagagttcccgtcgcattgaccggttcactttccccgccctggaagaggatgtgatttatgacgacgtcccctgcgagagcccagatgcgcatcagcccggggcagagaggaacctgctctacgaggatgcgcaccgggctggggcccctcggcaggcggaggacctaggctggagctccagtgagttcgagagctacagcgaggactcgggggaggaggccaagccggaggtcgaggtcgagcccgccaagcaccgagtgtccttccagcccaagatgacccagctcatgaaggccgccaagagcgggaccaaggatgggctggagaagacacggatggccgtgatgcgcaaagtctccttcctgcacaggaaggacgtcctcggtgactcggaggaggaggacatggggctcctggaggtcagcgtttcggacatcaagcccccagccccagagctgggccccatgccagagggcctgagccctcagcaggtggtccggaggcatatcctgggctccatcgtgcagagcgaaggcagctacgtggagtctctgaagcggatactccaggactaccgcaaccccctgatggagatggagcccaaggcgctgagcgcccgcaagtgccaggtggtgttcttccgcgtgaaggagatcctgcactgccactccatgttccagatcgccctgtcctcccgcgtggctgagtgggattccaccgagaagatcggggacctcttcgtggcctcgttttccaagtccatggtgctagatgtgtacagtgactacgtgaacaacttcaccagtgccatgtccatcatcaagaaggcctgcctcaccaagcctgccttcctcgagttcctcaagcgacggcaggtgtgcagcccagaccgtgtcaccctctacgggctgatggtcaagcccatccagaggttcccacagttcatactcctgcttcaggacatgctgaagaacacccccaggggccatccggacaggctgtcgctgcagctggccctcacagagctggagacgctggctgagaagctgaacgagcagaagcggctggctgaccaggtggctgagatccagcagctgaccaagagcgtcagtgaccgcagcagcctcaacaagctgttgacctcaggccagcggcagctgctcctgtgtgagacgttgacggagaccgtgtacggtgaccgcgggcagctaattaagtccaaggagcgtcgggtcttcctgctcaacgacatgcttgtctgtgccaacatcaacttcaagcctgccaaccacaggggccagctggagatcagcagcctggtgcccctggggcccaagtatgtggtgaagtggaacacggcgctgccccaggtgcaggtggtggaggtgggccaggacggtggcacctatgacaaggacaatgtgctcatccagcactcaggcgccaagaaggcctctgcctcagggcaggctcagaataaggtgtacctcggccccccacgcctcttccaggagctgcaggacctgcagaaggacctggccgtggtggagcagatcacgcttctcatcagcacgctgcacggcacctaccagaacctgaacatgactgtggctcaagactggtgcctggccctgcagaggctgatgcgggtgaaggaggaagagatccactcggccaacaagtgccgtctcaggctcctgcttcctgggaaacccgacaagtccggccgccccattagcttcatggtggttttcatcacccccaaccccctgagcaagatttcctgggtcaacaggttacatttggccaaaatcggactccgggaggagaaccagccaggctggctatgcccggatgaggacaagaagagcaaagccccattctggtgcccgatcctggcctgctgcatccctgccttctcctcccgggcactcagcctgcagcttggggccctggtccacagtcctgtcaactgtcccctgctgggtttctcagcagtcagcacctcccttccacagggctacctctgggtcgggggcggacaggaaggcgcagggggccaggtggaaatcttttccttgaaccggccctcgccccgcaccgtcaagtccttcccactggcagcccctgtgctctgcatggagtatatcccggagctggaggaggaggcggagagcagagacgagagcccgacagttgctgacccctcggccacggtgcatccaaccatctgcctcgggctccaggatggcagcatcctcctctacagcagtgtggacactggcacccagtgcctggtgagctgcaggagcccaggtctgcagcctgtgctctgcctgcgacacagccccttccacctgctcgctggcctgcaggatgggacccttgctgcttaccctcggaccagcggaggtgtcctgtgggacctggagagccctcccgtgtgcctgactgtggggcccgggcctgtccgcaccctgttgagcctggaggatgccgtgtgggccagctgtgggccctgggtcactgtcctggaagccaccaccctgcagcctcagcaaagcttcgaggcgcaccaggacgaggcagtgagcgtgacacacatggtgaaggcgggcagcggcgtctggatggccttctcctccggcacctccatccgcctcttccacactgagaccctggagcatctgcaagagatcaacatcgccaccaggaccaccttcctcctgccaggccagaagcacttgtgtgtcaccagcctcctgatctgccagggtctgctctgggtgggcactgaccagggtgtcatcgtcctgctgcccgtgcctcggctggaaggcatccccaagatcacagggaaaggcatggtctcactcaacgggcactgtgggcctgtggccttcctggctgtggctaccagcatcctggcccctgacatcctgcggagtgaccaggaggaggctgaggggccccgggctgaggaggacaagccagacgggcaggcacacgagcccatgcccgatagccacgtgggccgagagctgacccgcaagaagggcatcctcttgcagtaccgcctgcgctccaccgcacacctcccgggcccgctgctctccatgcgggagccggcgcctgctgatggcgcagctttggagcacagcgaggaggacggctccatttacgagatggccgacgaccccgacatctgggtgcgcagccggccctgcgcccgcgacgcccaccgcaaggagatttgctctgtggccatcatctccggcgggcagggctaccgcaactttggcagcgctctgggcagcagtgggaggcaggccccgtgtggggagacggacagcaccctcctcatctggcaggtgcccttgatgctatagcgcctcccctctcccctcagagggcacagctgcaggcctgaccaaggccacgcccggctctcgtgctctaggacctgcacgggacttgtggatgggcctggactctccagaaactacttgggcagagcaaaggaaaacctcttgttttaaaaaaatttttttcagagtgttttggggaggagttttagggcttggggagagggaggacacatctggaggaaatggccttctttttaaaagcaaaaaacacaaaacctcacaactgcctggcaagcccagtatcacttgtttgggccctagcgggactccaaggcagccacacgcccctcctggaagggtgtgtgcgtgtgagtgtgtgcgagtgtgtgggctggtgtgtgaatatctataaataagtatatatggtgtatattatatgtgtataaataaagtctgtacatattggagctctgggagatgctggaataaaagacaagagttacatctggacttgg

SEQ ID NO: 26348 - DNA, 3232 bp, Homo sapiens
  source 1..3232: mol_type = unassigned DNA
aagaatgttacccagcagctcgtgggggaagaggaagctgcgaggcaggctggggtgggtgcggagtgatgcccggggcgtgatgtgggcccggcaggagggtctgcaccacccccacccccacgccgtcatccgctgtccctcctcctcctcctcctctgtctcctgctcaggtgactcggaggaggaggacatggggctcctggaggtcagcgtttcggacatcaagcccccagccccagagctgggccccatgccagagggcctgagccctcagcaggtggtccggaggcatatcctgggctccatcgtgcagagcgaaggcagctacgtggagtctctgaagcggatactccaggactaccgcaaccccctgatggagatggagcccaaggcgctgagcgcccgcaagtgccaggtggtgttcttccgcgtgaaggagatcctgcactgccactccatgttccagatcgccctgtcctcccgcgtggctgagtgggattccaccgagaagatcggggacctcttcgtggcctcgttttccaagtccatggtgctagatgtgtacagtgactacgtgaacaacttcaccagtgccatgtccatcatcaagaaggcctgcctcaccaagcctgccttcctcgagttcctcaagcgacggcaggtgtgcagcccagaccgtgtcaccctctacgggctgatggtcaagcccatccagaggttcccacagttcatactcctgcttcaggacatgctgaagaacacccccaggggccatccggacaggctgtcgctgcagctggccctcacagagctggagacgctggctgagaagctgaacgagcagaagcggctggctgaccaggtggctgagatccagcagctgaccaagagcgtcagtgaccgcagcagcctcaacaagctgttgacctcaggccagcggcagctgctcctgtgtgagacgttgacggagaccgtgtacggtgaccgcgggcagctaattaagtccaaggagcgtcgggtcttcctgctcaacgacatgcttgtctgtgccaacatcaacttcaagggccagctggagatcagcagcctggtgcccctggggcccaagtatgtggtgaagtggaacacggcgctgccccaggtgcaggtggtggaggtgggccaggacggtggcacctatgacaaggacaatgtgctcatccagcactcaggcgccaagaaggcctctgcctcagggcaggctcagaataaggtgtacctcggccccccacgcctcttccaggagctgcaggacctgcagaaggacctggccgtggtggagcagatcacgcttctcatcagcacgctgcacggcacctaccagaacctgaacatgactgtggctcaagactggtgcctggccctgcagaggctgatgcgggtgaaggaggaagagatccactcggccaacaagtgccgtctcaggctcctgcttcctgggaaacccgacaagtccggccgccccattagcttcatggtggttttcatcacccccaaccccctgagcaagatttcctgggtcaacaggttacatttggccaaaatcggactccgggaggagaaccagccaggctggctatgcccggatgaggacaagaagagcaaagccccattctggtgcccgatcctggcctgctgcatccctgccttctcctcccgggcactcagcctgcagcttggggccctggtccacagtcctgtcaactgtcccctgctgggtttctcagcagtcagcacctcccttccacagggctacctctgggtcgggggcggacaggaaggcgcagggggccaggtggaaatcttttccttgaaccggccctcgccccgcaccgtcaagtccttcccactggcagcccctgtgctctgcatggagtatatcccggagctggaggaggaggcggagagcagagacgagagcccgacagttgctgacccctcggccacggtgcatccaaccatctgcctcgggctccaggatggcagcatcctcctctacagcagtgtggacactggcacccagtgcctggtgagctgcaggagcccaggtctgcagcctgtgctctgcctgcgacacagccccttccacctgctcgctggcctgcaggatgggacccttgctgcttaccctcggaccagcggaggtgtcctgtgggacctggagagccctcccgtgtgcctgactgtggggcccgggcctgtccgcaccctgttgagcctggaggatgccgtgtgggccagctgtgggccctgggtcactgtcctggaagccaccaccctgcagcctcagcaaagcttcgaggcgcaccaggacgaggcagtgagcgtgacacacatggtgaaggcgggcagcggcgtctggatggccttctcctccggcacctccatccgcctcttccacactgagaccctggagcatctgcaagagatcaacatcgccaccaggaccaccttcctcctgccaggccagaagcacttgtgtgtcaccagcctcctgatctgccagggtctgctctgggtgggcactgaccagggtgtcatcgtcctgctgcccgtgcctcggctggaaggcatccccaagatcacagggaaaggcatggtctcactcaacgggcactgtgggcctgtggccttcctggctgtggctaccagcatcctggcccctgacatcctgcggagtgaccaggaggaggctgaggggccccgggctgaggaggacaagccagacgggcaggcacacgagcccatgcccgatagccacgtgggccgagagctgacccgcaagaagggcatcctcttgcagtaccgcctgcgctccaccgcacacctcccgggcccgctgctctccatgcgggagccggcgcctgctgatggcgcagctttggagcacagcgaggaggacggctccatttacgaaatggccttctttttaaaagcaaaaaacacaaaacctcacaactgcctggcaagcccagtatcacttgtttgggccctagcgggactccaaggcagccacacgcccctcctggaagggtgtgtgcgtgtgagtgtgtgcgagtgtgtgggctggtgtgtgaatatctataaataagtatatatggtgtatattatatgtgtataaataaagtctgtacatattggagctctgggagatgctggaataaaagacaagagttacatctggacttgg

SEQ ID NO: 26349 - DNA, 9444 bp, Homo sapiens
  source 1..9444: mol_type = unassigned DNA
ggccccaatgagtggcacacagtctactatcaccgacaggtttcccctcaaaaaacctataaggcatggaagtattttgaaccgagagtcaccaacagataagaagcagaaagttgagcgcattgcatcacatgattttgaccccacaggtcttgttcagcgttgcgtaatcatccagaaagatgacaatggatttgggctgacggtcagtggagacaatccagtcttcgtacagtctgtcaaagaagatggagcagccatgcgggctggagtacagacaggtgatcgaatcatcaaggtgaatggaactctggtgactcattcaaatcatctggaggtggtgaagctaatcaaatctggttcctatgtagctctcactgttcagggacgcccacctgggtcgccccagattccacttgccgactctgaagtagagccgtcagtcattggacatatgtctcccatcatgacatctcctcattcacctggagcatctgggaatatggagagaatcactagtcctgtgctcatgggggaggaaaacaatgtggttcataaccagaaagtagaaattctgagaaaaatgttacagaaagaacaggaacggctacagttattgcaggaagattacaaccgaacacctgcccaaagattgctaaaagagatccaagaggccaagaaacacattcctcagctgcaagagcagttatccaaagccacaggctctgctcaggatggagctgtagttacaccctccagacctttaggggacaccctaacagtcagtgaggcagaaacagatcctggagatgtactgggcaggactgactgtagcagtggagatgcttctcggcccagtagtgacaatgcagatagtcccaagagtggcccaaaagagagaatttatctagaggaaaacccagagaaaagtgaaacaattcaggacactgacactcaatcacttgtcggaagtccctcaacccgtatagcacctcatattattggagcagaagatgatgattttggtactgaacatgaacagatcaatggacagtgcagctgtttccagagcattgaattactaaaatctcgcccggctcatttggctgttttcttacaccatgtagtttcacaatttgaccctgcgactttgctctgttatctctattcagacctgtataaacataccaattccaaagaaactcgtcgcatcttccttgagtttcatcagttctttctagatcgatcagcacacctgaaagtttctgttcctgatgaaatgtctgcagatctagaaaagagaagacctgagctcattcctgaggatctgcatcgccactatatccaaactatgcaagaaagagtccatccagaagttcaaaggcacttagaagattttcggcagaaacgtagtatgggactgaccttggctgaaagcgagctgactaaacttgatgcagagcgagacaaggaccgattgactttggagaaggagcggacatgtgcagaacagattgttgccaaaattgaagaagtattgatgactgctcaggctgtagaggaagataagagctccaccatgcagtatgttattctcatgtatatgaagcatttgggagtaaaagtgaaagagcctcgaaatttggagcacaaacggggtcggattggatttcttcccaaaatcaagcaaagtatgaagaaagataaagaaggggaagaaaaagggaagcgaagaggattccccagcatcctgggacccccacggagaccaagccgtcatgacaacagtgcaattggcagagccatggaactacagaaggcgcgccaccctaagcacttatccacaccctcatctgtgagtcctgaacctcaggactctgccaagttgcgccagagtgggttagcaaatgaaggaacagacgctggatacctgcctgccaattccatgtcttctgtagcttcaggggcctctttttcccaggaaggagggaaagagaatgatacaggatcaaagcaagttggagaaacatcagcacctggagacaccttagatggcacacctcgtactctcaatactgtctttgatttcccaccacctccattagaccaagtgcaggaggaggaatgtgaagtagaaagggtgactgaacatgggacaccaaagccctttcgaaagtttgacagtgtagcttttggagaaagtcaaagtgaggatgaacaatttgaaaatgacttagagacagatccacccaactggcagcagcttgttagtcgagaagtgttactgggactaaaaccttgtgaaatcaaaagacaggaagtgattaatgaattgttctacactgaaagagctcatgttcgaacactgaaggttcttgatcaagtgttctatcagcgagtatccagagaaggaattctgtcaccctcagagctacggaaaattttttcaaacttggaagatattcttcaacttcatattggattgaatgaacaaatgaaggctgttcgaaagagaaatgagacctctgttatcgatcagattggggaagatttgctgacatggttcagcggaccaggagaggagaaattgaaacatgctgctgctaccttttgcagtaaccaacctttcgccctggaaatgatcaaatctcgtcagaaaaaggattctcgatttcagacttttgtgcaagatgctgaaagtaatccactgtgtcgtcgtcttcaactgaaggatattattcccactcaaatgcaaaggcttactaagtacccacttctgttggataatattgccaaatacacagaatggccaacagaaagggagaaggtgaagaaagctgcagatcactgtcgtcagatcttaaattatgtaaatcaggctgtcaaggaggcagaaaacaagcagcgcctagaagattatcagcgtcgccttgatacctccagcctgaagttgtcagagtacccaaatgttgaagagctcaggaatttggatttaacaaaaaggaagatgattcatgaagggccattggtttggaaggtgaatagagataaaactattgatttatacacgttgctgctggaagacattcttgtattgttacaaaagcaggatgatagactggttttaaggtgtcatagtaagattctggcatctacagctgatagcaaacacacgtttagccctgtcattaagttgagtacagtgttggttcgacaagtggcaacagataacaaagctttattcgtcatttccatgtcagacaatggcgctcagatttatgaactggtggcacagacagtttctgaaaagactgtctggcaggacctaatctgtcggatggctgcatcagtgaaggagcaatccacaaagccaattccattaccacagtcaacacctggcgaaggagataatgatgaagaagatccttcaaaattaaaagaggagcagcatggcatttcagtcactggtttgcagagtccagacagagatttgggattagaatctaccttaatatcgtcaaaacctcagtctcattcactgagtacctctgggaaatcagaggtacgtgatctgtttgtggctgagagacagtttgcaaaggaacaacatacagatgggacactaaaggaagttggagaagattatcaaatcgcaatcccagattcacacctgcctgtctcagaagaacggtgggcattggatgcactaagaaatttgggtttgttgaagcagttgctggtgcaacagctaggtttgactgagaagagcgttcaggaagactggcaacatttcccaagatacagaacagcctctcaggggccgcagacagacagtgtcatccagaactctgaaaatattaaggcctatcattctggtgaaggacatatgccctttagaactggaactggtgacattgcaacttgttacagtccacggacttcaactgaatcttttgctccacgggattcagtgggactggcaccccaggatagccaggcaagtaacattttagtaatggaccacatgattatgaccccagagatgcctaccatggagccagaagggggtcttgatgacagtggagagcacttttttgatgcccgtgaagcacatagtgatgagaatccatcagaaggtgatggagcagttaacaaggaagagaaggatgttaatttacgcatctcaggaaactatttgatccttgatggctatgacccagtgcaggagagttccacagatgaggaggttgcttcctcacttaccctgcagcccatgacaggcatccctgctgtggaatccacccaccagcagcaacattctcctcagaatactcactccgatggggcaatttcaccattcacccccgaatttctggtccagcagcgctggggagctatggagtattcctgttttgagatccagagtccctcctcttgtgcagattcacagagccagatcatggagtacattcataagatagaggctgaccttgaacacttaaagaaggtggaggaaagttacaccattctttgccaaaggctggctggatcagccctcacagacaagcactcagataaaagttagagccgcatgtcctggaggtgactgcaggttgttggatttggagtatcggccgtgtctcaccacatcctggctccagtgtggatgcagagagagtgtgacagaggatctgcctgtgaaccacctgggattagtcaagtcccaaggtgcccagagtgggactagttcttcacagtgtggcagctgcactaatctgtttgtgagggaatatccattccctcactctactctcctcactatcggaaattcattttgattcagaataaaaaccaaatgtatagagctttgggtgtaggatatgaaattgtacttagatttaagaaaaagagaaaatcagatgtatttatttgacttcattccgtatttgaaagcacattttaatttttatttgccttgttttgttttaattgagtagtgagagttttagacctttgtctttagtacacccaaggatcaactgctcctgaagcaaagaggtcaggatggagtatgcagaagttgggtagagaggttaagaagaggaggaagtgagacggggaagggaggagcaccttgcttcactatacagtattccaagctctctgctgtccagtaggctgcttctctgagggtcacctcaaaggtatgctatgccgtgtggctcttatgtgcccaggtggtgtggtcagagagtggatgggcttcctcccgccctgaggcaagcacctcttctctgtagctgggatcaaccacaattaataggaatcctcaacatactaaatagcaggcacttgaaaatgggtgtgttttcttccattgtcgtcttttctattgagggttgggatttgggtgggagaggaaagcaaattttattttcttgactataaatttgttattcttggtatcatttcatttttataattatacattagacattggcacttgtgtaaaactgtccctgcagattgagcaggaagtaaaaacaaatggaaatgcttcggatagtggcaggggtgggggttgctaaggaaagggtgggatgggagtgggtaaagagtttgggaaggttatctaactgaatcactactgagttgaatcatggctatcattagccacaggtactgctgattataaggccagtaaaattttagtacctggaggtttgactctaatttttgcactgatggtgccaaagggccctgagtcaaaaggatagccaagggtggagtggaaaaagatatggtgaaggcagaactgctcacaccagctccagaagcacgtcctctgacttcactgccgcagctctttccacacggggccgtgattgaccctaaaaattgcagaccagcacatacactggacactgcaggcaaggtgttggtaactgcctgctctaggatgaatagtagcgttagcagcaccctacagagggtaagtttcagaattgtaatttgagaactccttcaattatattgactttctttggttttccttgtgcattaggtatatattttttgaagtatttttgccaactaaaatgaagtctgtaaattctgttaataaacaaggagttcatccgttgctcacatctttcattggtgccctctgaactctgtgggttgctaggatgtaattttaatgcttccctgcagtccaaagatgattttttcaccacaaatggtaagggatgcccacctacttttataaacaccactgcaacttaacaagtttatttatctatgtccagatttctgtttctgtcctaaattgatctgtgtttttaggtggatcaacttggatctttagacctcatctataaattgaaattatatttttagtcataagccaagtacaatctaactcagaatgggattaaaaattttagaagcagaagctaatatataaatgaagtttgggatttggaactttctgtatctcttaggaggaacaagtaaaaaccaaatggttacattgtgctgctagaaataatgtcattctcaattaaaagggttacacctgtagccacttgacactaacaccatcgagggcaattaatcaggagaaaagtaaatataaaaactttgctcttaacgtcacacactacagggtaattatgtaattctctagcactcaattaagaagcttgtaggttagcaaaatttcagtttctctagttcagccagtgtcttgtccttagtaattatttgctttccctgcagttcaatttctccttggaactctaacaggactaactggaaaaatactttgaccatagctctagtacttccaaataaattcatatctagattttcaaacaaagccccaagatgaagtctaattctgaaaatatctcacaatttttgaatgttctttttatcttaccgacctaacttctcttttccctcccaacttggcctcccacacgttccatttcattttggccattatagtcacatccgtttgactttggttgtgacatcttcctttcaggatgatggaattagatgcagtctgtctttgagtgagactggtcaccatcagaggagttttttctaagtgacgtgactagaagttgaaatctacttccctgctaaagggcacaggggtggtgtacaaagaaagctaccttcccagagcaagcaggctgcattttagctatggaagtgacctgctgtgacactgtgctctcttctgtgggcttaatggttcctttgctatgaagtggcaaattacatgtagagtgtctccttccttttcagagaacagttaatcaaggcaaatcagcaagcccccaaagtgctgtaatttaacatcatgattaccaccttcgaagctatatattttgcatactttaaaatcacctaacttggactgcttgaattacattggcttttagaaccgaaattgtaactatgtattgtatttcatgggaggtatattttatgagctttttggctttcttttttcccacagcaactgccaatgaaggatgaatcccctttttaaaaagttgttgttgttgttgtttatttgattttgagttaggagggataatagagaagtccatttaaaaattatttttagaagctaaagaaagtaattatgcttcctgtgaattgtcttttactggcatctttgttttcctctttgatgttagtaaatttggtgtaatacgtggggcttccatatttcaaagtggaagctttcttctctgaagtcgatatatggttttgaattactagagctttggtcagtatttccttccctatatgtcacagagggcaccactgagaactgcgtgcataggacctcaaaatacaaaattagcagggcctcacagtcagcttcctcatggctagtttttcccccttatattacaatttttgttttataagtcatttttttcctgatatttccaccacttttcagagtcatctacaaaatttttctttcctcaagaaaagagttccttttgccttattccttatgccttccccactggtattgagggttttgataataaattggtaggaaaaaaaagtacctcctagaaggaagccttccccaccatttccaggtgccaactgctaagcagatatattccaaaaatggtaactgtcatgtgcacactgttggttatttttaataagcctcttcctactagaacattttattttccttgttcaccatacaatcatgtactctttaacagaaattgcttttaaaaaatatctggaactatctttaaaaaaactttattaataatcatgtatttttactgatcacattttgaaatgcctaaaagactttattgttctaattatccagatgtacctttgtaaaatagctcttttatgaattagctgataaggctgtatgtttctggaacaaaatattggtcatctaaaaactttctgttttctggggtctgggaaaatagaaaataagatttcaaatattaaataagcttaaaggaaccaagcatgtgactttttatttgtattctggttgatttgtcttgtccaagttatattagaaaagttgaggagtcgaggagcctgtaattaattttcctgtcagtgactgtcagacatcttcctgcttattagagcatccctagcaacaaggctaaaccttcatgacagtgctggcaggtgggcttgccctagcatgtggggcaggtttgttgtttttttaatagctttattgagatattcacatatcatataattcatccatttaaagtgtataatcagatgggttttggtatattattgatttttaattgtggtgaaatatatatataacaaaatttgctattgtaactatttttaagtataaagttcagtgaggtaggccagcttttatgacgcacctgaagataactttggttttaatcctaccctaaatgaagcatatgcctctatttttcctgtccccagtgctgggcttcttcacataccaacatttctgtgcttttaccaacagcattttagctcagaaggctcgcttactttgggcatttgctgtattttggttttgaaatacttgtaatttgacttattcttgggataatattttagttttcagtcattcaagggcacatttggctgacggagctaataagcgtaataaaatgcttagtagtttataccatcttttagttaaacattttaaagattaagactattcaaatgtactttgcggaaattaacctgtttgtatgcctggctttgtttacaaacatatatctatatctatatatatagatacagatacagatacatatctggtggaacaaagaaatacctgtaccattcccacttgctctttgatagccacctcctaggaatggagacaataaaactctgtatttgcatgtg

SEQ ID NO: 26350 - DNA, 9660 bp, Homo sapiens
  source 1..9660: mol_type = unassigned DNA
gttgaccccttacagtcggatggtctagatgactgaatggagttttgagttggacttttgtgtccctgacggagttgggcctgatcccagagcactgggggtggggaggaggtgttactgtaaaatgcaagttggataaaaggaggacctctcgccaagggccccaatgagtggcacacagtctactatcaccgacaggtttcccctcaaaaaacctataaggcatggaagtattttgaaccgagagtcaccaacagataagaagcagaaagttgagcgcattgcatcacatgattttgaccccacagatagctcctccaagaagacaaagtctagttcagaggagagtagatccgagatatatggtcttgttcagcgttgcgtaatcatccagaaagatgacaatggatttgggctgacggtcagtggagacaatccagtcttcgtacagtctgtcaaagaagatggagcagccatgcgggctggagtacagacaggtgatcgaatcatcaaggtgaatggaactctggtgactcattcaaatcatctggaggtggtgaagctaatcaaatctggttcctatgtagctctcactgttcagggacgcccacctgggtcgccccagattccacttgccgactctgaagtagagccgtcagtcattggacatatgtctcccatcatgacatctcctcattcacctggagcatctgggaatatggagagaatcactagtcctgtgctcatgggggaggaaaacaatgtggttcataaccagaaagtagaaattctgagaaaaatgttacagaaagaacaggaacggctacagttattgcaggaagattacaaccgaacacctgcccaaagattgctaaaagagatccaagaggccaagaaacacattcctcagctgcaagagcagttatccaaagccacaggctctgctcaggatggagctgtagttacaccctccagacctttaggggacaccctaacagtcagtgaggcagaaacagatcctggagatgtactgggcaggactgactgtagcagtggagatgcttctcggcccagtagtgacaatgcagatagtcccaagagtggcccaaaagagagaatttatctagaggaaaacccagagaaaagtgaaacaattcaggacactgacactcaatcacttgtcggaagtccctcaacccgtatagcacctcatattattggagcagaagatgatgattttggtactgaacatgaacagatcaatggacagtgcagctgtttccagagcattgaattactaaaatctcgcccggctcatttggctgttttcttacaccatgtagtttcacaatttgaccctgcgactttgctctgttatctctattcagacctgtataaacataccaattccaaagaaactcgtcgcatcttccttgagtttcatcagttctttctagatcgatcagcacacctgaaagtttctgttcctgatgaaatgtctgcagatctagaaaagagaagacctgagctcattcctgaggatctgcatcgccactatatccaaactatgcaagaaagagtccatccagaagttcaaaggcacttagaagattttcggcagaaacgtagtatgggactgaccttggctgaaagcgagctgactaaacttgatgcagagcgagacaaggaccgattgactttggagaaggagcggacatgtgcagaacagattgttgccaaaattgaagaagtattgatgactgctcaggctgtagaggaagataagagctccaccatgcagtatgttattctcatgtatatgaagcatttgggagtaaaagtgaaagagcctcgaaatttggagcacaaacggggtcggattggatttcttcccaaaatcaagcaaagtatgaagaaagataaagaaggggaagaaaaagggaagcgaagaggattccccagcatcctgggacccccacggagaccaagccgtcatgacaacagtgcaattggcagagccatggaactacagaaggcgcgccaccctaagcacttatccacaccctcatctgtgagtcctgaacctcaggactctgccaagttgcgccagagtgggttagcaaatgaaggaacagacgctggatacctgcctgccaattccatgtcttctgtagcttcaggggcctctttttcccaggaaggagggaaagagaatgatacaggatcaaagcaagttggagaaacatcagcacctggagacaccttagatggcacacctcgtactctcaatactgtctttgatttcccaccacctccattagaccaagtgcaggaggaggaatgtgaagtagaaagggtgactgaacatgggacaccaaagccctttcgaaagtttgacagtgtagcttttggagaaagtcaaagtgaggatgaacaatttgaaaatgacttagagacagatccacccaactggcagcagcttgttagtcgagaagtgttactgggactaaaaccttgtgaaatcaaaagacaggaagtgattaatgaattgttctacactgaaagagctcatgttcgaacactgaaggttcttgatcaagtgttctatcagcgagtatccagagaaggaattctgtcaccctcagagctacggaaaattttttcaaacttggaagatattcttcaacttcatattggattgaatgaacaaatgaaggctgttcgaaagagaaatgagacctctgttatcgatcagattggggaagatttgctgacatggttcagcggaccaggagaggagaaattgaaacatgctgctgctaccttttgcagtaaccaacctttcgccctggaaatgatcaaatctcgtcagaaaaaggattctcgatttcagacttttgtgcaagatgctgaaagtaatccactgtgtcgtcgtcttcaactgaaggatattattcccactcaaatgcaaaggcttactaagtacccacttctgttggataatattgccaaatacacagaatggccaacagaaagggagaaggtgaagaaagctgcagatcactgtcgtcagatcttaaattatgtaaatcaggctgtcaaggaggcagaaaacaagcagcgcctagaagattatcagcgtcgccttgatacctccagcctgaagttgtcagagtacccaaatgttgaagagctcaggaatttggatttaacaaaaaggaagatgattcatgaagggccattggtttggaaggtgaatagagataaaactattgatttatacacgttgctgctggaagacattcttgtattgttacaaaagcaggatgatagactggttttaaggtgtcatagtaagattctggcatctacagctgatagcaaacacacgtttagccctgtcattaagttgagtacagtgttggttcgacaagtggcaacagataacaaagctttattcgtcatttccatgtcagacaatggcgctcagatttatgaactggtggcacagacagtttctgaaaagactgtctggcaggacctaatctgtcggatggctgcatcagtgaaggagcaatccacaaagccaattccattaccacagtcaacacctggcgaaggagataatgatgaagaagatccttcaaaattaaaagaggagcagcatggcatttcagtcactggtttgcagagtccagacagagatttgggattagaatctaccttaatatcgtcaaaacctcagtctcattcactgagtacctctgggaaatcagaggtacgtgatctgtttgtggctgagagacagtttgcaaaggaacaacatacagatgggacactaaaggaagttggagaagattatcaaatcgcaatcccagattcacacctgcctgtctcagaagaacggtgggcattggatgcactaagaaatttgggtttgttgaagcagttgctggtgcaacagctaggtttgactgagaagagcgttcaggaagactggcaacatttcccaagatacagaacagcctctcaggggccgcagacagacagtgtcatccagaactctgaaaatattaaggcctatcattctggtgaaggacatatgccctttagaactggaactggtgacattgcaacttgttacagtccacggacttcaactgaatcttttgctccacgggattcagtgggactggcaccccaggatagccaggcaagtaacattttagtaatggaccacatgattatgaccccagagatgcctaccatggagccagaagggggtcttgatgacagtggagagcacttttttgatgcccgtgaagcacatagtgatgagaatccatcagaaggtgatggagcagttaacaaggaagagaaggatgttaatttacgcatctcaggaaactatttgatccttgatggctatgacccagtgcaggagagttccacagatgaggaggttgcttcctcacttaccctgcagcccatgacaggcatccctgctgtggaatccacccaccagcagcaacattctcctcagaatactcactccgatggggcaatttcaccattcacccccgaatttctggtccagcagcgctggggagctatggagtattcctgttttgagatccagagtccctcctcttgtgcagattcacagagccagatcatggagtacattcataagatagaggctgaccttgaacacttaaagaaggtggaggaaagttacaccattctttgccaaaggctggctggatcagccctcacagacaagcactcagataaaagttagagccgcatgtcctggaggtgactgcaggttgttggatttggagtatcggccgtgtctcaccacatcctggctccagtgtggatgcagagagagtgtgacagaggatctgcctgtgaaccacctgggattagtcaagtcccaaggtgcccagagtgggactagttcttcacagtgtggcagctgcactaatctgtttgtgagggaatatccattccctcactctactctcctcactatcggaaattcattttgattcagaataaaaaccaaatgtatagagctttgggtgtaggatatgaaattgtacttagatttaagaaaaagagaaaatcagatgtatttatttgacttcattccgtatttgaaagcacattttaatttttatttgccttgttttgttttaattgagtagtgagagttttagacctttgtctttagtacacccaaggatcaactgctcctgaagcaaagaggtcaggatggagtatgcagaagttgggtagagaggttaagaagaggaggaagtgagacggggaagggaggagcaccttgcttcactatacagtattccaagctctctgctgtccagtaggctgcttctctgagggtcacctcaaaggtatgctatgccgtgtggctcttatgtgcccaggtggtgtggtcagagagtggatgggcttcctcccgccctgaggcaagcacctcttctctgtagctgggatcaaccacaattaataggaatcctcaacatactaaatagcaggcacttgaaaatgggtgtgttttcttccattgtcgtcttttctattgagggttgggatttgggtgggagaggaaagcaaattttattttcttgactataaatttgttattcttggtatcatttcatttttataattatacattagacattggcacttgtgtaaaactgtccctgcagattgagcaggaagtaaaaacaaatggaaatgcttcggatagtggcaggggtgggggttgctaaggaaagggtgggatgggagtgggtaaagagtttgggaaggttatctaactgaatcactactgagttgaatcatggctatcattagccacaggtactgctgattataaggccagtaaaattttagtacctggaggtttgactctaatttttgcactgatggtgccaaagggccctgagtcaaaaggatagccaagggtggagtggaaaaagatatggtgaaggcagaactgctcacaccagctccagaagcacgtcctctgacttcactgccgcagctctttccacacggggccgtgattgaccctaaaaattgcagaccagcacatacactggacactgcaggcaaggtgttggtaactgcctgctctaggatgaatagtagcgttagcagcaccctacagagggtaagtttcagaattgtaatttgagaactccttcaattatattgactttctttggttttccttgtgcattaggtatatattttttgaagtatttttgccaactaaaatgaagtctgtaaattctgttaataaacaaggagttcatccgttgctcacatctttcattggtgccctctgaactctgtgggttgctaggatgtaattttaatgcttccctgcagtccaaagatgattttttcaccacaaatggtaagggatgcccacctacttttataaacaccactgcaacttaacaagtttatttatctatgtccagatttctgtttctgtcctaaattgatctgtgtttttaggtggatcaacttggatctttagacctcatctataaattgaaattatatttttagtcataagccaagtacaatctaactcagaatgggattaaaaattttagaagcagaagctaatatataaatgaagtttgggatttggaactttctgtatctcttaggaggaacaagtaaaaaccaaatggttacattgtgctgctagaaataatgtcattctcaattaaaagggttacacctgtagccacttgacactaacaccatcgagggcaattaatcaggagaaaagtaaatataaaaactttgctcttaacgtcacacactacagggtaattatgtaattctctagcactcaattaagaagcttgtaggttagcaaaatttcagtttctctagttcagccagtgtcttgtccttagtaattatttgctttccctgcagttcaatttctccttggaactctaacaggactaactggaaaaatactttgaccatagctctagtacttccaaataaattcatatctagattttcaaacaaagccccaagatgaagtctaattctgaaaatatctcacaatttttgaatgttctttttatcttaccgacctaacttctcttttccctcccaacttggcctcccacacgttccatttcattttggccattatagtcacatccgtttgactttggttgtgacatcttcctttcaggatgatggaattagatgcagtctgtctttgagtgagactggtcaccatcagaggagttttttctaagtgacgtgactagaagttgaaatctacttccctgctaaagggcacaggggtggtgtacaaagaaagctaccttcccagagcaagcaggctgcattttagctatggaagtgacctgctgtgacactgtgctctcttctgtgggcttaatggttcctttgctatgaagtggcaaattacatgtagagtgtctccttccttttcagagaacagttaatcaaggcaaatcagcaagcccccaaagtgctgtaatttaacatcatgattaccaccttcgaagctatatattttgcatactttaaaatcacctaacttggactgcttgaattacattggcttttagaaccgaaattgtaactatgtattgtatttcatgggaggtatattttatgagctttttggctttcttttttcccacagcaactgccaatgaaggatgaatcccctttttaaaaagttgttgttgttgttgtttatttgattttgagttaggagggataatagagaagtccatttaaaaattatttttagaagctaaagaaagtaattatgcttcctgtgaattgtcttttactggcatctttgttttcctctttgatgttagtaaatttggtgtaatacgtggggcttccatatttcaaagtggaagctttcttctctgaagtcgatatatggttttgaattactagagctttggtcagtatttccttccctatatgtcacagagggcaccactgagaactgcgtgcataggacctcaaaatacaaaattagcagggcctcacagtcagcttcctcatggctagtttttcccccttatattacaatttttgttttataagtcatttttttcctgatatttccaccacttttcagagtcatctacaaaatttttctttcctcaagaaaagagttccttttgccttattccttatgccttccccactggtattgagggttttgataataaattggtaggaaaaaaaagtacctcctagaaggaagccttccccaccatttccaggtgccaactgctaagcagatatattccaaaaatggtaactgtcatgtgcacactgttggttatttttaataagcctcttcctactagaacattttattttccttgttcaccatacaatcatgtactctttaacagaaattgcttttaaaaaatatctggaactatctttaaaaaaactttattaataatcatgtatttttactgatcacattttgaaatgcctaaaagactttattgttctaattatccagatgtacctttgtaaaatagctcttttatgaattagctgataaggctgtatgtttctggaacaaaatattggtcatctaaaaactttctgttttctggggtctgggaaaatagaaaataagatttcaaatattaaataagcttaaaggaaccaagcatgtgactttttatttgtattctggttgatttgtcttgtccaagttatattagaaaagttgaggagtcgaggagcctgtaattaattttcctgtcagtgactgtcagacatcttcctgcttattagagcatccctagcaacaaggctaaaccttcatgacagtgctggcaggtgggcttgccctagcatgtggggcaggtttgttgtttttttaatagctttattgagatattcacatatcatataattcatccatttaaagtgtataatcagatgggttttggtatattattgatttttaattgtggtgaaatatatatataacaaaatttgctattgtaactatttttaagtataaagttcagtgaggtaggccagcttttatgacgcacctgaagataactttggttttaatcctaccctaaatgaagcatatgcctctatttttcctgtccccagtgctgggcttcttcacataccaacatttctgtgcttttaccaacagcattttagctcagaaggctcgcttactttgggcatttgctgtattttggttttgaaatacttgtaatttgacttattcttgggataatattttagttttcagtcattcaagggcacatttggctgacggagctaataagcgtaataaaatgcttagtagtttataccatcttttagttaaacattttaaagattaagactattcaaatgtactttgcggaaattaacctgtttgtatgcctggctttgtttacaaacatatatctatatctatatatatagatacagatacagatacatatctggtggaacaaagaaatacctgtaccattcccacttgctctttgatagccacctcctaggaatggagacaataaaactctgtatttgcatgtg

SEQ ID NO: 26351 - DNA, 3029 bp, Homo sapiens
  source 1..3029: mol_type = unassigned DNA
ctgacatgctgacatcgccccctgaggacttggctgcaaccccagagcccccagggtgtcccggagccctggaccgtgctggcagctggacggagctccctggctgagggccaggtgggtggcagagcaaaagaggaatggactgtgggccacctgctaccctccagccccacctgactgggccacctggcactgcccaccaccctgtagcagtgtgccagcaggagagtctgtcctttgcagagctgcccgccctgaagcccccgagcccagtgtgtctggaccttttccctgttgccccagaggagcttcgggctcctggcagccgctggtccctggggacccctgcccctctccaagggttgctatggccattatccccaggaggctcagatacagagatcaccagcggggggatgcggcccagcagggctggcagctggccacactgtcctggtgcccagcccccagctctggagggaccctggagtccccgacacacacagccacagcgccgggccagccacggctcggagaagaagtctgcctggcgcaagatgcgggtgtaccagcgtgaagaggtccccggctgccccgaggcccacgctgtcttcctagagcctggccaggtagtgcaagagcaggccctgagcacagaggagcccagggtggagttgtctgggtccacccgagtgagcctcgaaggtcctgagcggaggcgcttctcggcatcggagctgatgacccggctgcactcttctctgcgcctggggcggaattcagcagcccgggcactcatctctgggtcaggcaccggagcagcccgggaagggaaagcatctggaatggaggctcgaagtgtagagatgagcggggaccgggtgtcgcggccagcccctggtgactcacgagagggcgattggtccgagcccaggctagacacacaggaagagccgcctttggggtccaggagcaccaacgagcggcgccagtctcgattcctccttaactccgtcctctatcaggaatacagcgacgtggccagcgcccgcgaactgcggcggcagcagcgcgaggaggagggcccgggggacgaggccgagggcgcagaggaggggccggggccgccgcgggccaacctctcccccagcagctccttccgggcgcagcgctcggcgcgaggctccaccttctcgctgtggcaggatatccccgacgtacgcggcagcggcgtcctggccacgctgagcctgcgggactgcaagctgcaggaggccaagtttgagctgatcacctccgaggcctcctacatccacagcctgtcggtggctgtgggccacttcttaggctctgccgagctgagcgagtgtctgggggcgcaggacaagcagtggctgttttccaaactgcccgaggtcaagagcaccagcgagaggttcctgcaggacctggagcagcggctggaggcagatgtgctgcgcttcagcgtgtgcgacgtggtgctggaccactgcccggccttccgcagagtctacctgccctatgtcaccaaccaggcctaccaggagcgcacctaccagcgcctgctcctggagaaccccaggttccctggcatcctggctcgcctggaggagtctcctgtgtgccagcgtctgccccttacctccttccttatcctgcccttccagaggatcacccgcctcaagatgttggtggagaacatcctgaagcggacagcacagggctctgaagacgaagacatggccaccaaggccttcaatgcgctcaaggagctggtgcaggagtgcaatgctagtgtacagtccatgaagaggacagaggaactcatccacctgagcaagaagatccactttgagggcaagattttcccgctgatctctcaggcccgctggctggttcggcatggagagttggtagagctggcaccactgcctgcagcaccccctgccaagctgaagctgtccagcaaggcagtctacctccacctcttcaatgactgcttgctgctctctcggcggaaggagctagggaagtttgccgttttcgtccatgccaagatggctgagctgcaggtgcgggacctgagcctgaagctgcagggcatccccggccacgtgttcctcctccagctcctccacgggcagcacatgaagcaccagttcctgctgcgggcccggacggaaagtgagaagcagcgatggatctcagccttgtgcccctccagcccccaggaggacaaggaggtcatcagtgagggggaagattgcccccaggttcagtgtgttaggacatacaaggcactgcacccagatgagctgaccttggagaagactgacatcctgtcagtgaggacctggaccagtgacggctggctggaaggggtccgcctggcagatggtgagaaggggtgggtgccccaggcctatgtggaagagatcagcagcctcagcgcccgcctccgaaacctccgggagaataagcgagtcacaagtgccaccagcaaactgggggaggctcctgtgtgatgggcagccatggcctaggaccccacctccatgcctggctcctggatggtcctggaggggcctgcagtgtctccattccccaagctgctcctgctggcacttcgcttctgtggccttggcattgagggcacaggctggacacaggaatgggggcgcctccagagggtctctccgtcctcatgctcctcagtgtccacacttcaaggccaaggatagtttcttcctctgacatggggaccataacaggtgatcactgatacctggcaaagactggggccctctcctttctatgtcctcaatcctgcctgactcttggtccttctggcagggacctggctggggaacgttctggtgctgatggtgctgggacctatatgtatatttatatatatctggggtcttgtctaccacctcccctggtcagagcctgagtgggtgctggttgctgtgtcttgtctgtaaataaactcctatcatgccttt

SEQ ID NO: 26352 - DNA, 1712 bp, Homo sapiens
  source 1..1712: mol_type = unassigned DNA
ctgacatgctgacatcgccccctgaggacttggctgcaaccccagagcccccagggtgtcccggagccctggaccgtgctggcagctggacggagctccctggctgagggccaggtgggtggcagagcaaaagaggaatggactgtgggccacctgctaccctccagccccacctgactgggccacctggcactgcccaccaccctgtagcagtgtgccagcaggagagtctgtcctttgcagagctgcccgccctgaagcccccgagcccagtgtgtctggaccttttccctgttgccccagaggagcttcgggctcctggcagccgctggtccctggggacccctgcccctctccaagggttgctatggccattatccccaggaggctcagatacagagatcaccagcggggggatgcggcccagcagggctggcagctggccacactgtcctggtgcccagcccccagctctggagggaccctggagtccccgacacacacagccacagcgccgggccagccacggctcggagaagaagtctgcctggcgcaagatgcgggtgtaccagcgtgaagaggtccccggctgccccgaggcccacgctgtcttcctagagcctggccaggtagtgcaagagcaggccctgagcacagaggagcccagggtggagttgtctgggtccacccgagtgagcctcgaaggtcctgagcggaggcgcttctcggcatcggagctgatgacccggctgcactcttctctgcgcctggggcggaattcagcagcccgggcactcatctctgggtcaggcaccggagcagcccgggaagggaaagcatctggaatggaggctcgaagtgtagagatgagcggggaccgggtgtcgcggccagcccctggtgactcacgagagggcgattggtccgagcccaggctagacacacaggaagagccgcctttggggtccaggagcaccaacgagcggcgccagtctcgattcctccttaactccgtcctctatcaggaatacagcgacgtggccagcgcccgcgaactgcggcggcagcagcgcgaggaggagggcccgggggacgaggccgagggcgcagaggaggggccggggccgccgcgggccaacctctcccccagcagctccttccgggcgcagcgctcggcgcgaggctccaccttctcgctgtggcaggatatccccgacgtacgcggcagcggcgtcctggccacgctgagcctgcgggactgcaagctgcaggaggccaagtttgagctgatcacctccgaggcctcctacatccacagcctgtcggtggctgtgggccacttcttaggctctgccgagctgagcgagtgtctgggggcgcaggacaagcagtggctgttttccaaactgcccgaggtcaagagcaccagcgagaggttcctgcaggacctggagcagcggctggaggcagatgtgctgcgcttcagcgtgtgcgacgtggtgctggaccactgcccggccttccgcagagtctacctgccctatgtcaccaaccaggcctaccaggagcgcacctaccagcgcctgctcctggagaaccccaggttccctggcatcctggctcgcctggaggagtctcctgtgtgccagcgtctgccccttacctccttccttatcctccagcccccaggaggacaaggaggtcatcagtga

SEQ ID NO: 26353 - DNA, 2165 bp, Homo sapiens
  source 1..2165: mol_type = unassigned DNA
acccaggagcttgccttgctcggctctggggccatgctgacatgctgacatcgccccctgaggacttggctgcaaccccagagcccccagggtgtcccggagccctggaccgtgctggcagctggacggagctccctggctgagggccaggtgggtggcagagcaaaagaggaatggactgtgggccacctgctaccctccagccccacctgactgggccacctggcactgcccaccaccctgtagcagtgtgccagcaggagagtctgtcctttgcagagctgcccgccctgaagcccccgagcccagtgtgtctggaccttttccctgttgccccagaggagcttcgggctcctggcagccgctggtccctggggacccctgcccctctccaagggttgctatggccattatccccaggaggctcagatacagagatcaccagcggggggatgcggcccagcagggctggcagctggccacactgtcctggtgcccagcccccagctctggagggaccctggagtccccgacacacacagccacagcgccgggccagccacggctcggagaagaagtctgcctggcgcaagatgcgggtgtaccagcgtgaagaggtccccggctgccccgaggcccacgctgtcttcctagagcctggccaggtagtgcaagagcaggccctgagcacagaggagcccagggtggagttgtctgggtccacccgagtgagcctcgaaggtcctgagcggaggcgcttctcggcatcggagctgatgacccggctgcactcttctctgcgcctggggcggaattcagcagcccgggcactcatctctgggtcaggcaccggagcagcccgggaagggaaagcatctggaatggaggctcgaagtgtagagatgagcggggaccgggtgtcgcggccagcccctggtgactcacgagagggcgattggtccgagcccaggctagacacacaggaagagccgcctttggggtccaggagcaccaacgagcggcgccagtctcgattcctccttaactccgtcctctatcaggaatacagcgacgtggccagcgcccgcgaactgcggcggcagcagcgcgaggaggagggcccgggggacgaggccgagggcgcagaggaggggccggggccgccgcgggccaacctctcccccagcagctccttccgggcgcagcgctcggcgcgaggctccaccttctcgctgtggcaggatatccccgacgtacgcggcagcggcgtcctggccacgctgagcctgcgggactgcaagctgcaggaggccaagtttgagctgatcacctccgaggcctcctacatccacagcctgtcggtggctgtgggccacttcttaggctctgccgagctgagcgagtgtctgggggcgcaggacaagcagtggctgttttccaaactgcccgaggtcaagagcaccagcgagaggttcctgcaggacctggagcagcggctggaggcagatgtgctgcgcttcagcgtgtgcgacgtggtgctggaccactgcccggccttccgcagagtctacctgccctatgtcaccaaccaggcctaccaggagcgcacctaccagcgcctgctccgggagaataagcgagtcacaagtgccaccagcaaactgggggaggctcctgtgtgatgggcagccatggcctaggaccccacctccatgcctggctcctggatggtcctggaggggcctgcagtgtctccattccccaagctgctcctgctggcacttcgcttctgtggccttggcattgagggcacaggctggacacaggaatgggggcgcctccagagggtctctccgtcctcatgctcctcagtgtccacacttcaaggccaaggatagtttcttcctctgacatggggaccataacaggtgatcactgatacctggcaaagactggggccctctcctttctatgtcctcaatcctgcctgactcttggtccttctggcagggacctggctggggaacgttctggtgctgatggtgctgggacctatatgtatatttatatatatctggggtcttgtctaccacctcccctggtcagagcctgagtgggtgctggttgctgtgtcttgtctgtaaataaactcctatcatgccttt

SEQ ID NO: 26354 - DNA, 582 bp, Homo sapiens
  source 1..582: mol_type = unassigned DNA
gaaaggcttgcacaatttcccgcggcgggacgtgggtcgccgggcccgcccggcgccagattaggagtggggctagagaaggggcgaggacgcgaggtgtggcgtcctggggtctggggatgtgaggccagggcctccgaggtgaactggtcctgccctttcgaccccgtgtgtgccctccctcaggccaagtttgagctgatcacctccgaggcctcctacatccacagcctgtcggtggctgtgggccacttcttaggctctgccgagctgagcgagtgtctgggggcgcaggacaagcagtggctgttttccaaactgcccgaggtcaagagcaccagcgagaggttcctgcaggacctggagcagcggctggaggcagatgtgctgcgcttcagcgtgtgcgacgtggtgctggaccactgcccggccttccgcagagtctacctgccctatgtcaccaaccaggcctaccaggagcgcacctaccagcgcctgctgtagggctgggggctctgaaaggggcgggggcgtggagggagtctcaggcaggtgtaggcactgagggctgggtgacgtaag

SEQ ID NO: 26355 - DNA, 921 bp, Homo sapiens
  source 1..921: mol_type = unassigned DNA
ggcgggatcgaggacaggaaaggcttgcacaatttcccgcggcgggacgtgggtcgccgggcccgcccggcgccagattaggagtggggctagagaaggggcgaggacgcgaggtgtggcgtcctggggtctggggatgtgaggccagggcctccgaggtgaactggtcctgccctttcgaccccgtgtgtgccctccctcaggccaagtttgagctgatcacctccgaggcctcctacatccacagcctgtcggtggctgtgggccacttcttaggctctgccgagctgagcgagtgtctgggggcgcaggacaagcagtggctgttttccaaactgcccgaggtcaagagcaccagcgagaggttcctgcaggacctggagcagcggctggaggcagatgtgctgcgcttcagcgtgtgcgacgtggtgctggaccactgcccggccttccgcagagtctacctgccctatgtcaccaaccaggcctaccaggagcgcacctaccagcgcctgctcctggagaaccccaggttccctggcatcctggctcgcctggaggagtctcctgtgtgccagcgtctgccccttacctccttccttatcctgcccttccagaggatcacccgcctcaagatgttggtggagaacatcctgaagcggacagcacagggctctgaagacgaagacatggccaccaaggccttcaatgcgctcaaggagctggtgcaggagtgcaatgctagtgtacagtccatgaagaggacagaggaactcatccacctgagcaagaagatccactttgagggcaagattttcccgctgatctctcaggcccgctggctggttcggcatggagagttggtagagctggcaccactgcctgcagcaccccctgccaagctgaagctgtccagcaagg

SEQ ID NO: 26356 - DNA, 3602 bp, Homo sapiens
  source 1..3602: mol_type = unassigned DNA
cactcggctccggagcccagtcgagtcctgcccggctagaagccggctgtcggtctccgtgtcgccgccgccgcccggcatcgtggagctggggcccccttttgcctgggagttttgtagtcgcctagggtcagcggtgacatcccaaagggcaggcccggcagccgccatggtggccaaggattaccccttctacctcacggtcaagagagcgaactgcagcctggagctacccccggccagcggtccggccaaggacgctgaggagcctagtaataaacgggtcaaacccctttcccgagtcacgtcgctagcaaacctcatcccgcccgtgaaggccacgccattaaagcgcttcagtcaaaccctgcagcgctccattagcttccgcagtgagagccgccctgacatcctcgccccccgaccctggtccagaaatgccgccccctcgagcacgaaacggagagatagcaagctgtggagtgagaccttcgatgtgtgcgtcaatcagatgcttacatccaaggaaatcaaacgtcaggaggcgatctttgagctttcccaaggagaagaagacttgatagaagacttgaaattagcaaaaaaggcctatcatgaccccatgctgaaactctccataatgacagaacaagagttgaatcaaatttttggaacactggactctctaattcctctacatgaagagctccttagtcagcttcgagatgttaggaagcctgatggctcgactgaacatgttggtcccatcctcgtgggctggctcccttgcctcagctcctatgatagctactgcagcaatcaagtagccgccaaagctctgctggaccacaaaaagcaagatcaccgagtccaggatttcctacagcgatgtttagaatccccctttagccgcaaactagatctctggaatttcctcgatattccaagaagccgcctggtaaaataccctctgcttctccgagaaatcttgaggcacacaccaaatgataatccagatcagcagcacttggaagaagctataaatatcattcagggaattgtggcagaaatcaacaccaagactggtgaatctgaatgccgctattataaagagcggcttctttacttggaagaaggccagaaagactccctgatcgacagctctcgagtcttgtgttgtcatggtgaactgaagaacaatcggggcgtgaaactgcatgttttcctgttccaagaagtgcttgtgatcactcgagccgtcacccacaatgagcagctttgctaccagctgtaccgtcagccaatccccgtgaaagacctcctgctggaagacctccaggatggagaagtgaggctgggtggctccctgcgaggggcattcagcaacaatgagagaattaaaaacttcttcagagtcagtttcaaaaatggatcccaaagtcagacccactcgctacaagccaatgacactttcaacaaacagcagtggcttaactgtattcgtcaagccaaagaaacagttttgtgtgctgccgggcaagctggggtgcttgactccgagggatcgttcctaaatcccaccaccgggagcagagagctacagggagaaacaaaacttgagcagatggaccaatcggacagtgagtcagactgtagtatggacacgagtgaggtcagcctcgactgtgagcgcatggaacagacagactcttcctgtggaaacagcaggcacggtgaaagtaacgtctgacagaagcatgtgcacttcgggaagcaggcctgcatcttacctgtacagtatttgcattccacagatggaacggtttggagaagcactttttcatacttttgtgaaagtatacatgttggcccagtctctcgtatctgtacctttgtccctagtactgtaactgccaatctgtctgtgtaagctggaatctgtggcaactattaccctgtgttgtatttcccaagtgtctggatggatggagaggtactcaaacaagttactttcagttgtcctgctggattttaaaaaaatagaaaaagaatctcaaaactactgttttacatagattgtttgaagagtccttcctcttgtgcttctgtaccactttcccagctcttagatgtggtagctaaaggcacggaatttagacggccttgtaaatagggcatgaggaactcatctgtgtattgggatggtattagagagagaatcaggaaagaccaactcatgaagtgaacttggtttgatcttactcaactagaaagcttgaaaacatccctggggattctgaaggcttaattttgcaaaggaggatgcattgtctgaactttgcaacttcatccagtgcaagtttgatgcaagaatgtattaggacataaaatagaggctgaccttaaaagggccaggacagaagcggctgccagctctgaatctttaactgaaatgcacatggcaccaggaggtgtctctcatagttggttgctagcctaaaacatcagaatagaacccaaagggcttaggaaggcctgccaggataacaagaaggccctgtattcattgtgtttcatctgcctaggcctactcattattttagagaatgaatgaagcaacaaggaagagagaccatgactctatcgatgacactgtttatagaaacacaggagaggaagaatttggaatgaaaagcacttcgtcagaaccttctgtgggagccattgagagaaaagcatggtccagtgccttctgagaaaggccagagctttgggctttcctgctctgcttttgggtcgtcaatttgccatctctggttctgtgctataatcagaattgtaattatgttctccagaggccaatttcattaactctgattaattagaatcagctagccagattagtaacctctttgtccagccttgatttacagtgcagggtaaagtgcagaccttaaaaacagctaagtacctagaagagctccctgcaagtgtaaatattaaggatgacctgtgcaaaattatacccacaccagcactagtggtaattattctaaattattgccaaaaagttttttttaatctgtctttcaagtttacagaaaagaaagcagtaaatgcattgatgtcattttattatgtacatatatcatgtgcattcaagctgtgtgacaagatatatcaatataaaaacaaggtatatactttattattttttgaaaacaaggatattgtgatcaattttaccctgtaaaacatatttctgtatttataggtcttaaacatgatgaattttttctattacaagtttatttaaaactgctttctcaagtcgttattgatacagcaagtgaacctgctgcagacagaagcagaggaaagccaagaacagcctttattggtgaagaaaagaatgaatgattctttgtaggcgccatcagccacttttagaagccatcagccagtgtgttgggaaaagaggtttgtcaagtgttggcctatgggaaggtggtcaatgaatgttttgatgaaatgaatgtttttgtataatggccttaaacttttctggaagtatttcaaataaattacattattaagtcatc

SEQ ID NO: 26357 - DNA, 3639 bp, Homo sapiens
  source 1..3639: mol_type = unassigned DNA
agcccaggggagccgccgccgcagccgccgccgccgcggtgagttttccagcctggagaggccgaaccagcgcgggggtcgaggagacctgagcctgccatactgagtctatggacagttccacagcaatgaatcaatgcagctgtagaggaatggaagaaaacaaggaaaggcctaaacggcagcggcaaaacaactttcccatgtttccctctcctaaagcctggaatttcagagggcgaaaacggaaacagagcacccaagatgaagatgctgttagcctttgcagtctcgacataagtgagcctagtaataaacgggtcaaacccctttcccgagtcacgtcgctagcaaacctcatcccgcccgtgaaggccacgccattaaagcgcttcagtcaaaccctgcagcgctccattagcttccgcagtgagagccgccctgacatcctcgccccccgaccctggtccagaaatgccgccccctcgagcacgaaacggagagatagcaagctgtggagtgagaccttcgatgtgtgcgtcaatcagatgcttacatccaaggaaatcaaacgtcaggaggcgatctttgagctttcccaaggagaagaagacttgatagaagacttgaaattagcaaaaaaggcctatcatgaccccatgctgaaactctccataatgacagaacaagagttgaatcaaatttttggaacactggactctctaattcctctacatgaagagctccttagtcagcttcgagatgttaggaagcctgatggctcgactgaacatgttggtcccatcctcgtgggctggctcccttgcctcagctcctatgatagctactgcagcaatcaagtagccgccaaagctctgctggaccacaaaaagcaagatcaccgagtccaggatttcctacagcgatgtttagaatccccctttagccgcaaactagatctctggaatttcctcgatattccaagaagccgcctggtaaaataccctctgcttctccgagaaatcttgaggcacacaccaaatgataatccagatcagcagcacttggaagaagctataaatatcattcagggaattgtggcagaaatcaacaccaagactggtgaatctgaatgccgctattataaagagcggcttctttacttggaagaaggccagaaagactccctgatcgacagctctcgagtcttgtgttgtcatggtgaactgaagaacaatcggggcgtgaaactgcatgttttcctgttccaagaagtgcttgtgatcactcgagccgtcacccacaatgagcagctttgctaccagctgtaccgtcagccaatccccgtgaaagacctcctgctggaagacctccaggatggagaagtgaggctgggtggctccctgcgaggggcattcagcaacaatgagagaattaaaaacttcttcagagtcagtttcaaaaatggatcccaaagtcagacccactcgctacaagccaatgacactttcaacaaacagcagtggcttaactgtattcgtcaagccaaagaaacagttttgtgtgctgccgggcaagctggggtgcttgactccgagggatcgttcctaaatcccaccaccgggagcagagagctacagggagaaacaaaacttgagcagatggaccaatcggacagtgagtcagactgtagtatggacacgagtgaggtcagcctcgactgtgagcgcatggaacagacagactcttcctgtggaaacagcaggcacggtgaaagtaacgtctgacagaagcatgtgcacttcgggaagcaggcctgcatcttacctgtacagtatttgcattccacagatggaacggtttggagaagcactttttcatacttttgtgaaagtatacatgttggcccagtctctcgtatctgtacctttgtccctagtactgtaactgccaatctgtctgtgtaagctggaatctgtggcaactattaccctgtgttgtatttcccaagtgtctggatggatggagaggtactcaaacaagttactttcagttgtcctgctggattttaaaaaaatagaaaaagaatctcaaaactactgttttacatagattgtttgaagagtccttcctcttgtgcttctgtaccactttcccagctcttagatgtggtagctaaaggcacggaatttagacggccttgtaaatagggcatgaggaactcatctgtgtattgggatggtattagagagagaatcaggaaagaccaactcatgaagtgaacttggtttgatcttactcaactagaaagcttgaaaacatccctggggattctgaaggcttaattttgcaaaggaggatgcattgtctgaactttgcaacttcatccagtgcaagtttgatgcaagaatgtattaggacataaaatagaggctgaccttaaaagggccaggacagaagcggctgccagctctgaatctttaactgaaatgcacatggcaccaggaggtgtctctcatagttggttgctagcctaaaacatcagaatagaacccaaagggcttaggaaggcctgccaggataacaagaaggccctgtattcattgtgtttcatctgcctaggcctactcattattttagagaatgaatgaagcaacaaggaagagagaccatgactctatcgatgacactgtttatagaaacacaggagaggaagaatttggaatgaaaagcacttcgtcagaaccttctgtgggagccattgagagaaaagcatggtccagtgccttctgagaaaggccagagctttgggctttcctgctctgcttttgggtcgtcaatttgccatctctggttctgtgctataatcagaattgtaattatgttctccagaggccaatttcattaactctgattaattagaatcagctagccagattagtaacctctttgtccagccttgatttacagtgcagggtaaagtgcagaccttaaaaacagctaagtacctagaagagctccctgcaagtgtaaatattaaggatgacctgtgcaaaattatacccacaccagcactagtggtaattattctaaattattgccaaaaagttttttttaatctgtctttcaagtttacagaaaagaaagcagtaaatgcattgatgtcattttattatgtacatatatcatgtgcattcaagctgtgtgacaagatatatcaatataaaaacaaggtatatactttattattttttgaaaacaaggatattgtgatcaattttaccctgtaaaacatatttctgtatttataggtcttaaacatgatgaattttttctattacaagtttatttaaaactgctttctcaagtcgttattgatacagcaagtgaacctgctgcagacagaagcagaggaaagccaagaacagcctttattggtgaagaaaagaatgaatgattctttgtaggcgccatcagccacttttagaagccatcagccagtgtgttgggaaaagaggtttgtcaagtgttggcctatgggaaggtggtcaatgaatgttttgatgaaatgaatgtttttgtataatggccttaaacttttctggaagtatttcaaataaattacattattaagtcatc

SEQ ID NO: 26358 - DNA, 3992 bp, Homo sapiens
  source 1..3992: mol_type = unassigned DNA
gcagaagagctgtcagatctttcccttcagcacttaaatcattgtcacgcaatggctttcatcttgggagattcatcctctgcattttggaactgagccttcctagtgttctgagagttttctgctgtctgttcagcttagcacgctaagaagctggagaggtacccagcagcctggttgcattctccgtcttggaaaagtatttaactgctttgagaaatcatggaatcgtttctggccacattgtgagattgtattgaattttctttttaagtttttaaatttttatatgcaaatgctggaaagcttggagacagtctatttcaaagaaggctgttgatttctgagactggcaggggcataaaatgacatgagagtgtctcagcaggattccaaattcacgaaagatttttccaggcacctactatgttcagaacggggatgcagaaatatcctggagaatctgaagttctgccttaaccctcgaaactttgaaagcaatggctgaaaaggaaagatgaatacctagaggctccctctggaaatgattgaggtttgccaccacaattggctactttggctttgcccatcaaaatttggtatcttcatgtgctgtctagcatctactacaggtcagatggagcttaggaggacaagggagcctagtaataaacgggtcaaacccctttcccgagtcacgtcgctagcaaacctcatcccgcccgtgaaggccacgccattaaagcgcttcagtcaaaccctgcagcgctccattagcttccgcagtgagagccgccctgacatcctcgccccccgaccctggtccagaaatgccgccccctcgagcacgaaacggagagatagcaagctgtggagtgagaccttcgatgtgtgcgtcaatcagatgcttacatccaaggaaatcaaacgtcaggaggcgatctttgagctttcccaaggagaagaagacttgatagaagacttgaaattagcaaaaaaggcctatcatgaccccatgctgaaactctccataatgacagaacaagagttgaatcaaatttttggaacactggactctctaattcctctacatgaagagctccttagtcagcttcgagatgttaggaagcctgatggctcgactgaacatgttggtcccatcctcgtgggctggctcccttgcctcagctcctatgatagctactgcagcaatcaagtagccgccaaagctctgctggaccacaaaaagcaagatcaccgagtccaggatttcctacagcgatgtttagaatccccctttagccgcaaactagatctctggaatttcctcgatattccaagaagccgcctggtaaaataccctctgcttctccgagaaatcttgaggcacacaccaaatgataatccagatcagcagcacttggaagaagctataaatatcattcagggaattgtggcagaaatcaacaccaagactggtgaatctgaatgccgctattataaagagcggcttctttacttggaagaaggccagaaagactccctgatcgacagctctcgagtcttgtgttgtcatggtgaactgaagaacaatcggggcgtgaaactgcatgttttcctgttccaagaagtgcttgtgatcactcgagccgtcacccacaatgagcagctttgctaccagctgtaccgtcagccaatccccgtgaaagacctcctgctggaagacctccaggatggagaagtgaggctgggtggctccctgcgaggggcattcagcaacaatgagagaattaaaaacttcttcagagtcagtttcaaaaatggatcccaaagtcagacccactcgctacaagccaatgacactttcaacaaacagcagtggcttaactgtattcgtcaagccaaagaaacagttttgtgtgctgccgggcaagctggggtgcttgactccgagggatcgttcctaaatcccaccaccgggagcagagagctacagggagaaacaaaacttgagcagatggaccaatcggacagtgagtcagactgtagtatggacacgagtgaggtcagcctcgactgtgagcgcatggaacagacagactcttcctgtggaaacagcaggcacggtgaaagtaacgtctgacagaagcatgtgcacttcgggaagcaggcctgcatcttacctgtacagtatttgcattccacagatggaacggtttggagaagcactttttcatacttttgtgaaagtatacatgttggcccagtctctcgtatctgtacctttgtccctagtactgtaactgccaatctgtctgtgtaagctggaatctgtggcaactattaccctgtgttgtatttcccaagtgtctggatggatggagaggtactcaaacaagttactttcagttgtcctgctggattttaaaaaaatagaaaaagaatctcaaaactactgttttacatagattgtttgaagagtccttcctcttgtgcttctgtaccactttcccagctcttagatgtggtagctaaaggcacggaatttagacggccttgtaaatagggcatgaggaactcatctgtgtattgggatggtattagagagagaatcaggaaagaccaactcatgaagtgaacttggtttgatcttactcaactagaaagcttgaaaacatccctggggattctgaaggcttaattttgcaaaggaggatgcattgtctgaactttgcaacttcatccagtgcaagtttgatgcaagaatgtattaggacataaaatagaggctgaccttaaaagggccaggacagaagcggctgccagctctgaatctttaactgaaatgcacatggcaccaggaggtgtctctcatagttggttgctagcctaaaacatcagaatagaacccaaagggcttaggaaggcctgccaggataacaagaaggccctgtattcattgtgtttcatctgcctaggcctactcattattttagagaatgaatgaagcaacaaggaagagagaccatgactctatcgatgacactgtttatagaaacacaggagaggaagaatttggaatgaaaagcacttcgtcagaaccttctgtgggagccattgagagaaaagcatggtccagtgccttctgagaaaggccagagctttgggctttcctgctctgcttttgggtcgtcaatttgccatctctggttctgtgctataatcagaattgtaattatgttctccagaggccaatttcattaactctgattaattagaatcagctagccagattagtaacctctttgtccagccttgatttacagtgcagggtaaagtgcagaccttaaaaacagctaagtacctagaagagctccctgcaagtgtaaatattaaggatgacctgtgcaaaattatacccacaccagcactagtggtaattattctaaattattgccaaaaagttttttttaatctgtctttcaagtttacagaaaagaaagcagtaaatgcattgatgtcattttattatgtacatatatcatgtgcattcaagctgtgtgacaagatatatcaatataaaaacaaggtatatactttattattttttgaaaacaaggatattgtgatcaattttaccctgtaaaacatatttctgtatttataggtcttaaacatgatgaattttttctattacaagtttatttaaaactgctttctcaagtcgttattgatacagcaagtgaacctgctgcagacagaagcagaggaaagccaagaacagcctttattggtgaagaaaagaatgaatgattctttgtaggcgccatcagccacttttagaagccatcagccagtgtgttgggaaaagaggtttgtcaagtgttggcctatgggaaggtggtcaatgaatgttttgatgaaatgaatgtttttgtataatggccttaaacttttctggaagtatttcaaataaattacattattaagtc

SEQ ID NO: 26359 - DNA, 3656 bp, Homo sapiens
  source 1..3656: mol_type = unassigned DNA
agaaaaaactcagggcaaggttggccttggctcataagaccttttcaaactttattgagtcaatagttctagagaaagagaacacccatgaacgttccccaagttctcccaagggcgagaaggagaagagcaggctgcgccagggttcctggcgggcgtttctgaaaagcaaagatgccggaagccccaaaaagcccaccctagtgagtctgcctctaggacccgaagttctctccccagcagagaccgacagccactgtgaggaacgggcggaggacaaagagggctatgtttttagcgatcactgggcacccccacttgcctccacacctttgtcctccagtttagtttctccagaacacaggaggaaaagtgaaccgaccatcaagtgcacagccacccaggaaggcgacgctaaaccaagatgagcagaaggaagagagcagggaaggaggccagggtccgcgcggcttgggcacagtgccctggctcagggaccttcctgggagtgagaaccacatgccctgggaagaaccagcaggtgagaagcccagttgctctcacagtcagaaggcgttccacatggagcctgcccagaagccctgcttcaccactgacatggtgacatgggccctcctctgcatctctgcagagactgtgcgtggggaggctccttcacagcctaggggcatccctcaccgctcgcccgtcagtgtggatgacctgtggctggagaagacacagagaaagaagttgcagaagcaggcccacgtcgaaaggaggctgcacataggggcagtgcacaaagatggagtcaagtgctggagaaagacgatcattacctctccagagtctttgaatctccctagaagaagccatccactctcccagagtgctccaacgggactgaaccacatgggctggccagagcacacaccaggcactgccatgcctgatggagctctggacacagctgtctgcgctgacgaagtggggagcgaggaggacctgtatgatgacctgcacagctccagccaccactacagccaccctggagggggtggggagcagctggctatcaatgagctcatcagcgatggcagtgtggtctgcgctgaagcactctgggaccatgtcaccatggacgaccaggagctgggcttcaaagctggggacgtcatcgaagtgatggatgccaccaacagagagtggtggtggggccgggtcgccgatggcgagggctggtttccagccagcttcgttcggctgagggtgaatcaggacgagcccgcggatgacgacgcccctctggccgggaacagcggagcggaggacggcggggcggaggcgcagagcagcaaggaccagatgcggaccaacgtcatcaacgagatcctcagcactgagcgggactacatcaagcacctgcgcgacatctgcgagggctacgtccggcagtgccgcaagcgcgcagacatgttcagcgaggagcagctgcgtaccatcttcgggaacatcgaggacatctaccgctgccagaaggccttcgtgaaggccctggagcagaggttcaaccgcgagcgcccacacctgagcgagctgggtgcctgcttcctggagcatcaagccgacttccagatctactcggagtactgcaataaccaccccaacgcctgcgtggagctctcccggctcaccaagctcagcaagtacgtgtacttcttcgaggcctgccggctgctgcagaagatgattgacatctccctggatggcttcctgctgactccggtgcagaagatctgcaagtaccctctgcagctggccgagctgctcaaatacacgcacccccagcacagggacttcaaggatgttgaagccgccttgcatgccatgaagaacgtggcccagctcatcaacgagcggaagcggagacttgagaacatcgacaagattgctcagtggcagagctccatagaggactgggagggagaagatctcttggtcaggagctcagaactcatctactcgggggagctgactcgagttacacagcctcaagccaaaagccagcagcgaatgttctttctctttgaccaccagctcatctactgtaagaaggacctgctccgccgcgacgtgttgtactacaagggccggctggacatggacggcctggaggtggtggacctggaggacgggaaggacagagacctccatgtgagcatcaagaacgccttccggctgcaccgtggcgccacaggggacagccacctgctgtgcaccaggaagcccgagcagaagcagcgctggctcaaggcctttgccagggagagggagcaggtgcagctggaccaggagacaggcttctccatcactgaactgcagaggaagcaggccatgctgaatgccagcaagcagcaggtcacagggaagcccaaagctgttggccggccctgctacctgacgcgccagaagcacccagccctgcccagcaaccggccccagcagcaggtcctggtgctggcggagcccaggcgcaagccatctaccttctggcacagcatcagccggctggcacccttccgcaagtgaactggtccctgcctgacagcacctgctgggccttcctgccagtggcccccagtttttcttccccgaggcccactcggcctggccttcctctgcctgcaagtgagcagggatgggctggggagttgcttgtgccaccaagacgtgccaggtctgtactcctgttgtctttttccctgctcctggtgccctgaagagaccagcaagggggcagaccccgcactcgccacaccgccgctgcagcttgggccccatccgccctctggacctgtgtagggcctcactgctggagcggggaaaccgcagctcagcccaggcccagctggggagaaggcgctacctgcgtgggaccctcttctctggaaacctaatcctcctttcatttcctctgggcaggactctctggccttctgtggcctgcaatgccaggccatgtgcccctctgccctctagttctccaagtccccagcccggccagtggtgccaggcagcttgccacttgggagggcagaagccaggaattccacacccttgtgttgcgcccggagcccgcccttcgcctcccagcccctcaagacaccgctggctgctggacaccctcttcacttgtgtgtgtgtgtgtagcggaaaaggacaagacggtgcagtcggctgcatactcccagtcgggagtgtggtcagtctgcctgctgctgtgcggtagctccagaaccacctcgttcctggttttgtttggattttggcatcttgtttttctaacaacaaacaatggagaaaaagaattgattcttagtgacacagaagattgccttacgctcgtgagcgtgagaagccataagagagagaccgaattctgtggctcagcacacaggactgacccacagcccaggcagcgggtgtgtggagatggcgccctgtcctgccaaggggcgccaggagcagagccagggcctggcgagctggcgtggagcccacaggattcagcagcatggacagtcactcttgcactattccttctccaagccagaaaccacatttaatttcataaataaatttatgaaaagtaa

SEQ ID NO: 26360 - DNA, 1872 bp, Homo sapiens
  source 1..1872: mol_type = unassigned DNA
tagagagaggaaatgaggccagatgggcagcaagctttggatgctgtggtaaggagttttgactgtcactctgaagcagctctcaggcagaggaatgatgtgatttattgtagtttaccaaggaccgctcagggtattgtgcagagggaagaccagctggaggttcttgtgtcactccgtgaagtgtgggggcggcggaggggcagagatgggacctgcactggagccatgcctgatggagctctggacacagctgtctgcgctgacgaagtggggagcgaggaggacctgtatgatgacctgcacagctccagccaccactacagccaccctggagggggtggggagcagctggctatcaatgagctcatcagcgatggcagtgtggtctgcgctgaagcactctgggaccatgtcaccatggacgaccaggagctgggcttcaaagctggggacgtcatcgaagtgatggatgccaccaacagagagtggtggtggggccgggtcgccgatggcgagggctggtttccagccagcttcgttcggctgagggtgaatcaggacgagcccgcggatgacgacgcccctctggccgggaacagcggagcggaggacggcggggcggaggcgcagagcagcaaggaccagatgcggaccaacgtcatcaacgagatcctcagcactgagcgggactacatcaagcacctgcgcgacatctgcgagggctacgtccggcagtgccgcaagcgcgcagacatgttcagcgaggagcagctgcgtaccatcttcgggaacatcgaggacatctaccgctgccagaaggccttcgtgaaggccctggagcagaggttcaaccgcgagcgcccacacctgagcgagctgggtgcctgcttcctggagcatcaagccgacttccagatctactcggagtactgcaataaccaccccaacgcctgcgtggagctctcccggctcaccaagctcagcaagtacgtgtacttcttcgaggcctgccggctgctgcagaagatgattgacatctccctggatggcttcctgctgactccggtgcagaagatctgcaagtaccctctgcagctggccgagctgctcaaatacacgcacccccagcacagggacttcaaggatgttgaagccgccttgcatgccatgaagaacgtggcccagctcatcaacgagcggaagcggagacttgagaacatcgacaagattgctcagtggcagagctccatagaggactgggagggagaagatctcttggtcaggagctcagaactcatctactcgggggagctgactcgagttacacagcctcaagccaaaagccagcagcgaatgttctttctctttgaccaccagctcatctactgtaagaaggacctgctccgccgcgacgtgttgtactacaagggccggctggacatggacggcctggaggtggtggacctggaggacgggaaggacagagacctccatgtgagcatcaagaacgccttccggctgcaccgtggcgccacaggggacagccacctgctgtgcaccaggaagcccgagcagaagcagcgctggctcaaggcctttgccagggagagggagcaggtgcagctggaccaggagacaggcttctccatcactgaactgcagaggaagcaggccatgctgaatgccagcaagcagcaggtcacagggaagcccaaagctgttggccggccctgctacctgacgcgccagaagcacccagccctgcccagcaaccggccccagcagcaggtcctggtgctggcggagcccaggcgcaagccatctaccttctggcacagcatcagccggctggcacccttccgcaagtga

SEQ ID NO: 26361 - DNA, 4257 bp, Homo sapiens
  source 1..4257: mol_type = unassigned DNA
agaaaaaactcagggcaaggttggccttggctcataagaccttttcaaactttattgagtcaatagttctagagaaagagaacacccatgaacgttccccaagttctcccaagggcgagaaggagaagagcaggctgcgccagggttcctggcgggcgtttctgaaaagcaaagatgccggaagccccaaaaagcccaccctagtgagtctgcctctaggacccgaagttctctccccagcagagaccgacagccactgtgaggaacgggcggaggacaaagagggctatgtttttagcgatcactgggcacccccacttgcctccacacctttgtcctccagtttagtttctccagaacacaggaggaaaagtgaaccgaccatcaagtgcacagccacccaggaaggcgacgctaaaccaagatgagcagaaggaagagagcagggaaggaggccagggtccgcgcggcttgggcacagtgccctggctcagggaccttcctgggagtgagaaccacatgccctgggaagaaccagcaggtgagaagcccagttgctctcacagtcagaaggcgttccacatggagcctgcccagaagccctgcttcaccactgacatggtgacatgggccctcctctgcatctctgcagagactgtgcgtggggaggctccttcacagcctaggggcatccctcaccgctcgcccgtcagtgtggatgacctgtggctggagaagacacagagaaagaagttgcagaagcaggcccacgtcgaaaggaggctgcacataggggcagtgcacaaagatggagtcaagtgctggagaaagacgatcattacctctccagagtctttgaatctccctagaagaagccatccactctcccagagtgctccaacgggactgaaccacatgggctggccagagcacacaccaggcactgccatgcctgatggagctctggacacagctgtctgcgctgacgaagtggggagcgaggaggacctgtatgatgacctgcacagctccagccaccactacagccaccctggagggggtggggagcagctggctatcaatgagctcatcagcgatggcagtgtggtctgcgctgaagcactctgggaccatgtcaccatggacgaccaggagctgggcttcaaagctggggacgtcatcgaagtgatggatgccaccaacagagagtggtggtggggccgggtcgccgatggcgagggctggtttccagccagcttcgttcggctgagggtgaatcaggacgagcccgcggatgacgacgcccctctggccgggaacagcggagcggaggacggcggggcggaggcgcagagcagcaaggaccagatgcggaccaacgtcatcaacgagatcctcagcactgagcgggactacatcaagcacctgcgcgacatctgcgagggctacgtccggcagtgccgcaagcgcgcagacatgttcagcgaggagcagctgcgtaccatcttcgggaacatcgaggacatctaccgctgccagaaggccttcgtgaaggccctggagcagaggttcaaccgcgagcgcccacacctgagcgagctgggtgcctgcttcctggagcatcaagccgacttccagatctactcggagtactgcaataaccaccccaacgcctgcgtggagctctcccggctcaccaagctcagcaagtacgtgtacttcttcgaggcctgccggctgctgcagaagatgattgacatctccctggatggcttcctgctgactccggtgcagaagatctgcaagtaccctctgcagctggccgagctgctcaaatacacgcacccccagcacagggacttcaaggatgttgaagccgccttgcatgccatgaagaacgtggcccagctcatcaacgagcggaagcggagacttgagaacatcgacaagattgctcagtggcagagctccatagaggactgggagggagaagatctcttggtcaggagctcagaactcatctactcgggggagctgactcgagttacacagcctcaagccaaaagccagcagcgaatgttctttctctttgaccaccagctcatctactgtaagaaggacctgctccgccgcgacgtgttgtactacaagggccggctggacatggacggcctggaggtggtggacctggaggacgggaaggacagagacctccatgtgagcatcaagaacgccttccggctgcaccgtggcgccacaggggacagccacctgctgtgcaccaggaagcccgagcagaagcagcgctggctcaaggcctttgccagggagagggagcaggtgcagctggaccaggagacaggcttctccatcactgaactgcagaggaagcaggccatgctgaatgccagcaagcagcaggtcacagggaagcccaaaggtaggcggacagcagccccacctcctcggctgcccggtccttaccctgctgacatcattcccttctctgaaccacaaagccaagccagctagccaccaggcctgaggggggcccactgccctttgcagctgtttgttcccaaaggttggtaataaggggccactggggaagcctgggtcagtatatggttgacattcttactctcaacaccttggctcccccagatcagggccattggtgacaatgcttgtttccccagggttccttcctgacaggcatctggggttggtgtagggatggagctgctttccccatttctacagagagccatgcccctgaaacatcacatgcctttgcacaggccacccccctcttcaggctgctgcaggaggccaggcccaggccagagaccccaggcagcctgagctcttggatgtggtcagctctccaggagcaagtcctgtgtggcaaaactgcctcctacggcggctctgaagcagagccctgggacggaccccatgctgtccccaacagctggggtggcactctgccctgggcacccatgaccctctgctgtctctccctgttcagctgttggccggccctgctacctgacgcgccagaagcacccagccctgcccagcaaccggccccagcagcaggtcctggtgctggcggagcccaggcgcaagccatctaccttctggcacagcatcagccggctggcacccttccgcaagtgaactggtccctgcctgacagcacctgctgggccttcctgccagtggcccccagtttttcttccccgaggcccactcggcctggccttcctctgcctgcaagtgagcagggatgggctggggagttgcttgtgccaccaagacgtgccaggtctgtactcctgttgtctttttccctgctcctggtgccctgaagagaccagcaagggggcagaccccgcactcgccacaccgccgctgcagcttgggccccatccgccctctggacctgtgtagggcctcactgctggagcggggaaaccgcagctcagcccaggcccagctggggagaaggcgctacctgcgtgggaccctcttctctggaaacctaatcctcctttcatttcctctgggcaggactctctggccttctgtggcctgcaatgccaggccatgtgcccctctgccctctagttctccaagtccccagcccggccagtggtgccaggcagcttgccacttgggagggcagaagccaggaattccacacccttgtgttgcgcccggagcccgcccttcgcctcccagcccctcaagacaccgctggctgctggacaccctcttcacttgtgtgtgtgtgtgtagcggaaaaggacaagacggtgcagtcggctgcatactcccagtcgggagtgtggtcagtctgcctgctgctgtgcggtagctccagaaccacctcgttcctggttttgtttggattttggcatcttgtttttctaacaacaaacaatggagaaaaagaattgattcttagtgacacagaagattgccttacgctcgtgagcgtgagaagccataagagagagaccgaattctgtggctcagcacacaggactgacccacagcccaggcagcgggtgtgtggagatggcgccctgtcctgccaaggggcgccaggagcagagccagggcctggcgagctggcgtggagcccacaggattcagcagcatggacagtcactcttgcactattccttctccaagccagaaaccacatttaatttcataaataaatttatgaaaagtaacctggctgct

SEQ ID NO: 26362 - DNA, 1893 bp, Homo sapiens
  source 1..1893: mol_type = unassigned DNA
atgccctgggaagaaccagcaggtgagaagcccagttgctctcacagtcagaaggcgttccacatggagcctgcccagaagccctgcttcaccactgacatggtgacatgggccctcctctgcatctctgcagagactgtgcgtggggaggctccttcacagcctaggggcatccctcaccgctcgcccgtcagtgtggatgacctgtggctggagaagacacagagaaagaagttgcagaagcaggcccacgtcgaaaggaggctgcacataggggcagtgcacaaagatggagtcaagtgctggagaaagacgatcattacctctccagagtctttgaatctccctagaagaagccatccactctcccagagtgctccaacgggactgaaccacatgggctggccagagcacacaccaggcactgccatgcctgatggagctctggacacagctgtctgcgctgacgaagtggggagcgaggaggacctgtatgatgacctgcacagctccagccaccactacagccaccctggagggggtggggagcagctggctatcaatgagctcatcagcgatggcagtgtggtctgcgctgaagcactctgggaccatgtcaccatggacgaccaggagctgggcttcaaagctggggacgtcatcgaagtgatggatgccaccaacagagagtggtggtggggccgggtcgccgatggcgagggctggtttccagccagcttcgttcggctgagggtgaatcaggacgagcccgcggatgacgacgcccctctggccgggaacagcggagcggaggacggcggggcggaggcgcagagcagcaaggaccagatgcggaccaacgtcatcaacgagatcctcagcactgagcgggactacatcaagcacctgcgcgacatctgcgagcaagccgacttccagatctactcggagtactgcaataaccaccccaacgcctgcgtggagctctcccggctcaccaagctcagcaagtacgtgtacttcttcgaggcctgccggctgctgcagaagatgattgacatctccctggatggcttcctgctgactccggtgcagaagatctgcaagtaccctctgcagctggccgagctgctcaaatacacgcacccccagcacagggacttcaaggatgttgaagccgccttgcatgccatgaagaacgtggcccagctcatcaacgagcggaagcggagacttgagaacatcgacaagattgctcagtggcagagctccatagaggactgggagggagaagatctcttggtcaggagctcagaactcatctactcgggggagctgactcgagttacacagcctcaagccaaaagccagcagcgaatgttctttctctttgaccaccagctcatctactgtaagaaggacctgctccgccgcgacgtgttgtactacaagggccggctggacatggacggcctggaggtggtggacctggaggacgggaaggacagagacctccatgtgagcatcaagaacgccttccggctgcaccgtggcgccacaggggacagccacctgctgtgcaccaggaagcccgagcagaagcagcgctggctcaaggcctttgccagggagagggagcaggtgcagctggaccaggagacaggcttctccatcactgaactgcagaggaagcaggccatgctgaatgccagcaagcagcaggtcacagggaagcccaaagctgttggccggccctgctacctgacgcgccagaagcacccagccctgcccagcaaccggccccagcagcaggtcctggtgctggcggagcccaggcgcaagccatctaccttctggcacagcatcagccggctggcacccttccgcaagtga

SEQ ID NO: 26363 - DNA, 1638 bp, Homo sapiens
  source 1..1638: mol_type = unassigned DNA
ccacttgcctccacacctttgtcctccagtttagtttctccagaacacaggaggaaaagtgaaccgaccatcaagtgcacagccacccaggaaggcggtaggtacctaccttcaggtatctttccggaaaagtcctggctggcgtcccccggcagccctcgggcccagcaggctggaatcgcacacaccctgccttccagctctgcctgctgcctggcatatgaaaaccccgggacgccctgcagacccacgagccccaagcccctgagtcccaggcctagtgctcagcggatgggtctccactaccccgggaggggtagcgccatctccatggtttctcttggaagctacagctacgtggacagcagttcaggggaccctgaaagacccaagattcccaagggccagaccagtttcctgctttctctgcagacgctaaaccaagatgagcagaaggaagagagcagggaaggaggccagggtccgcgcggcttgggcacagtgccctggctcagggaccttcctgggagtgagaaccacatgccctgggaagaaccagcaggtgagaagcccagttgctctcacagtcagaaggcgttccacatggagcctgcccagaagccctgcttcaccactgacatggtgacatgggccctcctctgcatctctgcagagactgtgcgtggggaggctccttcacagcctaggggcatccctcaccgctcgcccgtcagtgtggatgacctgtggctggagaagacacagagaaagaagttgcagaagcaggcccacgtcgaaaggaggctgcacataggggcagtgcacaaagatggagtcaagtgctggagaaagacgatcattacctctccagagtctttgaatctccctagaagaagccatccactctcccagagtgctccaacgggactgaaccacatgggctggccagagcacacaccaggcactgctgttggccggccctgctacctgacgcgccagaagcacccagccctgcccagcaaccggccccagcagcaggtcctggtgctggcggagcccaggcgcaagccatctaccttctggcacagcatcagccggctggcacccttccgcaagtgaactggtccctgcctgacagcacctgctgggccttcctgccagtggcccccagtttttcttccccgaggcccactcggcctggccttcctctgcctgcaagtgagcagggatgggctggggagttgcttgtgccaccaagacgtgccaggtctgtactcctgttgtctttttccctgctcctggtgccctgaagagaccagcaagggggcagaccccgcactcgccacaccgccgctgcagcttgggccccatccgccctctggacctgtgtagggcctcactgctggagcggggaaaccgcagctcagcccaggcccagctggggagaaggcgctacctgcgtgggaccctcttctctggaaacctaatcctcctttcatttcctctgggcaggactctctggccttctgtggcctgcaatgccaggccatgtgcccctctgccctctagttctccaagtccccagcccggccagtggtgccaggcagcttgccacttgggagggcagaagccaggaat

SEQ ID NO: 26364 - DNA, 3800 bp, Homo sapiens
  source 1..3800: mol_type = unassigned DNA
gggaaggaggccagggtccgcgcggcttgggcacagtgccctggctcagggaccttcctgggagtgagaaccacatgccctgggaagaaccagcaggtgagaagcccagttgctctcacagtcagaaggcgttccacatggagcctgcccagaagccctgcttcaccactgacatggtgacatgggccctcctctgcatctctgcagagactgtgcgtggggaggctccttcacagcctaggggcatccctcaccgctcgcccgtcagtgtggatgacctgtggctggagaagacacagagaaagaagttgcagaagcaggcccacgtcgaaaggaggctgcacataggggcagtgcacaaagatggagtcaagtgctggagaaagacgatcattacctctccagagtctttgaatctccctagaagaagccatccactctcccagagtgctccaacgggactgaaccacatgggctggccagagcacacaccaggcactgccatgcctgatggagctctggacacagctgtctgcgctgacgaagtggggagcgaggaggacctgtatgatgacctgcacagctccagccaccactacagccaccctggagggggtggggagcagctggctatcaatgagctcatcagcgatggcagtgtggtctgcgctgaagcactctgggaccatgtcaccatggacgaccaggagctgggcttcaaagctggggacgtcatcgaagtgatggatgccaccaacagagagtggtggtggggccgggtcgccgatggcgagggctggtttccagccagcttcgttcggctgagggtgaatcaggacgagcccgcggatgacgacgcccctctggccgggaacagcggagcggaggacggcggggcggaggcgcagagcagcaaggaccagatgcggaccaacgtcatcaacgagatcctcagcactgagcgggactacatcaagcacctgcgcgacatctgcgagggctacgtccggcagtgccgcaagcgcgcagacatgttcagcgaggagcagctgcgtaccatcttcgggaacatcgaggacatctaccgctgccagaaggccttcgtgaaggccctggagcagaggttcaaccgcgagcgcccacacctgagcgagctgggtgcctgcttcctggagcatcaagccgacttccagatctactcggagtactgcaataaccaccccaacgcctgcgtggagctctcccggctcaccaagctcagcaagtacgtgtacttcttcgaggcctgccggctgctgcagaagatgattgacatctccctggatggcttcctgctgactccggtgcagaagatctgcaagtaccctctgcagctggccgagctgctcaaatacacgcacccccagcacagggacttcaaggatgttgaagccgccttgcatgccatgaagaacgtggcccagctcatcaacgagcggaagcggagacttgagaacatcgacaagattgctcagtggcagagctccatagaggactgggagggagaagatctcttggtcaggagctcagaactcatctactcgggggagctgactcgagttacacagcctcaagccaaaagccagcagcgaatgttctttctctttgaccaccagctcatctactgtaagaaggacctgctccgccgcgacgtgttgtactacaagggccggctggacatggacggcctggaggtggtggacctggaggacgggaaggacagagacctccatgtgagcatcaagaacgccttccggctgcaccgtggcgccacaggggacagccacctgctgtgcaccaggaagcccgagcagaagcagcgctggctcaaggcctttgccagggagagggagcaggtgcagctggaccaggagacaggcttctccatcactgaactgcagaggaagcaggccatgctgaatgccagcaagcagcaggtcacagggaagcccaaaggtaggcggacagcagccccacctcctcggctgcccggtccttaccctgctgacatcattcccttctctgaaccacaaagccaagccagctagccaccaggcctgaggggggcccactgccctttgcagctgtttgttcccaaaggttggtaataaggggccactggggaagcctgggtcagtatatggttgacattcttactctcaacaccttggctcccccagatcagggccattggtgacaatgcttgtttccccagggttccttcctgacaggcatctggggttggtgtagggatggagctgctttccccatttctacagagagccatgcccctgaaacatcacatgcctttgcacaggccacccccctcttcaggctgctgcaggaggccaggcccaggccagagaccccaggcagcctgagctcttggatgtggtcagctctccaggagcaagtcctgtgtggcaaaactgcctcctacggcggctctgaagcagagccctgggacggaccccatgctgtccccaacagctggggtggcactctgccctgggcacccatgaccctctgctgtctctccctgttcagctgttggccggccctgctacctgacgcgccagaagcacccagccctgcccagcaaccggccccagcagcaggtcctggtgctggcggagcccaggcgcaagccatctaccttctggcacagcatcagccggctggcacccttccgcaagtgaactggtccctgcctgacagcacctgctgggccttcctgccagtggcccccagtttttcttccccgaggcccactcggcctggccttcctctgcctgcaagtgagcagggatgggctggggagttgcttgtgccaccaagacgtgccaggtctgtactcctgttgtctttttccctgctcctggtgccctgaagagaccagcaagggggcagaccccgcactcgccacaccgccgctgcagcttgggccccatccgccctctggacctgtgtagggcctcactgctggagcggggaaaccgcagctcagcccaggcccagctggggagaaggcgctacctgcgtgggaccctcttctctggaaacctaatcctcctttcatttcctctgggcaggactctctggccttctgtggcctgcaatgccaggccatgtgcccctctgccctctagttctccaagtccccagcccggccagtggtgccaggcagcttgccacttgggagggcagaagccaggaattccacacccttgtgttgcgcccggagcccgcccttcgcctcccagcccctcaagacaccgctggctgctggacaccctcttcacttgtgtgtgtgtgtgtagcggaaaaggacaagacggtgcagtcggctgcatactcccagtcgggagtgtggtcagtctgcctgctgctgtgcggtagctccagaaccacctcgttcctggttttgtttggattttggcatcttgtttttctaacaacaaacaatggagaaaaagaattgattcttagtgacacagaagattgccttacgctcgtgagcgtgagaagccataagagagagaccgaattctgtggctcagcacacaggactgacccacagcccaggcagcgggtgtgtggagatggcgccctgtcctgccaaggggcgccaggagcagagccagggcctggcgagctggcgtggagcccacaggattcagcagcatggacagtcactcttgcactattccttctccaagccagaaaccacatttaatttcataaataaatttatgaaaagt

SEQ ID NO: 26365 - DNA, 5544 bp, Homo sapiens
  source 1..5544: mol_type = unassigned DNA
gaaacttcctaggagaacccgatccctccctcccgtcgggcggccaggggcgggccgcgggtggggcggccgggcctgcgctggggacggctctggggactgcggccggcgccgggacctggaggggacgctggggccgaagcagcatgtgacaccgaccaggattcagccctgatggaggctgaggaggcccagcgtggagcctctcctcccatctctgccatagaggaattcagcattatccctgaggctcccatgaggagcagccaggtctctgccttggggcttgaagctcaagaagatgaggacccatcctataagtggagagaggaacacagactctcagcaactcagcagagtgagttaagggatgtgtgtgactatgcgattgagacgatgccctcttttcccaaggaaggttctgcagatgtggagcccaatcaggaaagccttgtggctgaggcctgtgacactccggaacactgggaggcagtaccccagagcctagcaggccgacaagcaaggactctagctcccccagagctctgggcctgccccattcagagtgagcatctagacatggccccattttccagtgacctgggaagcgaagaagaggaggtggaattttggccaggacttacttctttgacattgggatctggacaggcagaagaagaagaggaaacctcttcagataactctggtcagaccagatattattctccctgcgaagagcatcctgcagagaccaaccagaatgaaggctctgaaagtgggactatcaggcagggggaagagctgccacctgaggagctgcaggaaagtcaagggctcttgcatccccaggaggtccaagttctggaggagcagggacagcaggaagcaggatttcggggggaaggaactctgagggaggatgtttgtgccgatgggctattaggggaggaacagatgatagagcaggttaatgatgaaaagggagaacagaagcaaaaacaggaacaggtacaagatgtgatgcttgggagacaaggagaaagaatggggctcactggggagccagagggtctgaatgacggtgagtgggagcaggaggatatggagaggaaggctcagggtcagggaggtccagaacagggagaagagaggaagagggagctgcaggtgccagaagagaatagggcggactctcaggacgaaaagagtcaaacctttttgggaaaatcagaggaagtaactggaaagcaagaagatcatggtataaaggagaaaggggtgccagtcagcgggcaggaggcgaaagagccagagagttgggatgggggcaggctgggggcagtgggaagagcgaggagcagggaagaggagaatgagcatcatgggccttcaatgcccgctctgatagcccctgaggactctcctcactgtgacctgtttccaggtgcctcatatctcatgactcagattcccgggactcagacagagtccagggctgaggaactgtcccccgcagctctgtctccctcgctagagcccatcaggtgctctcaccagcccatttctctactgggctcctttttgactgaggagtcacctgacaaggaaatagatcaaaacagccagcaagaggaatccaggctgaggaagggaacagtgtccagccaagggactgaggtggtctttgccagtgcatctgtgactcctccaaggacaccagattcagctcctcccagtcctgctgaagcctaccccatcacacctgcctcggtatctgccaggcccccagttgcctttcccaggagggaaacctcttgtgctgcacgtgctccagaaactgccagtgcccctctctcaatggatgacccatctccctgtgggacttctgagatgtgcccggctgccctctatggcttcccctccaccgggaccagccctccgaggcccccagccaactccacaggcaccgtccagcacttacggagtgactccttccctggttctcacaggacagagcagactccagacctggtgggaatgttgctttcctactcccactcagagctgccccagaggccccccaaacctgccatctacagctctgtgaccccaagaagggacagaaggagtggtagggactacagcaccgtttcagcatcccctactgccttatccacgctgaagcaggactctcaagaatccatctcaaatctagagagacccagcagtcctcccagcatccagccctgggtctccccacataatccagcctttgccacagagtctcccgcctacggttcttccccatcctttgtctccatggaggatgtgaggatccacgaacctctgccccctcctcccccacagaggagggacacccatccctccgtggtggagacagatggccatgctcgtgtagtggttcccacgctgaagcagcatagccaccctcctccattggccctaggttcagggctgcatgccccccataaaggcccacttccccaagcctctgaccccgctgtggccaggcagcaccgacctctgccatctaccccagacagctcccaccatgctcaggccacccccaggtggagatacaacaagccgctaccccctacccctgatttgccgcagccccaccttcctcccatttctgctcctggtagctcaaggatctacaggcctctacccccactacccatcatagaccctcccaccgaaccacccccattgcccccaaagtccagggggaggagcaggagcactcggggaggacatatgaactcagggggtcatgccaaaacaagacctgcttgtcaagactggacagtccccctccctgcctctgctggacgcacctcctggcccccggccacagctagatcaacagagtctttcacttccaccagcaggagtaagagcgaagtgtcccctggcatggctttcagcaacatgacaaacttcctatgcccctcttcccctaccactccctggactccggagctccagggacccacctctaaggatgaagcaggggtctcagaacaccctgaggcccctgcgagagaacctttgagaaggacaacccctcagcaaggagccagtggcccagggaggtcacctgtgggccaagcaaggcagccagaaaaacccagccatctgcacctggagaaggcgtccagctggccccacaggcgggactcagggaggccaccaggggacagcagtggacaggctgtggctcctagtgagggggccaacaagcacaagggctggagccggcagggcctgcgcagaccttccatcttgcctgagggctcttcagattcaagaggtccagccgtggagaaacatccgggaccctcagacactgttgtttttcgggagaaaaaaccaaaggaggtgatgggaggcttttcaagacgctgctccaaactcatcaactcctcccagctgctttaccaggagtatagtgatgttgtcctgaataaggagatccagagccagcagcggctggagagcctgtccgagacacccgggcctagctctccgcggcagcctcggaaggccctggtctcctccgagtcgtacctgcagcggctctccatggcctccagcggctccctctggcaggaaatccccgtggtgcgcaacagcaccgtgctgctctccatgacccatgaagaccaaaagctgcaagaggtcaaatttgagctgattgtgtcagaggcctcctacctgcgcagtctaaacatagctgtggatcatttccaactttcaacttcactccgggccacactttccaaccaggagcaccaatggctcttctctcgtttacaggatgtgcgagacgtcagcgccacgttcctttcagacctggaagagaactttgagaacaatatcttctccttccaagtatgtgacgtagtcctgaaccacgccccagacttccgccgggtctacctgccttatgtcaccaaccagacctatcaggaacgcaccttccagagcctgatgaatagcaacagcaatttccgggaggtcttggagaagctggagagcgaccccgtctgccagcgcctttccctcaagtcctttctgattctgcccttccaacgcatcacccgcctcaaactgctgctccagaacattctgaagagaacacagcctggctcctcggaggaggcagaggccacgaaggcacaccacgccctggagcagctgatccgggactgcaataacaatgtccagagtatgcgacggacagaggaactaatctacctgagccagaagattgagtttgagtgcaaaatattcccgctcatttctcagtcacgctggctggtgaaaagtggggagctgacagccttggagttcagtgcttccccagggctacgaaggaagctgaacacgcgtccagtccacctgcacctcttcaatgactgtctgctgctgtctcggccccgagagggtagccgattcctggtatttgaccatgctcccttctcctccattcggggggaaaagtgtgaaatgaagctacatggacctcacaaaaacctgttccgactctttctgcggcagaacactcagggcgcccaggccgagttcctcttccgcacggagactcaaagtgaaaagcttcggtggatctcagccttggccatgccaagagaggagttggaccttctggagtgttacaactccccccaggtacagtgccttcgagcctacaagccccgagagaatgatgaattggcactggagaaagccgacgtggtgatggtgactcagcagagcagtgacggctggctggagggcgtgaggctctcagacggggagcgaggctggtttcctgtgcagcaggtggagttcatttccaacccagaggtccgtgcacagaacctgaaggaagctcatcgagtcaagactgccaaactacagctggtggaacagcaagcctaagtcttctctgagaggagtttcgtgagctgaagaacaagctgctcatggcaagggctggccccagaaccctgcaagagaggccttctgtggatggagaactaggccttctcaaagctcaaggacaaaatccagctaacccagtccctcggcccaggcctcctttcgtgctttgtgcttggtgggggggatttcgagggactttgcactggactctgggaacctttcatcattaaaaaaagggggaccattggggcctgagccaaggaactttccttctactgccttatagtgcttaaacattctccgcctccagggtgcagattcagagctggccagagtttcagtgatagccgtatgttaaacagaatctcacctcagtctcctggagggagatgtttaagaggggttaacacatcagatgggagggtcagcccggtgacctctaaggtatcttctaacctagaaattcaccataattatggtgcaaggtcagtgtgtctctgagatctatgtctgttggtggcaatgtgagggtgatactctctcactctaataaacttggcacttctccgagta

SEQ ID NO: 26366 - DNA, 2937 bp, Homo sapiens
  source 1..2937: mol_type = unassigned DNA
gtgtagtggttcccacgctgaagcagcatagccaccctcctccattggccctaggttcagggctgcatgccccccataaaggcccacttccccaagcctctgaccccgctgtggccaggcagcaccgacctctgccatctaccccagacagctcccaccatgctcaggccacccccaggtggagatacaacaagccgctaccccctacccctgatttgccgcagccccaccttcctcccatttctgctcctggtagctcaaggatctacaggcctctacccccactacccatcatagaccctcccaccgaaccacccccattgcccccaaagtccagggggaggagcaggagcactcggggaggacatatgaactcagggggtcatgccaaaacaagacctgcttgtcaagactggacagtccccctccctgcctctgctggacgcacctcctggcccccggccacagctagatcaacagagtctttcacttccaccagcaggagtaagagcgaagtgtcccctggcatggctttcagcaacatgacaaacttcctatgcccctcttcccctaccactccctggactccggagctccagggacccacctctaaggatgaagcaggggtctcagaacaccctgaggcccctgcgagagaacctttgagaaggacaacccctcagcaaggagccagtggcccagggaggtcacctgtgggccaagcaaggcagccagaaaaacccagccatctgcacctggagaaggcgtccagctggccccacaggcgggactcagggaggccaccaggggacagcagtggacaggctgtggctcctagtgagggggccaacaagcacaagggctggagccggcagggcctgcgcagaccttccatcttgcctgagggctcttcagattcaagaggtccagccgtggagaaacatccgggaccctcagacactgttgtttttcgggagaaaaaaccaaaggaggtgatgggaggcttttcaagacgctgctccaaactcatcaactcctcccagctgctttaccaggagtatagtgatgttgtcctgaataaggagatccagagccagcagcggctggagagcctgtccgagacacccgggcctagctctccgagtcgtacctgcagcggctctccatggcctccagcggctccctctggcaggaaatccccgtggtgcgcaacagcaccgtgctgctctccatgacccatgaagaccaaaagctgcaagaggtcaaatttgagctgattgtgtcagaggcctcctacctgcgcagtctaaacatagctgtggatcatttccaactttcaacttcactccgggccacactttccaaccaggagcaccaatggctcttctctcgtttacaggatgtgcgagacgtcagcgccacgttcctttcagacctggaagagaactttgagaacaatatcttctccttccaagtatgtgacgtagtcctgaaccacgccccagacttccgccgggtctacctgccttatgtcaccaaccagacctatcaggaacgcaccttccagagcctgatgaatagcaacagcaatttccgggaggtcttggagaagctggagagcgaccccgtctgccagcgcctttccctcaagtcctttctgattctgcccttccaacgcatcacccgcctcaaactgctgctccagaacattctgaagagaacacagcctggctcctcggaggaggcagaggccacgaaggcacaccacgccctggagcagctgatccgggactgcaataacaatgtccagagtatgcgacggacagaggaactaatctacctgagccagaagattgagtttgagtgcaaaatattcccgctcatttctcagtcacgctggctggtgaaaagtggggagctgacagccttggagttcagtgcttccccagggctacgaaggaagctgaacacgcgtccagtccacctgcacctcttcaatgactgtctgctgctgtctcggccccgagaaagtgaaaagcttcggtggatctcagccttggccatgccaagagaggagttggaccttctggagtgttacaactccccccaggtacagtgccttcgagcctacaagccccgagagaatgatgaattggcactggagaaagccgacgtggtgatggtgactcagcagagcagtgacggctggctggagggcgtgaggctctcagacggggagcgaggctggtttcctgtgcagcaggtggagttcatttccaacccagaggtccgtgcacagaacctgaaggaagctcatcgagtcaagactgccaaactacagctggtggaacagcaagcctaagtcttctctgagaggagtttcgtgagctgaagaacaagctgctcatggcaagggctggccccagaaccctgcaagagaggccttctgtggatggagaactaggccttctcaaagctcaaggacaaaatccagctaacccagtccctcggcccaggcctcctttcgtgctttgtgcttggtgggggggatttcgagggactttgcactggactctgggaacctttcatcattaaaaaaagggggaccattggggcctgagccaaggaactttccttctactgccttatagtgcttaaacattctccgcctccagggtgcagattcagagctggccagagtttcagtgatagccgtatgttaaacagaatctcacctcagtctcctggagggagatgtttaagaggggttaacacatcagatgggagggtcagcccggtgacctctaaggtatcttctaacctagaaattcaccataattatggtgcaaggtcagtgtgtctctgagatctatgtctgttggtggcaatgtgagggtgatactctctcactctaataaacttggcacttctccgagt

SEQ ID NO: 26367 - DNA, 2432 bp, Homo sapiens
  source 1..2432: mol_type = unassigned DNA
ctaccactccctggactccggagctccagggacccacctctaaggatgaagcaggggtctcagaacaccctgaggcccctgcgagagaacctttgagaaggacaacccctcagcaaggagccagtggcccagggaggtcacctggggccaacaagcacaagggctggagccggcagggcctgcgcagaccttccatcttgcctgagggctcttcagattcaagaggtccagccgtggagaaacatccgggaccctcagacactgttgtttttcgggagaaaaaaccaaaggaggtgatgggaggcttttcaagacgctgctccaaactcatcaactcctcccagctgctttaccaggagtatagtgatgttgtcctgaataaggagatccagagccagcagcggctggagagcctgtccgagacacccgggcctagctctccgcggcagcctcggaaggccctggtctcctccgagtcgtacctgcagcggctctccatggcctccagcggctccctctggcaggaaatccccgtggtgcgcaacagcaccgtgctgctctccatgacccatgaagaccaaaagctgcaagaggtcaaatttgagctgattgtgtcagaggcctcctacctgcgcagtctaaacatagctgtggatcatttccaactttcaacttcactccgggccacactttccaaccaggagcaccaatggctcttctctcgtttacaggatgtgcgagacgtcagcgccacgttcctttcagacctggaagagaactttgagaacaatatcttctccttccaagtatgtgacgtagtcctgaaccacgccccagacttccgccgggtctacctgccttatgtcaccaaccagacctatcaggaacgcaccttccagagcctgatgaatagcaacagcaatttccgggaggtcttggagaagctggagagcgaccccgtctgccagcgcctttccctcaagtcctttctgattctgcccttccaacgcatcacccgcctcaaactgctgctccagaacattctgaagagaacacagcctggctcctcggaggaggcagaggccacgaaggcacaccacgccctggagcagctgatccgggactgcaataacaatgtccagagtatgcgacggacagaggaactaatctacctgagccagaagattgagtttgagtgcaaaatattcccgctcatttctcagtcacgctggctggtgaaaagtggggagctgacagccttggagttcagtgcttccccagggctacgaaggaagctgaacacgcgtccagtccacctgcacctcttcaatgactgtctgctgctgtctcggccccgagagggtagccgattcctggtatttgaccatgctcccttctcctccattcggggggaaaagtgtgaaatgaagctacatggacctcacaaaaacctgttccgactctttctgcggcagaacactcagggcgcccaggccgagttcctcttccgcacggagactcaaagtgaaaagcttcggtggatctcagccttggccatgccaagagaggagttggaccttctggagtgttacaactccccccaggtacagtgccttcgagcctacaagccccgagagaatgatgaattggcactggagaaagccgacgtggtgatggtgactcagcagagcagtgacggctggctggagggcgtgaggctctcagacggggagcgaggctggtttcctgtgcagcaggtggagttcatttccaacccagaggtccgtgcacagaacctgaaggaagctcatcgagtcaagactgccaaactacagctggtggaacagcaagcctaagtcttctctgagaggagtttcgtgagctgaagaacaagctgctcatggcaagggctggccccagaaccctgcaagagaggccttctgtggatggagaactaggccttctcaaagctcaaggacaaaatccagctaacccagtccctcggcccaggcctcctttcgtgctttgtgcttggtgggggggatttcgagggactttgcactggactctgggaacctttcatcattaaaaaaagggggaccattggggcctgagccaaggaactttccttctactgccttatagtgcttaaacattctccgcctccagggtgcagattcagagctggccagagtttcagtgatagccgtatgttaaacagaatctcacctcagtctcctggagggagatgtttaagaggggttaacacatcagatgggagggtcagcccggtgacctctaaggtatcttctaacctagaaattcaccataattatggtgcaaggtcagtgtgtctctgagatctatgtctgttggtggcaatgtgagggtgatactctctcactctaataaacttggcacttctccgagta

SEQ ID NO: 26368 - DNA, 2968 bp, Homo sapiens
  source 1..2968: mol_type = unassigned DNA
gtgtagtggttcccacgctgaagcagcatagccaccctcctccattggccctaggttcagggctgcatgccccccataaaggcccacttccccaagcctctgaccccgctgtggccaggcagcaccgacctctgccatctaccccagacagctcccaccatgctcaggccacccccaggtggagatacaacaagccgctaccccctacccctgatttgccgcagccccaccttcctcccatttctgctcctggtagctcaaggatctacaggcctctacccccactacccatcatagaccctcccaccgaaccacccccattgcccccaaagtccagggggaggagcaggagcactcggggaggacatatgaactcagggggtcatgccaaaacaagacctgcttgtcaagactggacagtccccctccctgcctctgctggacgcacctcctggcccccggccacagctagatcaacagagtctttcacttccaccagcaggagtaagagcgaagtgtcccctggcatggctttcagcaacatgacaaacttcctatgcccctcttcccctaccactccctggactccggagctccagggacccacctctaaggatgaagcaggggtctcagaacaccctgaggcccctgcgagagaacctttgagaaggacaacccctcagcaaggagccagtggcccagggaggtcacctgtgggccaagcaaggcagccagaaaaacccagccatctgcacctggagaaggcgtccagctggccccacaggcgggactcagggaggccaccaggggacagcagtggacaggctgtggctcctagtgagggggccaacaagcacaagggctggagccggcagggcctgcgcagaccttccatcttgcctgagggctcttcagattcaagaggtccagccgtggagaaacatccgggaccctcagacactgttgtttttcgggagaaaaaaccaaaggaggtgatgggaggcttttcaagacgctgctccaaactcatcaactcctcccagctgctttaccaggagtatagtgatgttgtcctgaataaggagatccagagccagcagcggctggagagcctgtccgagacacccgggcctagctctccgcggcagcctcggaaggccctggtctcctccgagtcgtacctgcagcggctctccatggcctccagcggctccctctggcaggaaatccccgtggtgcgcaacagcaccgtgctgctctccatgacccatgaagaccaaaagctgcaagaggtcaaatttgagctgattgtgtcagaggcctcctacctgcgcagtctaaacatagctgtggatcatttccaactttcaacttcactccgggccacactttccaaccaggagcaccaatggctcttctctcgtttacaggatgtgcgagacgtcagcgccacgttcctttcagacctggaagagaactttgagaacaatatcttctccttccaagtatgtgacgtagtcctgaaccacgccccagacttccgccgggtctacctgccttatgtcaccaaccagacctatcaggaacgcaccttccagagcctgatgaatagcaacagcaatttccgggaggtcttggagaagctggagagcgaccccgtctgccagcgcctttccctcaagtcctttctgattctgcccttccaacgcatcacccgcctcaaactgctgctccagaacattctgaagagaacacagcctggctcctcggaggaggcagaggccacgaaggcacaccacgccctggagcagctgatccgggactgcaataacaatgtccagagtatgcgacggacagaggaactaatctacctgagccagaagattgagtttgagtgcaaaatattcccgctcatttctcagtcacgctggctggtgaaaagtggggagctgacagccttggagttcagtgcttccccagggctacgaaggaagctgaacacgcgtccagtccacctgcacctcttcaatgactgtctgctgctgtctcggccccgagaaagtgaaaagcttcggtggatctcagccttggccatgccaagagaggagttggaccttctggagtgttacaactccccccaggtacagtgccttcgagcctacaagccccgagagaatgatgaattggcactggagaaagccgacgtggtgatggtgactcagcagagcagtgacggctggctggagggcgtgaggctctcagacggggagcgaggctggtttcctgtgcagcaggtggagttcatttccaacccagaggtccgtgcacagaacctgaaggaagctcatcgagtcaagactgccaaactacagctggtggaacagcaagcctaagtcttctctgagaggagtttcgtgagctgaagaacaagctgctcatggcaagggctggccccagaaccctgcaagagaggccttctgtggatggagaactaggccttctcaaagctcaaggacaaaatccagctaacccagtccctcggcccaggcctcctttcgtgctttgtgcttggtgggggggatttcgagggactttgcactggactctgggaacctttcatcattaaaaaaagggggaccattggggcctgagccaaggaactttccttctactgccttatagtgcttaaacattctccgcctccagggtgcagattcagagctggccagagtttcagtgatagccgtatgttaaacagaatctcacctcagtctcctggagggagatgtttaagaggggttaacacatcagatgggagggtcagcccggtgacctctaaggtatcttctaacctagaaattcaccataattatggtgcaaggtcagtgtgtctctgagatctatgtctgttggtggcaatgtgagggtgatactctctcactctaataaacttggcacttctccgagt

SEQ ID NO: 26369 - DNA, 2958 bp, Homo sapiens
  source 1..2958: mol_type = unassigned DNA
atgtctcggatcgaatccctcacgcgggcgcggatcgaccggagcagagagctggcgagcaagacccgggaaaaggagaagatgaaggaagccaaggatgcccgctataccaatgggcacctcttcaccaccatttcagtttcaggcatgaccatgtgctatgcctgtaacaagagcatcacagccaaggaagccctcatctgcccaacctgcaatgtgactatccacaaccgctgtaaagacaccctcgccaactgtaccaaggtcaagcagaagcaacagaaagcggccctgctgaagaacaacaccgccttgcagtccgtttctcttcgaagtaagacaaccatccgggagcggccaagctcggccatctacccctccgacagcttccggcagtccctcctgggctcccgccgtggccgctcctccttgtctttagccaagagtgtttctaccaccaacattgctggacatttcaatgatgagtctcccctggggctgcgccggatcctctcacagtccacagactccctcaacatgcggaaccgaaccctatccgtggaatccctcattgacgaagaggtaatctacagtgagctgatgagtgactttgagatggatgagaaggactttgcagctgactcttggagtcttgctgtggacagcagcttcctgcagcagcataaaaaggaggtgatgaagcagcaagatgtcatctatgagctaatccagacagagctgcaccatgtgaggacactgaagatcatgacccgcctcttccgcacggggatgctggaagagctacacttggagccaggagtggtccagggcctgttcccctgcgtggacgagctcagtgacatccatacacgcttcctcagccagctattagaacgccgacgccaggccctgtgccctggcagcacccggaactttgtcatccatcgcttgggtgatctgctcatcagccagttctcaggtcctagtgcggagcagatgtgtaagacctactcggagttctgcagccgccacagcaaggccttaaagctctataaggagctgtacgcccgagacaaacgcttccagcaattcatccggaaagtgacccgccccgccgtgctcaagcggcacggggtacaggagtgcatcctgctggtgactcagcgcatcaccaagtacccgttactcatcagccgcatcctgcagcattcccacgggatcgaggaggagcgccaggacctgaccacagcactggggctagtgaaggagctgctgtccaatgtggacgagggtatttatcagctggagaaaggggcccgtctgcaggagatctacaaccgcatggaccctcgggcccaaaccccagtgcctggcaagggcccctttggccgagaggaacttctgaggcgcaaactcatccacgatggctgcctgctctggaagacagcgacggggcgcttcaaagatgtgctagtgctgctgatgacagatgtactggtgtttctccaggaaaaggaccagaagtacatctttcctaccctggacaagccttcagtggtatcgctgcagaatctaatcgtacgagacattgccaaccaggagaaagggatgtttctgatcagcgcagccccacctgagatgtacgaggtgcacacagcatcccgggatgaccggagcacctggatccgggtcattcagcagagcgtgcgcacatgcccatccagggaggacttccccctgattgagacagaggatgaggcttacctgcggcgaattaagatggagttgcagcagaaggaccgggcactggtggagctgctgcgagagaaggtcgggctgtttgctgagatgacccatttccaggccgaagaggatggtggcagtgggatggccctgcccaccctgcccaggggccttttccgctctgagtcccttgagtcccctcgtggcgagcggctgctgcaggatgccatccgtgaggtggagggtctgaaagacctgctggtggggccaggagtggaactgctcttgacaccccgagagccagccctgcccttggaaccagacagcggtggtaacacgagtcctggggtcactgccaatggtgaggccagaaccttcaatggctccattgaactctgcagagctgactcagactctagccagagggatcgaaatggaaatcagctgagatcaccgcaagaggaggcgttacagcgattggtcaatctctatggacttctacatggcctacaggcagctgtggcccagcaggacactctgatggaagcccggttccctgagggccctgagcggcgggagaagctgtgccgagccaactctcgggatggggaggctggcagggctggggctgcccctgtggcccctgaaaagcaggccacggaactggcattactgcagcggcaacatgcgctgctgcaggaggagctacggcgctgccggcggctaggtgaagaacgggcaaccgaagctggcagcctggaggcccggctccgggagagtgagcaggcccgggcactgctggagcgtgaggccgaagaggctcgaaggcagctggccgccctgggccagaccgagccactcccagctgaggccccctgggcccgcagacctgtggatcctcggcggcgcagcctccccgcaggcgatgccctgtacttgagtttcaaccccccacagcccagccgaggcactgaccgcctggatctacctgtcactactcgctctgtccatcgaaactttgaggaccgagagaggcaggaactggggagccccgaagagcggctgcaagacagcagtgaccctgacactggcagcgaggaggaaggtagcagccgtctgtctccgccccacagtccacgagactttaccagaatgcaggacatcccggaggagacggagagccgcgacggggaggctgtagcctccgagagctaa

SEQ ID NO: 26370 - DNA, 4077 bp, Homo sapiens
  source 1..4077: mol_type = unassigned DNA
gggatcccgggagggagcggagcggacctgggcttggtcgcctccaagccggcgggaccgagtgctttaggccgcttgaaagaaagttgctccgacccgggaaaaggagaagatgaaggaagccaaggatgcccgctataccaatgggcacctcttcaccaccatttcagtttcaggcatgaccatgtgctatgcctgtaacaagagcatcacagccaaggaagccctcatctgcccaacctgcaatgtgactatccacaaccgctgtaaagacaccctcgccaactgtaccaaggtcaagcagaagcaacagaaagcggccctgctgaagaacaacaccgccttgcagtccgtttctcttcgaagtaagacaaccatccgggagcggccaagctcggccatctacccctccgacagcttccggcagtccctcctgggctcccgccgtggccgctcctccttgtctttagccaagagtgtttctaccaccaacattgctggacatttcaatgatgagtctcccctggggctgcgccggatcctctcacagtccacagactccctcaacatgcggaaccgaaccctatccgtggaatccctcattgacgaagaggtaatctacagtgagctgatgagtgactttgagatggatgagaaggactttgcagctgactcttggagtcttgctgtggacagcagcttcctgcagcagcataaaaaggaggtgatgaagcagcaagatgtcatctatgagctaatccagacagagctgcaccatgtgaggacactgaagatcatgacccgcctcttccgcacggggatgctggaagagctacacttggagccaggagtggtccagggcctgttcccctgcgtggacgagctcagtgacatccatacacgcttcctcagccagctattagaacgccgacgccaggccctgtgccctggcagcacccggaactttgtcatccatcgcttgggtgatctgctcatcagccagttctcaggtcctagtgcggagcagatgtgtaagacctactcggagttctgcagccgccacagcaaggccttaaagctctataaggagctgtacgcccgagacaaacgcttccagcaattcatccggaaagtgacccgccccgccgtgctcaagcggcacggggtacaggagtgcatcctgctggtgactcagcgcatcaccaagtacccgttactcatcagccgcatcctgcagcattcccacgggatcgaggaggagcgccaggacctgaccacagcactggggctagtgaaggagctgctgtccaatgtggacgagggtatttatcagctggagaaaggggcccgtctgcaggagatctacaaccgcatggaccctcgggcccaaaccccagtgcctggcaagggcccctttggccgagaggaacttctgaggcgcaaactcatccacgatggctgcctgctctggaagacagcgacggggcgcttcaaagatgtgctagtgctgctgatgacagatgtactggtgtttctccaggaaaaggaccagaagtacatctttcctaccctggacaagccttcagtggtatcgctgcagaatctaatcgtacgagacattgccaaccaggagaaagggatgtttctgatcagcgcagccccacctgagatgtacgaggtgcacacagcatcccgggatgaccggagcacctggatccgggtcattcagcagagcgtgcgcacatgcccatccagggaggacttccccctgattgagacagaggatgaggcttacctgcggcgaattaagatggagttgcagcagaaggaccgggcactggtggagctgctgcgagagaaggtcgggctgtttgctgagatgacccatttccaggccgaagaggatggtggcagtgggatggccctgcccaccctgcccaggggccttttccgctctgagtcccttgagtcccctcgtggcgagcggctgctgcaggatgccatccgtgaggtggagggtctgaaagacctgctggtggggccaggagtggaactgctcttgacaccccgagagccagccctgcccttggaaccagacagcggtggtaacacgagtcctggggtcactgccaatggtgaggccagaaccttcaatggctccattgaactctgcagagctgactcagactctagccagagggatcgaaatggaaatcagctgagatcaccgcaagaggaggcgttacagcgattggtcaatctctatggacttctacatggcctacaggcagctgtggcccagcaggacactctgatggaagcccggttccctgagggccctgagcggcgggagaagctgtgccgagccaactctcgggatggggaggctggcagggctggggctgcccctgtggcccctgaaaagcaggccacggaactggcattactgcagcggcaacatgcgctgctgcaggaggagctacggcgctgccggcggctaggtgaagaacgggcaaccgaagctggcagcctggaggcccggctccgggagagtgagcaggcccgggcactgctggagcgtgaggccgaagaggctcgaaggcagctggccgccctgggccagaccgagccactcccagctgaggccccctgggcccgcagacctgtggatcctcggcggcgcagcctccccgcaggcgatgccctgtacttgagtttcaaccccccacagcccagccgaggcactgaccgcctggatctacctgtcactactcgctctgtccatcgaaactttgaggaccgagagaggcaggaactggggagccccgaagagcggctgcaagacagcagtgaccctgacactggcagcgaggaggaaggtagcagccgtctgtctccgccccacagtccacgagactttaccagaatgcaggacatcccggaggagacggagagccgcgacggggaggctgtagcctccgagagctaagggggcccctcccccctgccccgtgccccactgaagaacattactgagggggctaaccttggggactccaatttgccaatgatgagggaacatttgaaagaactgcaaattgtccttgccagctcttgggatccttggatacctggggccatttaagaagctaggggaattaggccacaacaccccctgggacatccgaaagctacaccacagatgccagtggttcatgccttcttcccgcaactttaggaaaatttatttatttattgtttattagttatggggggagaggggagatttaaaggaccagggacatgggaaccaagccatagggatcagagggccttgtccttgaacactactggggtatattcaggctcatccacgcagctgctgggttcttgccctaacggccctcccctgcaacatccgtcttggaggagaggctgcagccacagcaccctactgccctttaaataaaggagggctgtgggcagggccatgtccctttctcctctcccctcaacctcttactgctgttctccctttctccgtccttcatggaagccctgggagataacctggcttcctggagttgatggaataaaggttggggtggccataatggtttgttgggggtgagggaaaaaacccacagggaccagaatgttttgttgttcttttgttttcttttttgtaccaaagtcaactgcacgtgttttatatttttaagagatcgtaggcaattagagatcgaagcctcctatctccacatctctgaagaagttgaggggtgggggagagaatgacttctgccttcatctgcagtaacggggggacctatactgacctcttccccagccatttagaaacaagttctagggtgggttggaaaatctccaagagccctgacctcatcttccacctcagcaaccatgacctgaaacctcagcgtgaatttgggggatttttcagtggaacccttgcccccaaatgtcgaccagcccccaaatgtcgaagaattttcttcttgccaattttgttgtttaaaaaaaaaattcagggaaaattaaaaacctggaactcca

SEQ ID NO: 26371 - DNA, 4149 bp, Homo sapiens
  source 1..4149: mol_type = unassigned DNA
gagaccaacgcgtgcgggccgaacccctccccccgccttcccccaacaatacaggacgccggggtccgcgccgcgtcctccctggtccccccgtccgattatgtctcggatcgaatccctcacgcgggcgcggatcgaccggagcagagagctggcgagcaagacccgggaaaaggagaagatgaaggaagccaaggatgcccgctataccaatgggcacctcttcaccaccatttcagtttcaggcatgaccatgtgctatgcctgtaacaagagcatcacagccaaggaagccctcatctgcccaacctgcaatgtgactatccacaaccgctgtaaagacaccctcgccaactgtaccaaggtcaagcagaagcaacagaaagcggccctgctgaagaacaacaccgccttgcagtccgtttctcttcgaagtaagacaaccatccgggagcggccaagctcggccatctacccctccgacagcttccggcagtccctcctgggctcccgccgtggccgctcctccttgtctttagccaagagtgtttctaccaccaacattgctggacatttcaatgatgagtctcccctggggctgcgccggatcctctcacagtccacagactccctcaacatgcggaaccgaaccctatccgtggaatccctcattgacgaagcagaggtaatctacagtgagctgatgagtgactttgagatggatgagaaggactttgcagctgactcttggagtcttgctgtggacagcagcttcctgcagcagcataaaaaggaggtgatgaagcagcaagatgtcatctatgagctaatccagacagagctgcaccatgtgaggacactgaagatcatgacccgcctcttccgcacggggatgctggaagagctacacttggagccaggagtggtccagggcctgttcccctgcgtggacgagctcagtgacatccatacacgcttcctcagccagctattagaacgccgacgccaggccctgtgccctggcagcacccggaactttgtcatccatcgcttgggtgatctgctcatcagccagttctcaggtcctagtgcggagcagatgtgtaagacctactcggagttctgcagccgccacagcaaggccttaaagctctataaggagctgtacgcccgagacaaacgcttccagcaattcatccggaaagtgacccgccccgccgtgctcaagcggcacggggtacaggagtgcatcctgctggtgactcagcgcatcaccaagtacccgttactcatcagccgcatcctgcagcattcccacgggatcgaggaggagcgccaggacctgaccacagcactggggctagtgaaggagctgctgtccaatgtggacgagggtatttatcagctggagaaaggggcccgtctgcaggagatctacaaccgcatggaccctcgggcccaaaccccagtgcctggcaagggcccctttggccgagaggaacttctgaggcgcaaactcatccacgatggctgcctgctctggaagacagcgacggggcgcttcaaagatgtgctagtgctgctgatgacagatgtactggtgtttctccaggaaaaggaccagaagtacatctttcctaccctggacaagccttcagtggtatcgctgcagaatctaatcgtacgagacattgccaaccaggagaaagggatgtttctgatcagcgcagccccacctgagatgtacgaggtgcacacagcatcccgggatgaccggagcacctggatccgggtcattcagcagagcgtgcgcacatgcccatccagggaggacttccccctgattgagacagaggatgaggcttacctgcggcgaattaagatggagttgcagcagaaggaccgggcactggtggagctgctgcgagagaaggtcgggctgtttgctgagatgacccatttccaggccgaagaggatggtggcagtgggatggccctgcccaccctgcccaggggccttttccgctctgagtcccttgagtcccctcgtggcgagcggctgctgcaggatgccatccgtgaggtggagggtctgaaagacctgctggtggggccaggagtggaactgctcttgacaccccgagagccagccctgcccttggaaccagacagcggtggtaacacgagtcctggggtcactgccaatggtgaggccagaaccttcaatggctccattgaactctgcagagctgactcagactctagccagagggatcgaaatggaaatcagctgagatcaccgcaagaggaggcgttacagcgattggtcaatctctatggacttctacatggcctacaggcagctgtggcccagcaggacactctgatggaagcccggttccctgagggccctgagcggcgggagaagctgtgccgagccaactctcgggatggggaggctggcagggctggggctgcccctgtggcccctgaaaagcaggccacggaactggcattactgcagcggcaacatgcgctgctgcaggaggagctacggcgctgccggcggctaggtgaagaacgggcaaccgaagctggcagcctggaggcccggctccgggagagtgagcaggcccgggcactgctggagcgtgaggccgaagaggctcgaaggcagctggccgccctgggccagaccgagccactcccagctgaggccccctgggcccgcagacctgtggatcctcggcggcgcagcctccccgcaggcgatgccctgtacttgagtttcaaccccccacagcccagccgaggcactgaccgcctggatctacctgtcactactcgctctgtccatcgaaactttgaggaccgagagaggcaggaactggggagccccgaagagcggctgcaagacagcagtgaccctgacactggcagcgaggaggaaggtagcagccgtctgtctccgccccacagtccacgagactttaccagaatgcaggacatcccggaggagacggagagccgcgacggggaggctgtagcctccgagagctaagggggcccctcccccctgccccgtgccccactgaagaacattactgagggggctaaccttggggactccaatttgccaatgatgagggaacatttgaaagaactgcaaattgtccttgccagctcttgggatccttggatacctggggccatttaagaagctaggggaattaggccacaacaccccctgggacatccgaaagctacaccacagatgccagtggttcatgccttcttcccgcaactttaggaaaatttatttatttattgtttattagttatggggggagaggggagatttaaaggaccagggacatgggaaccaagccatagggatcagagggccttgtccttgaacactactggggtatattcaggctcatccacgcagctgctgggttcttgccctaacggccctcccctgcaacatccgtcttggaggagaggctgcagccacagcaccctactgccctttaaataaaggagggctgtgggcagggccatgtccctttctcctctcccctcaacctcttactgctgttctccctttctccgtccttcatggaagccctgggagataacctggcttcctggagttgatggaataaaggttggggtggccataatggtttgttgggggtgagggaaaaaacccacagggaccagaatgttttgttgttcttttgttttcttttttgtaccaaagtcaactgcacgtgttttatatttttaagagatcgtaggcaattagagatcgaagcctcctatctccacatctctgaagaagttgaggggtgggggagagaatgacttctgccttcatctgcagtaacggggggacctatactgacctcttccccagccatttagaaacaagttctagggtgggttggaaaatctccaagagccctgacctcatcttccacctcagcaaccatgacctgaaacctcagcgtgaatttgggggatttttcagtggaacccttgcccccaaatgtcgaccagcccccaaatgtcgaagaattttcttcttgccaattttgttgtttaaaaaaaaaattcagggaaaattaaaaacctggaactcca

SEQ ID NO: 26372 - DNA, 4073 bp, Homo sapiens
  source 1..4073: mol_type = unassigned DNA
gctgggcagtgcccatgctgggatgtgctgctgctgtggctgctgcccgctgctggcccacctagagcaggggtcacttcgagagaggacccgggaaaaggagaagatgaaggaagccaaggatgcccgctataccaatgggcacctcttcaccaccatttcagtttcaggcatgaccatgtgctatgcctgtaacaagagcatcacagccaaggaagccctcatctgcccaacctgcaatgtgactatccacaaccgctgtaaagacaccctcgccaactgtaccaaggtcaagcagaagcaacagaaagcggccctgctgaagaacaacaccgccttgcagtccgtttctcttcgaagtaagacaaccatccgggagcggccaagctcggccatctacccctccgacagcttccggcagtccctcctgggctcccgccgtggccgctcctccttgtctttagccaagagtgtttctaccaccaacattgctggacatttcaatgatgagtctcccctggggctgcgccggatcctctcacagtccacagactccctcaacatgcggaaccgaaccctatccgtggaatccctcattgacgaagcagaggtaatctacagtgagctgatgagtgactttgagatggatgagaaggactttgcagctgactcttggagtcttgctgtggacagcagcttcctgcagcagcataaaaaggaggtgatgaagcagcaagatgtcatctatgagctaatccagacagagctgcaccatgtgaggacactgaagatcatgacccgcctcttccgcacggggatgctggaagagctacacttggagccaggagtggtccagggcctgttcccctgcgtggacgagctcagtgacatccatacacgcttcctcagccagctattagaacgccgacgccaggccctgtgccctggcagcacccggaactttgtcatccatcgcttgggtgatctgctcatcagccagttctcaggtcctagtgcggagcagatgtgtaagacctactcggagttctgcagccgccacagcaaggccttaaagctctataaggagctgtacgcccgagacaaacgcttccagcaattcatccggaaagtgacccgccccgccgtgctcaagcggcacggggtacaggagtgcatcctgctggtgactcagcgcatcaccaagtacccgttactcatcagccgcatcctgcagcattcccacgggatcgaggaggagcgccaggacctgaccacagcactggggctagtgaaggagctgctgtccaatgtggacgagggtatttatcagctggagaaaggggcccgtctgcaggagatctacaaccgcatggaccctcgggcccaaaccccagtgcctggcaagggcccctttggccgagaggaacttctgaggcgcaaactcatccacgatggctgcctgctctggaagacagcgacggggcgcttcaaagatgtgctagtgctgctgatgacagatgtactggtgtttctccaggaaaaggaccagaagtacatctttcctaccctggacaagccttcagtggtatcgctgcagaatctaatcgtacgagacattgccaaccaggagaaagggatgtttctgatcagcgcagccccacctgagatgtacgaggtgcacacagcatcccgggatgaccggagcacctggatccgggtcattcagcagagcgtgcgcacatgcccatccagggaggacttccccctgattgagacagaggatgaggcttacctgcggcgaattaagatggagttgcagcagaaggaccgggcactggtggagctgctgcgagagaaggtcgggctgtttgctgagatgacccatttccaggccgaagaggatggtggcagtgggatggccctgcccaccctgcccaggggccttttccgctctgagtcccttgagtcccctcgtggcgagcggctgctgcaggatgccatccgtgaggtggagggtctgaaagacctgctggtggggccaggagtggaactgctcttgacaccccgagagccagccctgcccttggaaccagacagcggtggtaacacgagtcctggggtcactgccaatggtgaggccagaaccttcaatggctccattgaactctgcagagctgactcagactctagccagagggatcgaaatggaaatcagctgagatcaccgcaagaggaggcgttacagcgattggtcaatctctatggacttctacatggcctacaggcagctgtggcccagcaggacactctgatggaagcccggttccctgagggccctgagcggcgggagaagctgtgccgagccaactctcgggatggggaggctggcagggctggggctgcccctgtggcccctgaaaagcaggccacggaactggcattactgcagcggcaacatgcgctgctgcaggaggagctacggcgctgccggcggctaggtgaagaacgggcaaccgaagctggcagcctggaggcccggctccgggagagtgagcaggcccgggcactgctggagcgtgaggccgaagaggctcgaaggcagctggccgccctgggccagaccgagccactcccagctgaggccccctgggcccgcagacctgtggatcctcggcggcgcagcctccccgcaggcgatgccctgtacttgagtttcaaccccccacagcccagccgaggcactgaccgcctggatctacctgtcactactcgctctgtccatcgaaactttgaggaccgagagaggcaggaactggggagccccgaagagcggctgcaagacagcagtgaccctgacactggcagcgaggaggaaggtagcagccgtctgtctccgccccacagtccacgagactttaccagaatgcaggacatcccggaggagacggagagccgcgacggggaggctgtagcctccgagagctaagggggcccctcccccctgccccgtgccccactgaagaacattactgagggggctaaccttggggactccaatttgccaatgatgagggaacatttgaaagaactgcaaattgtccttgccagctcttgggatccttggatacctggggccatttaagaagctaggggaattaggccacaacaccccctgggacatccgaaagctacaccacagatgccagtggttcatgccttcttcccgcaactttaggaaaatttatttatttattgtttattagttatggggggagaggggagatttaaaggaccagggacatgggaaccaagccatagggatcagagggccttgtccttgaacactactggggtatattcaggctcatccacgcagctgctgggttcttgccctaacggccctcccctgcaacatccgtcttggaggagaggctgcagccacagcaccctactgccctttaaataaaggagggctgtgggcagggccatgtccctttctcctctcccctcaacctcttactgctgttctccctttctccgtccttcatggaagccctgggagataacctggcttcctggagttgatggaataaaggttggggtggccataatggtttgttgggggtgagggaaaaaacccacagggaccagaatgttttgttgttcttttgttttcttttttgtaccaaagtcaactgcacgtgttttatatttttaagagatcgtaggcaattagagatcgaagcctcctatctccacatctctgaagaagttgaggggtgggggagagaatgacttctgccttcatctgcagtaacggggggacctatactgacctcttccccagccatttagaaacaagttctagggtgggttggaaaatctccaagagccctgacctcatcttccacctcagcaaccatgacctgaaacctcagcgtgaatttgggggatttttcagtggaacccttgcccccaaatgtcgaccagcccccaaatgtcgaagaattttcttcttgccaattttgttgtttaaaaaaaaaattcagggaaaattaaaaacctggaactcc

SEQ ID NO: 26373 - DNA, 4435 bp, Homo sapiens
  source 1..4435: mol_type = unassigned DNA
acattgtaggggctgctggccatggaagggcactgtctctctgctttgacaatggtccccttgaacaagttcctttagctctggaggagactgcaagcatcgggatgcccaggccccaaggaggccctcttcctgcagatccgagaaggactggacacctttctgggactgcagcaccagggtggctacgcctcccggctggatcaggattcctgtcatccatctgctggccctttggaccactcggccactggcatgctttccaagtctgtacccgtgagtggcatcaactgtctcttggaccgttcggatacagatgggaatgtatcccagtcctctgccattgacctcaggaaacgctgcagccagctggaaggacattcaggtacccgggtaggctcctccctgcgacagaccttcagcttcctctcgggcatgaccggaaaggccaagacccgggaaaaggagaagatgaaggaagccaaggatgcccgctataccaatgggcacctcttcaccaccatttcagtttcaggcatgaccatgtgctatgcctgtaacaagagcatcacagccaaggaagccctcatctgcccaacctgcaatgtgactatccacaaccgctgtaaagacaccctcgccaactgtaccaaggtcaagcagaagcaacagaaagcggccctgctgaagaacaacaccgccttgcagtccgtttctcttcgaagtaagacaaccatccgggagcggccaagctcggccatctacccctccgacagcttccggcagtccctcctgggctcccgccgtggccgctcctccttgtctttagccaagagtgtttctaccaccaacattgctggacatttcaatgatgagtctcccctggggctgcgccggatcctctcacagtccacagactccctcaacatgcggaaccgaaccctatccgtggaatccctcattgacgaagaggtaatctacagtgagctgatgagtgactttgagatggatgagaaggactttgcagctgactcttggagtcttgctgtggacagcagcttcctgcagcagcataaaaaggaggtgatgaagcagcaagatgtcatctatgagctaatccagacagagctgcaccatgtgaggacactgaagatcatgacccgcctcttccgcacggggatgctggaagagctacacttggagccaggagtggtccagggcctgttcccctgcgtggacgagctcagtgacatccatacacgcttcctcagccagctattagaacgccgacgccaggccctgtgccctggcagcacccggaactttgtcatccatcgcttgggtgatctgctcatcagccagttctcaggtcctagtgcggagcagatgtgtaagacctactcggagttctgcagccgccacagcaaggccttaaagctctataaggagctgtacgcccgagacaaacgcttccagcaattcatccggaaagtgacccgccccgccgtgctcaagcggcacggggtacaggagtgcatcctgctggtgactcagcgcatcaccaagtacccgttactcatcagccgcatcctgcagcattcccacgggatcgaggaggagcgccaggacctgaccacagcactggggctagtgaaggagctgctgtccaatgtggacgagggtatttatcagctggagaaaggggcccgtctgcaggagatctacaaccgcatggaccctcgggcccaaaccccagtgcctggcaagggcccctttggccgagaggaacttctgaggcgcaaactcatccacgatggctgcctgctctggaagacagcgacggggcgcttcaaagatgtgctagtgctgctgatgacagatgtactggtgtttctccaggaaaaggaccagaagtacatctttcctaccctggacaagccttcagtggtatcgctgcagaatctaatcgtacgagacattgccaaccaggagaaagggatgtttctgatcagcgcagccccacctgagatgtacgaggtgcacacagcatcccgggatgaccggagcacctggatccgggtcattcagcagagcgtgcgcacatgcccatccagggaggacttccccctgattgagacagaggatgaggcttacctgcggcgaattaagatggagttgcagcagaaggaccgggcactggtggagctgctgcgagagaaggtcgggctgtttgctgagatgacccatttccaggccgaagaggatggtggcagtgggatggccctgcccaccctgcccaggggccttttccgctctgagtcccttgagtcccctcgtggcgagcggctgctgcaggatgccatccgtgaggtggagggtctgaaagacctgctggtggggccaggagtggaactgctcttgacaccccgagagccagccctgcccttggaaccagacagcggtggtaacacgagtcctggggtcactgccaatggtgaggccagaaccttcaatggctccattgaactctgcagagctgactcagactctagccagagggatcgaaatggaaatcagctgagatcaccgcaagaggaggcgttacagcgattggtcaatctctatggacttctacatggcctacaggcagctgtggcccagcaggacactctgatggaagcccggttccctgagggccctgagcggcgggagaagctgtgccgagccaactctcgggatggggaggctggcagggctggggctgcccctgtggcccctgaaaagcaggccacggaactggcattactgcagcggcaacatgcgctgctgcaggaggagctacggcgctgccggcggctaggtgaagaacgggcaaccgaagctggcagcctggaggcccggctccgggagagtgagcaggcccgggcactgctggagcgtgaggccgaagaggctcgaaggcagctggccgccctgggccagaccgagccactcccagctgaggccccctgggcccgcagacctgtggatcctcggcggcgcagcctccccgcaggcgatgccctgtacttgagtttcaaccccccacagcccagccgaggcactgaccgcctggatctacctgtcactactcgctctgtccatcgaaactttgaggaccgagagaggcaggaactggggagccccgaagagcggctgcaagacagcagtgaccctgacactggcagcgaggaggaaggtagcagccgtctgtctccgccccacagtccacgagactttaccagaatgcaggacatcccggaggagacggagagccgcgacggggaggctgtagcctccgagagctaagggggcccctcccccctgccccgtgccccactgaagaacattactgagggggctaaccttggggactccaatttgccaatgatgagggaacatttgaaagaactgcaaattgtccttgccagctcttgggatccttggatacctggggccatttaagaagctaggggaattaggccacaacaccccctgggacatccgaaagctacaccacagatgccagtggttcatgccttcttcccgcaactttaggaaaatttatttatttattgtttattagttatggggggagaggggagatttaaaggaccagggacatgggaaccaagccatagggatcagagggccttgtccttgaacactactggggtatattcaggctcatccacgcagctgctgggttcttgccctaacggccctcccctgcaacatccgtcttggaggagaggctgcagccacagcaccctactgccctttaaataaaggagggctgtgggcagggccatgtccctttctcctctcccctcaacctcttactgctgttctccctttctccgtccttcatggaagccctgggagataacctggcttcctggagttgatggaataaaggttggggtggccataatggtttgttgggggtgagggaaaaaacccacagggaccagaatgttttgttgttcttttgttttcttttttgtaccaaagtcaactgcacgtgttttatatttttaagagatcgtaggcaattagagatcgaagcctcctatctccacatctctgaagaagttgaggggtgggggagagaatgacttctgccttcatctgcagtaacggggggacctatactgacctcttccccagccatttagaaacaagttctagggtgggttggaaaatctccaagagccctgacctcatcttccacctcagcaaccatgacctgaaacctcagcgtgaatttgggggatttttcagtggaacccttgcccccaaatgtcgaccagcccccaaatgtcgaagaattttcttcttgccaattttgttgtttaaaaaaaaaattcagggaaaattaaaaacctggaactcc

SEQ ID NO: 26374 - DNA, 2074 bp, Homo sapiens
  source 1..2074: mol_type = unassigned DNA
agtttgggtctgggctgtgcttatgccaacaggaagggctgggctgggggcaagcaacagggctgggctgaggcgaggcagtgttcctccctggtgcccgtcactggccactggatacagacggtagtggtggcgatgtgtgtttcaggaggagactgcaagcatcgggatgcccaggccccaaggaggccctcttcctgcagatccgagaaggactggacacctttctgggactgcagcaccagggtggctacgcctcccggctggatcaggattcctgtcatccatctgctggccctttggaccactcggccactggcatgctttccaagtctgtacccgtgagtggcatcaactgtctcttggaccgttcggatacagatgggaatgtatcccagtcctctgccattgacctcaggaaacgctgcagccagctggaaggacattcaggtacccgggtaggctcctccctgcgacagaccttcagcttcctctcgggcatgaccggaaaggccaagacccgggaaaaggagaagatgaaggaagccaaggatgcccgctataccaatgggcacctcttcaccaccatttcagtttcaggcatgaccatgtgctatgcctgtaacaagagcatcacagccaaggaagccctcatctgcccaacctgcaatgtgactatccacaaccgctgtaaagacaccctcgccaactgtaccaaggtcaagcagaagcaacagaaagcggccctgctgaagaacaacaccgccttgcagtccgtttctcttcgaagtaagacaaccatccgggagcggccaagctcggccatctacccctccgacagcttccggcagtccctcctgggctcccgccgtggccgctcctccttgtctttagccaagagtgtttctaccaccaacattgctggacatttcaatgatgagtctcccctggggctgcgccggatcctctcacagtccacagactccctcaacatgcggaaccgaaccctatccgtggaatccctcattgacgaagcagaggtaatctacagtgagctgatgagtgactttgagatggatgagaaggactttgcagctgactcttggagtcttgctgtggacagcagcttcctgcagcagcataaaaaggaggtgatgaagcagcaagatgtcatctatgagctaatccagacagagctgcaccatgtgaggacactgaagatcatgacccgcctcttccgcacggggatgctggaagagctacacttggagccaggagtggtccagggcctgttcccctgcgtggacgagctcagtgacatccatacacgcttcctcagccagctattagaacgccgacgccaggccctgtgccctggcagcacccggaactttgtcatccatcgcttgggtgatctgctcatcagccagttctcaggtcctagtgcggagcagatgtgtaagacctactcggagttctgcagccgccacagcaaggccttaaagctctataaggagctgtacgcccgagacaaacgcttccagcaattcatccggaaagtgacccgccccgccgtgctcaagcggcacggggtacaggagtgcatcctgctggtgactcagcgcatcaccaagtacccgttactcatcagccgcatcctgcagcattcccacgggatcgaggaggagcgccaggacctgaccacagcactggggctagtgaaggagctgctgtccaatgtggacgagggtatttatcagctggagaaaggggcccgtctgcaggagatctacaacctcttactgctgttctccctttctccgtccttcatggaagccctgggagataacctggcttcctggagttgatggaataaaggttggggtggccataatggtttgttgggggtgagggaaaaaacccacagggaccagaatgttttgttgttcttttgttttcttttttgtaccaaagtcaactgcacgtgttttatatttttaagagatcgtaggcaattagagatcgaagcctcctatctccacatctctgaagaagttgaggggtgggggagaga

SEQ ID NO: 26375 - DNA, 1774 bp, Homo sapiens
  source 1..1774: mol_type = unassigned DNA
agacacatggaaggccttcggtaaaagtggagaatcccaacctagtcccccaaagtagctggcagaggcggagctaggaggagggcagagtggggtcaggaaggccccagaagggtggggcatgtgggagaattctctcctctctgttcttcgacctctgggagtgaatcctacccttcccgtgtactgaagatccagcgtttagttctcctttgatttcctctccctctggccacccctgcccccaatcgtaaaaggggtcagtctgctcaggcctgctttgatgggaccccgaaggccaggaaggaactggtcctgggttttctaagagctgggggcggatggaattctcctgcctgcgggtctttaaagactgagacccgggaaaaggagaagatgaaggaagccaaggatgcccgctataccaatgggcacctcttcaccaccatttcagtttcaggcatgaccatgtgctatgcctgtaacaagagcatcacagccaaggaagccctcatctgcccaacctgcaatgtgactatccacaaccgctgtaaagacaccctcgccaactgtaccaaggtcaagcagaagcaacagaaagcggccctgctgaagaacaacaccgccttgcagtccgtttctcttcgaagtaagacaaccatccgggagcggccaagctcggccatctacccctccgacagcttccggcagtccctcctgggctcccgccgtggccgctcctccttgtctttagccaagagtgtttctaccaccaacattgctggacatttcaatgatgagtctcccctggggctgcgccggatcctctcacagtccacagactccctcaacatgcggaaccgaaccctatccgtggaatccctcattgacgaagcagaggtaatctacagtgagctgatgagtgactttgagatggatgagaaggactttgcagctgactcttggagtcttgctgtggacagcagcttcctgcagcagcataaaaaggaggtgatgaagcagcaagatgtcatctatgagctaatccagacagagctgcaccatgtgaggacactgaagatcatgacccgcctcttccgcacggggatgctggaagagctacacttggagccaggagtggtccagggcctgttcccctgcgtggacgagctcagtgacatccatacacgcttcctcagccagctattagaacgccgacgccaggccctgtgccctggcagcacccggaactttgtcatccatcgcttgggtgatctgctcatcagccagttctcaggtcctagtgcggagcagatgtgtaagacctactcggagttctgcagccgccacagcaaggccttaaagctctataaggagctgtacgcccgagacaaacgcttccagcaattcatccggaaagtgacccgccccgccgtgctcaagcggcacggggtacaggagtgcatcctgctggtgactcagcgcatcaccaagtacccgttactcatcagccgcatcctgcagcattcccacgggatcgaggaggagcgccaggacctgaccacagcactggggctagtgaaggagctgctgtccaatgtggacgagggtatttatcagctggagaaaggggcccgtctgcaggagatctacaacctcttactgctgttctccctttctccgtccttcatggaagccctgggagataacctggcttcctggagttgatggaataaaggttggggtggccataatggtttgttgggggtgaggg

SEQ ID NO: 26376 - DNA, 8292 bp, Homo sapiens
  source 1..8292: mol_type = unassigned DNA
caaggcggccggcggcgaccatggcagcgggccggcggcggccgtagtggcccaggcctgggcttcagcctcccggggccccagagggcggggcggtccgggccgcggcggtggcggcgccacttccctgctcccgcccgaggactcctgcgggcactcgctgaggaccagcggaccggcggcgcgaatctgactgaggggcggggacgccgtctgttccccgccgctcccggcagggccgggccgggctgggccgggctgggccgggcgggcccctgggagcagcccccaggcgggggaccgccttggagacccgaagccggagctagaggcaggcggtgggcccgggtggagtcccggccggagctggtggttcgggggcggtgctaggccccgaggctgcgggacctgagcgcgaggagcctgagtgcgggtccagcggtggcggcatgagccggcccccgccgacggggaaaatgcccggcgcccccgagaccgcgccgggggacggggcaggcgcgagccgccagaggaagctggaggcgctgatccgagaccctcgctcccccatcaacgtggagagcttgctggatggcttaaattccttggtccttgatttagattttcctgctttgaggaaaaacaagaacatagataatttcttaaatagatatgagaaaattgtgaaaaaaatcagaggtctacagatgaaggcagaagactatgatgttgtaaaagttattggaagaggtgcttttggtgaagtgcagttggttcgtcacaaggcatcgcagaaggtttatgctatgaagcttcttagtaagtttgaaatgataaaaagatcagattctgcctttttttgggaagaaagagatattatggcctttgccaatagcccctgggtggttcagcttttttatgcctttcaagatgataggtatctgtacatggtaatggagtacatgcctggtggagaccttgtaaaccttatgagtaattatgatgtgcctgaaaaatgggccaaattttacactgctgaagttgttcttgctctggatgcaatacactccatgggtttaatacacagagatgtgaagcctgacaacatgctcttggataaacatggacatctaaaattagcagattttggcacgtgtatgaagatggatgaaacaggcatggtacattgtgatacagcagttggaacaccggattatatatcacctgaggttctgaaatcacaagggggtgatggtttctatgggcgagaatgtgattggtggtctgtaggtgttttcctttatgagatgctagtgggggatactccattttatgcggattcacttgtaggaacatatagcaaaattatggatcataagaattcactgtgtttccctgaagatgcagaaatttccaaacatgcaaagaatctcatctgtgctttcttaacagatagggaggtacgacttgggagaaatggggtggaagaaatcagacagcatcctttctttaagaatgatcagtggcattgggataacataagagaaacggcagctcctgtagtacctgaactcagcagtgacatagacagcagcaatttcgatgacattgaagatgacaaaggagatgtagaaaccttcccaattcctaaagcttttgttggaaatcagctgcctttcatcggatttacctactatagagaaaatttattattaagtgactctccatcttgtagagaaactgattccatacaatcaaggaaaaatgaagaaagtcaagagattcagaaaaaactgtatacattagaagaacatcttagcaatgagatgcaagccaaagaggaactggaacagaagtgcaaatctgttaatactcgcctagaaaaaacagcaaaggagctagaagaggagattaccttacggaaaagtgtggaatcagcattaagacagttagaaagagaaaaggcgcttcttcagcacaaaaatgcagaatatcagaggaaagctgatcatgaagcagacaaaaaacgaaatttggaaaatgatgttaacagcttaaaagatcaacttgaagatttgaaaaaaagaaatcaaaactctcaaatatccactgagaaagtgaatcaactccagagacaactggatgaaaccaatgctttactgcgaacagagtctgatactgcagcccggttaaggaaaacccaggcagaaagttcaaaacagattcagcagctggaatctaacaatagagatctacaagataaaaactgcctgctggagactgccaagttaaaacttgaaaaggaatttatcaatcttcagtcagctctagaatctgaaaggagggatcgaacccatggatcagagataattaatgatttacaaggtagaatatgtggcctagaagaagatttaaagaacggcaaaatcttactagcgaaagtagaactggagaagagacaacttcaggagagatttactgatttggaaaaggaaaaaagcaacatggaaatagatatgacataccaactaaaagttatacagcagagcctagaacaagaagaagctgaacataaggccacaaaggcacgactagcagataaaaataagatctatgagtccatcgaagaagccaaatcagaagccatgaaagaaatggagaagaagctcttggaggaaagaactttaaaacagaaagtggagaacctattgctagaagctgagaaaagatgttctctattagactgtgacctcaaacagtcacagcagaaaataaatgagctccttaaacagaaagatgtgctaaatgaggatgttagaaacctgacattaaaaatagagcaagaaactcagaagcgctgccttacacaaaatgacctgaagatgcaaacacaacaggttaacacactaaaaatgtcagaaaagcagttaaagcaagaaaataaccatctcatggaaatgaaaatgaacttggaaaaacaaaatgctgaacttcgaaaagaacgtcaggatgcagatgggcaaatgaaagagctccaggatcagctcgaagcagaacagtatttctcaaccctttataaaacacaagttagggagcttaaagaagaatgtgaagaaaagaccaaacttggtaaagaattgcagcagaagaaacaggaattacaggatgaacgggactctttggctgcccaactggagatcaccttgaccaaagcagattctgagcaactggctcgttcaattgctgaagaacaatattctgatttggaaaaagagaagatcatgaaagagctggagatcaaagagatgatggctagacacaaacaggaacttacggaaaaagatgctacaattgcttctcttgaggaaactaataggacactaactagtgatgttgccaatcttgcaaatgagaaagaagaattaaataacaaattgaaagatgttcaagagcaactgtcaagattgaaagatgaagaaataagcgcagcagctattaaagcacagtttgagaagcagctattaacagaaagaacactcaaaactcaagctgtgaataagttggctgagatcatgaatcgaaaagaacctgtcaagcgtggtaatgacacagatgtgcggagaaaagagaaggagaatagaaagctacatatggagcttaaatctgaacgtgagaaattgacccagcagatgatcaagtatcagaaagaactgaatgaaatgcaggcacaaatagctgaagagagccagattcgaattgaactgcagatgacattggacagtaaagacagtgacattgagcagctgcggtcacaactccaagccttgcatattggtctggatagttccagtataggcagtggaccaggggatgctgaggcagatgatgggtttccagaatcaagattagaaggatggctttcattgcctgtacgaaacaacactaagaaatttggatgggttaaaaagtatgtgattgtaagcagtaagaagattcttttctatgacagtgaacaagataaagaacaatccaatccttacatggttttagatatagacaagttatttcatgtccgaccagttacacagacagatgtgtatagagcagatgctaaagaaattccaaggatattccagattctgtatgccaatgaaggagaaagtaagaaggaacaagaatttccagtggagccagttggagaaaaatctaattatatttgccacaagggacatgagtttattcctactctttatcatttcccaaccaactgtgaggcttgtatgaagcccctgtggcacatgtttaagcctcctcctgctttggagtgccgccgttgccatattaagtgtcataaagatcatatggacaaaaaggaggagattatagcaccttgcaaagtatattatgatatttcaacggcaaagaatctgttattactagcaaattctacagaagagcagcagaagtgggttagtcggttggtgaaaaagatacctaaaaagcccccagctccagacccttttgcccgatcatctcctagaacttcaatgaagatacagcaaaaccagtctattagacggccaagtcgacagcttgccccaaacaaacctagctaactgccttctatgaaagcagtcattattcaaggtgatcgtattcttccagtgaaaacaagactgaaatatgatggcccaaaatttattaaaaagctatattttcctgagagactgatacatacactcatacatatatgtgttccccttttccctgtaatataaattacaaatctgggctcctttgaagcaacaggttgaaccaacaatgattggttgatagactaaggatatatgcaactcttccagacttttccataaagctctctcggcagtcgctcacactacaatgcacacaaggattgagaagagttaaaggctaaagaaaacatcttttctagcttcaacagagaggtttcaccagcacatttaccagaagaatctgggaatggattccactacagtgatattgactgcatctttaagaagtgaccattatactgtgtatatatatataaacacacacacatatatatatatatatatagtactctaatactgcaagaaggttttttaaacttcccactttattttttatacacattaatcagatatcattacttgctgcagttgcaactatgcacttgtataaagccataatgttggagtttatatcactcattcctgtgtacctgatggaagttgcatgttcatgtttaagcagttactgtaacaagaagtttaaagttaattatatcagtttcctaatgcttcatgataggcaactttacccattttgaatgccttaatttaatttttttcaaagtctcagccctgtctgtattaaaaaacaaaaaaagcgtttaccagctcttaggatgtaaactagctttgtggaagataaatcgtgcactatttttacacataaatagttatatcaatgtcagcctattttgattaacaaatgtttttaaagtattattggttatagaaacaataatggatggtgttggaactaatatatccttgatgtctgtctattattcattcaactctttttacagacctcagtattagtctgtgactacaaaatattttatttgctttaaatttgctggctaccctagatgtgtttttattcctggtaaagacatttgtgattacattttcacacttaagattcaaaatttttcccaaatataaagaaaactaagacagactgtagatgcattttaaatatttaaatatgatcctcagacatgcagctgtgtgtggcagtattttagtaccgggttaagaaaactggcaactgggaagaagtggcctcaaaggcacttaatttgatttttattttttaaatgctgtcaaagttacagtttacgcaggacattcttgccgtattctcatgatcccagataagtgtgtgttttatactgcaacaatatgcagcaatggtaagcgtaaagttttttttttgtttttgtttttttttatattatgaagtcttttaacagtctctctttatataaatacacagagtttggtatgatatttaaatacatcatctggccaggcatggtggcttacgcctgtaatcctagcactttgggaggccaagacgggcggatcacctgaggtgaggagttcaagaccagcctgcccaacatagtgaaactccgtctctaccaatatacaaaaattagccgggcatgatggtggtggcctgtaatcccagctacttgggaggctgagacaggagaatcgcttgaacccaggagacggtggttgcagtgagcgaagatcgagccactgcactccagcctgggcagctgaacaagactccgtctcaaaaaaaaaaaaaaaaaaaagtcatctaatatttcgatgaaggaaatagacatttttcattgattccctctgatgtcagttagagatatttaaaaagttagatccccataatagatactattgtggaaactgaagagtagctactggcctactgatagactgaaactggttttgttattcttaacgttctccagtctgcactctgctgtgctgtctgtgctcagactagacgtgcatgccgtttcctttgcaggtgtgttctgcagctctggttttgggggatagctcttttttaagtaagattaaaaaatgaaaaatatataaatttatatagaataaatatttccattcattagagttgttaaaaggagactgaattaatattttatataaagattttgttacattatgggaggttctatcctattctgaattggagagtatatatatatatatatatatatatatatttttaataaactttattaaggtgaaataatttcaagtttacatatgagtaactgaaatatttgagtaaaaaaggcaaaagtttaaatttggaatgctgtatatattagagaatatggggaatcatggtgtgaccaactgtacaaggaagattcatatgaaggtcttaggggaaaaagataattctgaagggtgaaaaaaaaatctctcccatggagattcttcacattatatggtttgacataagggtttataaggttgtttgtccaactaatgaaaatgcgcttaataaaaaattctgaccttgggtaagaattcgctttttaccgcattgccgctttcatgtacatacatgagtgcatgcacctatcaatgtgttttcttcccaacacttattaaatataaaacaacctgattttgtgctcgtttctcgtttttcttgaggccctgaagcttccaagataaatataagactaaaatttgcttgttccttcacacctgatttctcctagaaccataaatacctcctatggggaactaagaaatcatgaatactgggattttcttattggattttttacttttgttttgtggggataacgagacagaagtgaaaggaaaactggtgccggtattactgttgaaattaatgtacagtgaatgtttttaaagtattaattttaaaaaaccatgttctctagaaacaagttttaaaaatctatatgaaagttttaaaatgttccagctaactaatggataagcataccagtaaagccaaagtaaaggttagtgcctttaaaactaacctgtgttagagttacatgaatctggctctaaagtatctattttgcatccatttatatatagatcttaaacagaaatactctaggttgccacaccacagttttaagaagttatgctgctgctgttactctcttctaggattctggtggtaaagtagagaaactcggacactatattaaccttactgaaacatgctttaaatcgtgtctaaaatctgatttgagcaagtcactgccgagcttctgagtctgcattgacactgctactgactcacctctccttccctggaataaggcttcagcttccctatgctgtgaagacaccatttgtaagcactttgaacataagcactgtgtgacagcgctggatatcatgcttgggggggggcctctccctgactcccatccccataataatgagttttgtttggaattgtaataagtaatgaactgcatggtttagaaaattataaatatttgatcagctgtcctctctgaaaaaaattgcacccctttttcttttttaaaattttgttgcatcttcgtagtaatgtaattgtattttatgcctgcttttttataaaaaaataaaataaaataaatggagacataagcatttt

SEQ ID NO: 26377 - DNA, 2700 bp, Homo sapiens
  source 1..2700: mol_type = unassigned DNA
aagtgtgtgtatgtgtgttatgctaagcttgccactgaaatgctttttatcatagttaacagcttaaaagatcaacttgaagatttgaaaaaaagaaatcaaaactctcaaatatccactgagaaagtgaatcaactccagagacaactggatgaaaccaatgctttactgcgaacagagtctgatactgcagcccggttaaggaaaacccaggcagaaagttcaaaacagattcagcagctggaatctaacaatagagatctacaagataaaaactgcctgctggagactgccaagttaaaacttgaaaaggaatttatcaatcttcagtcagctctagaatctgaaaggagggatcgaacccatggatcagagataattaatgatttacaaggtagaatgtggcctagaagaagatttaaagaacggcaaaatcttactagcgaaagtagaactggagaagagacaacttcaggagagatttactgatttggaaaaggaaaaaagcaacatggaaatagatatgacataccaactaaaagttatacagcagagcctagaacaagaagaagctgaacataaggccacaaaggcacgactagcagataaaaataagatctatgagtccatcgaagaagccaaatcagaagccatgaaagaaatggagaagaagctcttggaggaaagaactttaaaacagaaagtggagaacctattgctagaagctgagaaaagatgttctctattagactgtgacctcaaacagtcacagcagaaaataaatgagctccttaaacagaaagatgtgctaaatgaggatgttagaaacctgacattaaaaatagagcaagaaactcagaagcgctgccttacacaaaatgacctgaagatgcaaacacaacaggttaacacactaaaaatgtcagaaaagcagttaaagcaagaaaataaccatctcatggaaatgaaaatgaacttggaaaaacaaaatgctgaacttcgaaaagaacgtcaggatgcagatgggcaaatgaaagagctccaggatcagctcgaagcagaacagtatttctcaaccctttataaaacacaagttagggagcttaaagaagaatgtgaagaaaagaccaaacttggtaaagaattgcagcagaagaaacaggaattacaggatgaacgggactctttggctgcccaactggagatcaccttgaccaaagcagattctgagcaactggctcgttcaattgctgaagaacaatattctgatttggaaaaagagaagatcatgaaagagctggagatcaaagagatgatggctagacacaaacaggaacttacggaaaaagatgctacaattgcttctcttgaggaaactaataggacactaactagtgatgttgccaatcttgcaaatgagaaagaagaattaaataacaaattgaaagatgttcaagagcaactgtcaagattgaaagatgaagaaataagcgcagcagctattaaagcacagtttgagaagcagctattaacagaaagaacactcaaaactcaagctgtgaataagttggctgagatcatgaatcgaaaagaacctgtcaagcgtggtaatgacacagatgtgcggagaaaagagaaggagaatagaaagctacatatggagcttaaatctgaacgtgagaaattgacccagcagatgatcaagtatcagaaagaactgaatgaaatgcaggcacaaatagctgaagagagccagattcgaattgaactgcagatgacattggacagtaaagacagtgacattgagcagctgcggtcacaactccaagccttgcatattggtctggatagttccagtataggcagtggaccaggggatgctgaggcagatgatgggtttccagaatcaagattagaaggatggctttcattgcctgtacgaaacaacactaagaaatttggatgggttaaaaagtatgtgattgtaagcagtaagaagattcttttctatgacagtgaacaagataaagaacaatccaatccttacatggttttagatatagacaagttatttcatgtccgaccagttacacagacagatgtgtatagagcagatgctaaagaaattccaaggatattccagattctgtatgccaatgaaggagaaagtaagaaggaacaagaatttccagtggagccagttggagaaaaatctaattatatttgccacaagggacatgagtttattcctactctttatcatttcccaaccaactgtgaggcttgtatgaagcccctgtggcacatgtttaagcctcctcctgctttggagtgccgccgttgccatattaagtgtcataaagatcatatggacaaaaaggaggagattatagcaccttgcaaagtatattatgatatttcaacggcaaagaatctgttattactagcaaattctacagaagagcagcagaagtgggttagtcggttggtgaaaaagatacctaaaaagcccccagctccagacccttttgcccgatcatctcctagaacttcaatgaagatacagcaaaaccagtctattagacggccaagtcgacagcttgccccaaacaaacctagctaactgccttctatgaaagcagtcattattcaaggtgatcgtattcttccagtgaaaacaagactgaaatatgatggccc

SEQ ID NO: 26378 - DNA, 4017 bp, Homo sapiens
  source 1..4017: mol_type = unassigned DNA
atgggccatttttgtctatcttaatctatccagctagaacttaatatccctatatatttttggtctttttgatagagtctgttatattctgcaacccttaatcaatgtttaataggtggagttttttattgtacccaaagctccctcttgtggtatttggtataatatagtgtgaaatgattaacagtgcaaattatctttaatgaaaatgaagtatgaaataatttcctaatagaatgctaaacttatgtctgctatacataagagaagatgtttttgtgttgtacttccatgaatgtattgcgattttcattaaaccaaaaacttttggcactagggtacagacaaataaatcataccacatatttttagggaagataagggtggttaaggagagcaaggtgtagagaagaagaatatggggaacgggatagaatatggtacctacagaataattgtataagcatacaggcatggtacattgtgatacagcagttggaacaccggattatatatcacctgaggttctgaaatcacaagggggtgatggtttctatgggcgagaatgtgattggtggtctgtaggtgttttcctttatgagatgctagtgggggatactccattttatgcggattcacttgtaggaacatatagcaaaattatggatcataagaattcactgtgtttccctgaagatgcagaaatttccaaacatgcaaagaatctcatctgtgctttcttaacagatagggaggtacgacttgggagaaatggggtggaagaaatcagacagcatcctttctttaagaatgatcagtggcattgggataacataagagaaacggcagctcctgtagtacctgaactcagcagtgacatagacagcagcaatttcgatgacattgaagatgacaaaggagatgtagaaaccttcccaattcctaaagcttttgttggaaatcagctgcctttcatcggatttacctactatagagaaaatttattattaagtgactctccatcttgtagagaaactgattccatacaatcaaggaaaaatgaagaaagtcaagagattcagaaaaaactgtatacattagaagaacatcttagcaatgagatgcaagccaaagaggaactggaacagaagtgcaaatctgttaatactcgcctagaaaaaacagcaaaggagctagaagaggagattaccttacggaaaagtgtggaatcagcattaagacagttagaaagagaaaaggcgcttcttcagcacaaaaatgcagaatatcagaggaaagctgatcatgaagcagacaaaaaacgaaatttggaaaatgatgttaacagcttaaaagatcaacttgaagatttgaaaaaaagaaatcaaaactctcaaatatccactgagaaagtgaatcaactccagagacaactggatgaaaccaatgctttactgcgaacagagtctgatactgcagcccggttaaggaaaacccaggcagaaagttcaaaacagattcagcagctggaatctaacaatagagatctacaagataaaaactgcctgctggagactgccaagttaaaacttgaaaaggaatttatcaatcttcagtcagctctagaatctgaaaggagggatcgaacccatggatcagagataattaatgatttacaaggtagaatatgtggcctagaagaagatttaaagaacggcaaaatcttactagcgaaagtagaactggagaagagacaacttcaggagagatttactgatttggaaaaggaaaaaagcaacatggaaatagatatgacataccaactaaaagttatacagcagagcctagaacaagaagaagctgaacataaggccacaaaggcacgactagcagataaaaataagatctatgagtccatcgaagaagccaaatcagaagccatgaaagaaatggagaagaagctcttggaggaaagaactttaaaacagaaagtggagaacctattgctagaagctgagaaaagatgttctctattagactgtgacctcaaacagtcacagcagaaaataaatgagctccttaaacagaaagatgtgctaaatgaggatgttagaaacctgacattaaaaatagagcaagaaactcagaagcgctgccttacacaaaatgacctgaagatgcaaacacaacaggttaacacactaaaaatgtcagaaaagcagttaaagcaagaaaataaccatctcatggaaatgaaaatgaacttggaaaaacaaaatgctgaacttcgaaaagaacgtcaggatgcagatgggcaaatgaaagagctccaggatcagctcgaagcagaacagtatttctcaaccctttataaaacacaagttagggagcttaaagaagaatgtgaagaaaagaccaaacttggtaaagaattgcagcagaagaaacaggaattacaggatgaacgggactctttggctgcccaactggagatcaccttgaccaaagcagattctgagcaactggctcgttcaattgctgaagaacaatattctgatttggaaaaagagaagatcatgaaagagctggagatcaaagagatgatggctagacacaaacaggaacttacggaaaaagatgctacaattgcttctcttgaggaaactaataggacactaactagtgatgttgccaatcttgcaaatgagaaagaagaattaaataacaaattgaaagatgttcaagagcaactgtcaagattgaaagatgaagaaataagcgcagcagctattaaagcacagtttgagaagcagctattaacagaaagaacactcaaaactcaagctgtgaataagttggctgagatcatgaatcgaaaagaacctgtcaagcgtggtaatgacacagatgtgcggagaaaagagaaggagaatagaaagctacatatggagcttaaatctgaacgtgagaaattgacccagcagatgatcaagtatcagaaagaactgaatgaaatgcaggcacaaatagctgaagagagccagattcgaattgaactgcagatgacattggacagtaaagacagtgacattgagcagctgcggtcacaactccaagccttgcatattggtctggatagttccagtataggcagtggaccaggggatgctgaggcagatgatgggtttccagaatcaagattagaaggatggctttcattgcctgtacgaaacaacactaagaaatttggatgggttaaaaagtatgtgattgtaagcagtaagaagattcttttctatgacagtgaacaagataaagaacaatccaatccttacatggttttagatatagacaagttatttcatgtccgaccagttacacagacagatgtgtatagagcagatgctaaagaaattccaaggatattccagattctgtatgccaatgaaggagaaagtaagaaggaacaagaatttccagtggagccagttggagaaaaatctaattatatttgccacaagggacatgagtttattcctactctttatcatttcccaaccaactgtgaggcttgtatgaagcccctgtggcacatgtttaagcctcctcctgctttggagtgccgccgttgccatattaagtgtcataaagatcatatggacaaaaaggaggagattatagcaccttgcaaagtatattatgatatttcaacggcaaagaatctgttattactagcaaattctacagaagagcagcagaagtgggttagtcggttggtgaaaaagatacctaaaaagcccccagctccagacccttttgcccgatcatctcctagaacttcaatgaagatacagcaaaaccagtctattagacggccaagtcgacagcttgccccaaacaaacctagctaactgccttctatgaaagcagtcattattcaaggtgatcgtattcttccagtgaaaacaagactgaaatatgatggcccaaaatttattaaaaagctatattttcctg

SEQ ID NO: 26379 - DNA, 2992 bp, Homo sapiens
  source 1..2992: mol_type = unassigned DNA
gcattcccgggcgggccggaccggcgggcgggcggggactcggcgcgggccctcccggccagcggcggcagcctcctccccggcgccctcaggaccccccagagcccccggcggcggcagcctgccttgctctgccaggaaccatgagtgaggcccgcagggacagcacgagcagcctgcagcgcaagaagccaccctggctaaagctggacattccctctgcggtgcccctgacggcagaagagcccagcttcctgcagcccctgaggcgacaggctttcctgaggagtgtgagtatgccagccgagacagcccacatctcttcaccccaccatgagctccggcggccggtgctgcaacgccagacgtccatcacacagaccatccgcagggggaccgccgactggtttggagtgagcaaggacagtgacagcacccagaaatggcagcgcaagagcatccgtcactgcagccagcgctacgggaagctgaagccccaggtcctccgggagctggacctgcccagccaggacaacgtgtcgctgaccagcaccgagacgccacccccactctacgtggggccatgccagctgggcatgcagaagatcatagaccccctggcccgtggccgtgccttccgtgtggcagatgacactgcggaaggcctgagtgccccacacactcccgtcacgccgggtgctgcctccctctgctccttctccagctcccgctcaggtttccaccggctcccgcggcggcgcaagcgagagtcggtggccaagatgagcttccgggcggccgcagcgctgatgaaaggccgctccgttagggatggcacctttcgccgggcacagcgtcgaagcttcactccagctagctttctggaggaggacacaactgatttccccgatgagctggacacatccttctttgcccgggaaggtatcctccatgaagagctgtccacatacccggatgaagttttcgagtccccatcggaggcagcgctaaaggactgggagaaggcaccggagcaggcggacctcaccggcggggccctggaccgcagcgagcttgagcgcagccacctgatgctgcccttggagcgaggctggcggaagcagaaggagggcgccgcagccccgcagcccaaggtgcggctccgacaggaggtggtgagcaccgcggggccgcgacggggccagcgtatcgcggtgccggtgcgcaagctcttcgcccgggagaagcggccgtatgggctgggcatggtgggacggctcaccaaccgcacctaccgcaagcgcatcgacagcttcgtcaagcgccagatcgaggacatggacgaccacaggcccttcttcacctactggcttaccttcgtgcactcgctcgtcaccatcctagccgtgtgcatctatggcatcgcgcccgtgggcttctcgcagcatgagacggtggactcggtgctgcggaaccgcggggtctacgagaacgtcaagtacgtgcagcaggagaacttctggatcgggcccagctcggaggccctcatccacctgggcgccaagttttcgccctgcatgcgccaggacccgcaggtgcacagcttcattcgctcggcgcgcgagcgcgagaagcactccgcctgctgcgtgcgcaacgacaggtcgggctgcgtgcagacctcggaggaggagtgctcgtccacgctggcagtgtgggtgaagtggcccatccatcccagcgccccagagcttgcgggccacaagagacagtttggctctgtctgccaccaggatcccagggtgtgtgatgagccctcctccgaagaccctcatgagtggccagaagacatcaccaagtggccgatctgcaccaaaaacagcgctgggaaccacaccaaccatccccacatggactgtgtcatcacaggacggccctgctgcattggcaccaagggcaggtgtgagatcacctcccgggagtactgtgacttcatgaggggctacttccatgaggaggccacgctctgctctcaggtgcactgcatggatgatgtgtgtgggctcctgccttttctcaaccccgaggtgcctgaccagttctaccgcctgtggctatccctcttcctgcacgccgggatcttgcactgcctggtgtccatctgcttccagatgactgtcctgcgggacctggagaagctggcaggctggcaccgcatagccatcatctacctgctgagtggtgtcaccggcaacctggccagtgccatcttcctgccataccgagcagaggtgggtcctgctggctcccagttcggcatcctggcctgcctcttcgtggagctcttccagagctggcagatcctggcgcggccctggcgtgccttcttcaagctgctggctgtggtgctcttcctcttcacctttgggctgctgccgtggattgacaactttgcccacatctcagggttcatcagtggcctcttcctctccttcgccttcttgccctacatcagctttggcaagttcgacctgtaccggaaacgctgccagatcatcatctttcaggtggtcttcctgggcctcctggctggcctggtggtcctcttctacgtctatcctgtccgctgtgagtggtgtgagttcctcacctgcatccccttcactgacaagttctgtgagaagtacgaactggacgctcagctccactgagctggctgcgggctccagcggccgtgtgctccagcaggccagagccagacacgacctccctgagcctcacaggcttacaggagtcacctgctccatgtggggactggcctgtttcctgaacacagacctctttcttgtgccttgttcacttctgttgaacccctcgtactgccgggcatttattatactacttcctgtcataaccttctaacttgtttcttgacgaccacctcatgtggccaataaatggactgggagcgttttagctgccattaacttga

SEQ ID NO: 26380 - DNA, 1979 bp, Homo sapiens
  source 1..1979: mol_type = unassigned DNA
atgctcccaccacaggctggaagcggtgggatgagagttccaactgtggcctgcagagtgggctggcgggctggtccaggacaagagaaagtggtgccaggcctgccttgctctgccaggaaccatgagtgaggcccgcagggacagcacgagcagcctgcagcgcaagaagccaccctggctaaagctggacattccctctgcggtgcccctgacggcagaagagcccagcttcctgcagcccctgaggcgacaggctttcctgaggagtgtgagtatgccagccgagacagcccacatctcttcaccccaccatgagctccggcggccggtgctgcaacgccagacgtccatcacacagaccatccgcagcagccgacaagtacgcttcgggcgtgtccacactctgcccctcttgggtccccgggctgcccgcagggccttcccacagcgccagtctctctcttggtccctgctcagggggaccgccgactggtttggagtgagcaaggacagtgacagcacccagaaatggcagcgcaagagcatccgtcactgcagccagcgctacgggaagctgaagccccaggtcctccgggagctggacctgcccagccaggacaacgtgtcgctgaccagcaccgagacgccacccccactctacgtggggccatgccagctgggcatgcagaagatcatagaccccctggcccgtggccgtgccttccgtgtggcagatgacactgcggaaggcctgagtgccccacacactcccgtcacgccgggtgctgcctccctctgctccttctccagctcccgctcaggtttccaccggctcccgcggcggcgcaagcgagagtcggtggccaagatgagcttccgggcggccgcagcgctgatgaaaggccgctccgttagggatggcacctttcgccgggcacagcgtcgaagcttcactccagctagctttctggaggaggacacaactgatttccccgatgagctggacacatccttctttgcccgggaaggtatcctccatgaagagctgtccacatacccggatgaagttttcgagtccccatcggaggcagcgctaaaggactgggagaaggcaccggagcaggcggacctcaccggcggggccctggaccgcagcgagcttgagcgcagccacctgatgctgcccttggagcgaggctggcggaagcagaaggagggcgccgcagccccgcagcccaaggtgcggctccgacaggaggtggtgagcaccgcggggccgcgacggggccagcgtatcgcggtgccggtgcgcaagctcttcgcccgggagaagcggccgtatgggctgggcatggtgggacggctcaccaaccgcacctaccgcaagcgcatcgacagcttcgtcaagcgccagatcgaggacatggacgaccacaggcccttcttcacctactggcttaccttcgtgcactcgctcgtcaccatcctagccgtgtgcatctatggcatcgcgcccgtgggcttctcgcagcatgagacggtggactcggtgctgcggaaccgcggggtctacgagaacgtcaagtacgtgcagcaggagaacttctggatcgggcccagctcggtgaggacggggctgggggcggggccggcgggggcgggacctggaggtgcccggcgggggcaggaggccccggactgcggccgctcgtctccctcgcccgcaggaggccctcatccacctgggcgccaagttttcgccctgcatgcgccaggacccgcaggtgcacagcttcattcgctcggcgcgcgagcgcgagaagcactccgcctgctgcgtgcgcaacgacaggtcgggctgcgtgcagacctcggaggaggagtgctcggtgcgtttccccgcccgggactcccgccttcgtctgcccggtgttcgctcttcagacctcagatagactcggcagagtgatccttcg

SEQ ID NO: 26381 - DNA, 901 bp, Homo sapiens
  source 1..901: mol_type = unassigned DNA
gacggccctgctgcattggcaccaagggcaggtgtgagatcacctcccgggagtactgtgacttcatgaggggctacttccatgaggaggccacgctctgctctcaggtgcactgcatggatgatgtgtgtgggctcctgccttttctcaaccccgagatgactgtcctgcgggacctggagaagctggcaggctggcaccgcatagccatcatctacctgctgagtggtgtcaccggcaacctggccagtgccatcttcctgccataccgagcagaggtgggtcctgctggctcccagttcggcatcctggcctgcctcttcgtggagctcttccagagctggcagatcctggcgcggccctggcgtgccttcttcaagctgctggctgtggtgctcttcctcttcacctttgggctgctgccgtggattgacaactttgcccacatctcagggttcatcagtggcctcttcctctccttcgccttcttgccctacatcagctttggcaagttcgacctgtaccggaaacgctgccagatcatcatctttcaggtggtcttcctgggcctcctggctggcctggtggtcctcttctacgtctatcctgtccgctgtgagtggtgtgagttcctcacctgcatccccttcactgacaagttctgtgagaagtacgaactggacgctcagctccactgagctggctgcgggctccagcggccgtgtgctccagcaggccagagccagacacgacctccctgagcctcacaggcttacaggagtcacctgctccatgtggggactggcctgtttcctgaacacagacctctttcttgtgccttgttcacttctgttgaacccctcgtactgccgggcatttattatactacttcctgtcataa

SEQ ID NO: 26382 - DNA, 615 bp, Homo sapiens
  source 1..615: mol_type = unassigned DNA
ctcatgctcccaccacaggctggaagcggtgggatgagagttccaactgtggcctgcagagtgggctggcgggctggtccaggacaagagaaagtggtgccaggcctgccttgctctgccaggaaccatgagtgaggcccgcagggacagcacgagcagcctgcagcgcaagaagccaccctggctaaagctggacattccctctgcggtgcccctgacggcagaagagcccagcttcctgcagcccctgaggcgacaggctttcctgaggagtgtgagtatgccagccgagacagcccacatctcttcaccccaccatgagctccggcggccggtgctgcaacgccagacgtccatcacacagaccatccgcagggggaccgccgactggtttggagtgagcaaggacagtgacagcacccagaaatggcagcgcaagagcatccgtcactgcagccagcgctacgggaagctgaagccccaggtcctccgggagctggacctgcccagccaggacaacgtgtcgctgaccagcaccgagacgccacccccactctacgtggggccatgccagctgggcatgcagaagatcatagaccccctggcccgtggccg

SEQ ID NO: 26383 - DNA, 1871 bp, Homo sapiens
  source 1..1871: mol_type = unassigned DNA
atgctcccaccacaggctggaagcggtgggatgagagttccaactgtggcctgcagagtgggctggcgggctggtccaggacaagagaaagtggtgccaggcctgccttgctctgccaggaaccatgagtgaggcccgcagggacagcacgagcagcctgcagcgcaagaagccaccctggctaaagctggacattccctctgcggtgcccctgacggcagaagagcccagcttcctgcagcccctgaggcgacaggctttcctgaggagtgtgagtatgccagccgagacagcccacatctcttcaccccaccatgagctccggcggccggtgctgcaacgccagacgtccatcacacagaccatccgcagggggaccgccgactggtttggagtgagcaaggacagtgacagcacccagaaatggcagcgcaagagcatccgtcactgcagccagcgctacgggaagctgaagccccaggtcctccgggagctggacctgcccagccaggacaacgtgtcgctgaccagcaccgagacgccacccccactctacgtggggccatgccagctgggcatgcagaagatcatagaccccctggcccgtggccgtgccttccgtgtggcagatgacactgcggaaggcctgagtgccccacacactcccgtcacgccgggtgctgcctccctctgctccttctccagctcccgctcaggtttccaccggctcccgcggcggcgcaagcgagagtcggtggccaagatgagcttccgggcggccgcagcgctgatgaaaggccgctccgttagggatggcacctttcgccgggcacagcgtcgaagcttcactccagctagctttctggaggaggacacaactgatttccccgatgagctggacacatccttctttgcccgggaaggtatcctccatgaagagctgtccacatacccggatgaagttttcgagtccccatcggaggcagcgctaaaggactgggagaaggcaccggagcaggcggacctcaccggcggggccctggaccgcagcgagcttgagcgcagccacctgatgctgcccttggagcgaggctggcggaagcagaaggagggcgccgcagccccgcagcccaaggtgcggctccgacaggaggtggtgagcaccgcggggccgcgacggggccagcgtatcgcggtgccggtgcgcaagctcttcgcccgggagaagcggccgtatgggctgggcatggtgggacggctcaccaaccgcacctaccgcaagcgcatcgacagcttcgtcaagcgccagatcgaggacatggacgaccacaggcccttcttcacctactggcttaccttcgtgcactcgctcgtcaccatcctagccgtgtgcatctatggcatcgcgcccgtgggcttctcgcagcatgagacggtggactcggtgctgcggaaccgcggggtctacgagaacgtcaagtacgtgcagcaggagaacttctggatcgggcccagctcggtgaggacggggctgggggcggggccggcgggggcgggacctggaggtgcccggcgggggcaggaggccccggactgcggccgctcgtctccctcgcccgcaggaggccctcatccacctgggcgccaagttttcgccctgcatgcgccaggacccgcaggtgcacagcttcattcgctcggcgcgcgagcgcgagaagcactccgcctgctgcgtgcgcaacgacaggtcgggctgcgtgcagacctcggaggaggagtgctcggtgcgtttccccgcccgggactcccgccttcgtctgcccggtgttcgctcttcagacctcagatagactcggcagagtgatccttcg

SEQ ID NO: 26384 - DNA, 3603 bp, Homo sapiens
  source 1..3603: mol_type = unassigned DNA
cccgaggagccaccgcccagccgctcgcaggcgccgcacggagttgcgtcccggggacttggggccgcagggagctgtgagtacccaggaagctgcaccgtgtggcctggagctgtctatctgtccttccagccacctgtctgtccagccacccttccacagactgaggcttgacaccggagcatctgtacagagcaaggagaagacaagaacatgctctaaagcccttcacagcaagacccaggaagccgcgggcaaactcagactcgaagccctcccgcctcctgcccacaatggcctctgctgacaagaatggcgggagcgtgtcctctgtgtccagcagccgcctgcagagccggaagccacccaacctctccatcaccatcccgccacccgagaaagagacccaggcccctggcgagcaggacagcatgctgcctgagggttttcagaataggaggctaaagaaaagccagcccaggacctgggctgcacacaccaccgcctgccctccctccttcctccccaagaggaagaacccagcctacttgaagagcgtcagcctccaggagccacgcagccgatggcaggagagttcagagaagcgccctggcttccgccgccaggcctcactgtcccagagcatccgcaagggcgcagcccagtggtttggagtcagcggcgactgggaggggcagcggcagcagtggcagcgccgcagcctgcaccactgcagcatgcgctacggccgcctgaaggcctcgtgccagcgtgacctggagctccccagccaggaggcaccgtccttccagggcactgagtccccaaagccctgcaagatgcccaagattgtggatccgctggcccggggccgggccttccgccacccggaggagatggacaggccccacgccccgcacccaccgctgacccccggagtcctgtccctcacctccttcaccagtgtccgttctggctactcccacctgccacgccgcaagagaatgtctgtggcccacatgagcttgcaagctgccgctgccctcctcaaggggcgctcggtgctggatgccaccggacagcggtgccgggtggtcaagcgcagctttgccttcccgagcttcctggaggaggatgtggtcgatggggcagacacgtttgactcctccttttttagtaaggaagaaatgagctccatgcctgatgatgtctttgagtcccccccactctctgccagctacttccgagggatcccacactcagcctcccctgtctcccccgatggggtgcaaatccctctgaaggagtatggccgagccccagtccccgggccccggcgcggcaagcgcatcgcctccaaggtgaagcactttgcctttgatcggaagaagcggcactacggcctcggcgtggtgggcaactggctgaaccgcagctaccgccgcagcatcagcagcactgtgcagcggcagctggagagcttcgacagccaccggccctacttcacctactggctgaccttcgtccatgtcatcatcacgctgctggtgatttgcacgtatggcatcgcacccgtgggctttgcccagcacgtcaccacccagctggtgctgcggaacaaaggtgtgtacgagagcgtgaagtacatccagcaggagaacttctgggttggccccagctcgattgacctgatccacctgggggccaagttctcaccctgcatccggaaggacgggcagatcgagcagctggtgctgcgcgagcgagacctggagcgggactcaggctgctgtgtccagaatgaccactccggatgcatccagacccagcggaaggactgctcggagactttggccacttttgtcaagtggcaggatgacactgggccccccatggacaagtctgatctgggccagaagcggacttcgggggctgtctgccaccaggaccccaggacctgcgaggagccagcctccagcggtgcccacatctggcccgatgacatcactaagtggccgatctgcacagagcaggccaggagcaaccacacaggcttcctgcacatggactgcgagatcaagggccgcccctgctgcatcggcaccaagggcagctgtgagatcaccacccgggaatactgtgagttcatgcacggctatttccatgaggaagcaacactctgctcccaggtgcactgcttggacaaggtgtgtgggctgctgcccttcctcaaccctgaggtcccagatcagttctacaggctctggctgtctctcttcctacatgctggcgtggtgcactgcctcgtgtctgtggtctttcaaatgaccatcctgagggacctggagaagctggccggctggcaccgtatcgccatcatcttcatcctcagtggcatcacaggcaacctcgccagtgccatctttctcccataccgggcagaggtgggcccggccggctcacagttcggcctcctcgcctgcctcttcgtggagctcttccagagctggccgctgctggagaggccctggaaggccttcctcaacctctcggccatcgtgctcttcctgttcatctgtggcctcctgccctggatcgacaacatcgcccacatcttcggcttcctcagtggcctgctgctggccttcgccttcctgccctacatcaccttcggcaccagcgacaagtaccgcaagcgggcactcatcctggtgtcactgctggcctttgccggcctcttcgccgccctcgtgctgtggctgtacatctaccccattaactggccctggatcgagcacctcacctgcttccccttcaccagccgcttctgcgagaagtatgagctggaccaggtgctgcactgaccgctgggccacacggctgcccctcagccctgctggaacagggtctgcctgcgagggctgccctctgcagagcgctctctgtgtgccagagagccagagacccaagacagggcccgggctctggacctgggtgcccccctgccaggcgaggctgactccgcgtgagatggttggttaaggcggggtttttctggggcgtgaggcctgtgagatcctgacccaagctcaggcacacccaaggcacctgcctctctgagtcttgggtctcagttcctaatatcccgctccttgctgagaccatctcctggggcagggtccttttcttcccaggtcctcagcgctgcctctgctggtgccttctcccccactactactggagcgtgcccttgctggggacgtggctgtgccctcagttgcccccagggctgggtgcccaccatgccccttcctctttctcctcctacctctgccctgtgagcccatccataaggctctcagatgggacattgtgggaaaggctttggccatggtctgggggcagagaacaaggggggagacacaagtagacctcaggtagaacgacactgggcggagccaccccagggcctgctcccagggagtgctcgaggcgcatcaggcccgttttttaccagtttatatcacggtcttcatttttaaaagtaacgctaactttgtacggacgatgtctcatggattaaataatattctttatggcagt

SEQ ID NO: 26385 - DNA, 3516 bp, Homo sapiens
  source 1..3516: mol_type = unassigned DNA
cccgaggagccaccgcccagccgctcgcaggcgccgcacggagttgcgtcccggggacttggggccgcagggagctgtgagtacccaggaagctgcaccgtgtggcctggagctgtctatctgtccttccagccacctgtctgtccagccacccttccacagactgaggcttgacaccggagcatctgtacagagcaaggagaagacaagaacatgctctaaagcccttcacagcaagacccaggaagccgcgggcaaactcagactcgaagccctcccgcctcctgcccacaatggcctctgctgacaagaatggcgggagcgtgtcctctgtgtccagcagccgcctgcagagccggaagccacccaacctctccatcaccatcccgccacccgagaaagagacccaggcccctggcgagcaggacagcatgctgcctgagaggaagaacccagcctacttgaagagcgtcagcctccaggagccacgcagccgatggcaggagagttcagagaagcgccctggcttccgccgccaggcctcactgtcccagagcatccgcaagggcgcagcccagtggtttggagtcagcggcgactgggaggggcagcggcagcagtggcagcgccgcagcctgcaccactgcagcatgcgctacggccgcctgaaggcctcgtgccagcgtgacctggagctccccagccaggaggcaccgtccttccagggcactgagtccccaaagccctgcaagatgcccaagattgtggatccgctggcccggggccgggccttccgccacccggaggagatggacaggccccacgccccgcacccaccgctgacccccggagtcctgtccctcacctccttcaccagtgtccgttctggctactcccacctgccacgccgcaagagaatgtctgtggcccacatgagcttgcaagctgccgctgccctcctcaaggggcgctcggtgctggatgccaccggacagcggtgccgggtggtcaagcgcagctttgccttcccgagcttcctggaggaggatgtggtcgatggggcagacacgtttgactcctccttttttagtaaggaagaaatgagctccatgcctgatgatgtctttgagtcccccccactctctgccagctacttccgagggatcccacactcagcctcccctgtctcccccgatggggtgcaaatccctctgaaggagtatggccgagccccagtccccgggccccggcgcggcaagcgcatcgcctccaaggtgaagcactttgcctttgatcggaagaagcggcactacggcctcggcgtggtgggcaactggctgaaccgcagctaccgccgcagcatcagcagcactgtgcagcggcagctggagagcttcgacagccaccggccctacttcacctactggctgaccttcgtccatgtcatcatcacgctgctggtgatttgcacgtatggcatcgcacccgtgggctttgcccagcacgtcaccacccagctggtgctgcggaacaaaggtgtgtacgagagcgtgaagtacatccagcaggagaacttctgggttggccccagctcgattgacctgatccacctgggggccaagttctcaccctgcatccggaaggacgggcagatcgagcagctggtgctgcgcgagcgagacctggagcgggactcaggctgctgtgtccagaatgaccactccggatgcatccagacccagcggaaggactgctcggagactttggccacttttgtcaagtggcaggatgacactgggccccccatggacaagtctgatctgggccagaagcggacttcgggggctgtctgccaccaggaccccaggacctgcgaggagccagcctccagcggtgcccacatctggcccgatgacatcactaagtggccgatctgcacagagcaggccaggagcaaccacacaggcttcctgcacatggactgcgagatcaagggccgcccctgctgcatcggcaccaagggcagctgtgagatcaccacccgggaatactgtgagttcatgcacggctatttccatgaggaagcaacactctgctcccaggtgcactgcttggacaaggtgtgtgggctgctgcccttcctcaaccctgaggtcccagatcagttctacaggctctggctgtctctcttcctacatgctggcgtggtgcactgcctcgtgtctgtggtctttcaaatgaccatcctgagggacctggagaagctggccggctggcaccgtatcgccatcatcttcatcctcagtggcatcacaggcaacctcgccagtgccatctttctcccataccgggcagaggtgggcccggccggctcacagttcggcctcctcgcctgcctcttcgtggagctcttccagagctggccgctgctggagaggccctggaaggccttcctcaacctctcggccatcgtgctcttcctgttcatctgtggcctcctgccctggatcgacaacatcgcccacatcttcggcttcctcagtggcctgctgctggccttcgccttcctgccctacatcaccttcggcaccagcgacaagtaccgcaagcgggcactcatcctggtgtcactgctggcctttgccggcctcttcgccgccctcgtgctgtggctgtacatctaccccattaactggccctggatcgagcacctcacctgcttccccttcaccagccgcttctgcgagaagtatgagctggaccaggtgctgcactgaccgctgggccacacggctgcccctcagccctgctggaacagggtctgcctgcgagggctgccctctgcagagcgctctctgtgtgccagagagccagagacccaagacagggcccgggctctggacctgggtgcccccctgccaggcgaggctgactccgcgtgagatggttggttaaggcggggtttttctggggcgtgaggcctgtgagatcctgacccaagctcaggcacacccaaggcacctgcctctctgagtcttgggtctcagttcctaatatcccgctccttgctgagaccatctcctggggcagggtccttttcttcccaggtcctcagcgctgcctctgctggtgccttctcccccactactactggagcgtgcccttgctggggacgtggctgtgccctcagttgcccccagggctgggtgcccaccatgccccttcctctttctcctcctacctctgccctgtgagcccatccataaggctctcagatgggacattgtgggaaaggctttggccatggtctgggggcagagaacaaggggggagacacaagtagacctcaggtagaacgacactgggcggagccaccccagggcctgctcccagggagtgctcgaggcgcatcaggcccgttttttaccagtttatatcacggtcttcatttttaaaagtaacgctaactttgtacggacgatgtctcatggattaaataatattctttatggcagt

SEQ ID NO: 26386 - DNA, 4539 bp, Homo sapiens
  source 1..4539: mol_type = unassigned DNA
gaaatctttgcattcatcaaaaaagacaagaggcctagggccgggtgtgctgggattacaggcgtgagccaccgcgcccagccgcccagagatgtttgaaccaactttaggcaagttggttcttggtctgggctgcgtgccctggcgtcagggtcctgacactgcgccaccccgcaccgcccaccgctgctctcccggtctccattccagccctcccgcctcctgcccacaatggcctctgctgacaagaatggcgggagcgtgtcctctgtgtccagcagccgcctgcagagccggaagccacccaacctctccatcaccatcccgccacccgagaaagagacccaggcccctggcgagcaggacagcatgctgcctgagaggaagaacccagcctacttgaagagcgtcagcctccaggagccacgcagccgatggcaggagagttcagagaagcgccctggcttccgccgccaggcctcactgtcccagagcatccgcaagtgagcccccctacacccaagcccagcaccccccacccagcaacctgtggattctcggggcctggacatgattgggcctggtccctgcgtcccctctctggaaggaggaggccggcattaatgagcaatgtctccctgtggcctattatcatggtatagatggggaaatgggtatgtgctttgcggaatatcacggtgtggaggctggggggcttcgaggagctgggtggatcagtgtgggggtgcctggggccctagcctggctcctcacgctcccgtcatcccctgcttctgctcatctggtcactgggctccagccaggggcctcacaggcagatccgccccccacctccctgtaggcacgcgggcacacacgtgccatcaccccttccacacactcaggtgcacaggcgtagacaagcgtatgcccacctgtcccttgtctgcttccgcaggggcgcagcccagtggtttggagtcagcggcgactgggaggggcagcggcagcagtggcagcgccgcagcctgcaccactgcagcatgcgctacggccgcctgaaggcctcgtgccagcgtgacctggagctccccagccaggaggcaccgtccttccagggcactgagtccccaaagccctgcaagatgcccaagattgtggatccgctggcccggggccgggccttccgccacccggaggagatggacaggccccacgccccgcacccaccgctgacccccggagtcctgtccctcacctccttcaccagtgtccgttctggctactcccacctgccacgccgcaagagaatgtctgtggcccacatgagcttgcaagctgccgctgccctcctcaaggggcgctcggtgctggatgccaccggacagcggtgccgggtggtcaagcgcagctttgccttcccgagcttcctggaggaggatgtggtcgatggggcagacacgtttgactcctccttttttagtaaggaagaaatgagctccatgcctgatgatgtctttgagtcccccccactctctgccagctacttccgagggatcccacactcagcctcccctgtctcccccgatggggtgcaaatccctctgaaggagtatggccgagccccagtccccgggccccggcgcggcaagcgcatcgcctccaaggtgaagcactttgcctttgatcggaagaagcggcactacggcctcggcgtggtgggcaactggctgaaccgcagctaccgccgcagcatcagcagcactgtgcagcggcagctggagagcttcgacagccaccggccctacttcacctactggctgaccttcgtccatgtcatcatcacgctgctggtgatttgcacgtatggcatcgcacccgtgggctttgcccagcacgtcaccacccagctggtgctgcggaacaaaggtgtgtacgagagcgtgaagtacatccagcaggagaacttctgggttggccccagctcgattgacctgatccacctgggggccaagttctcaccctgcatccggaaggacgggcagatcgagcagctggtgctgcgcgagcgagacctggagcgggactcaggctgctgtgtccagaatgaccactccggatgcatccagacccagcggaaggactgctcggagactttggccacttttgtcaagtggcaggatgacactgggccccccatggacaagtctgatctgggccagaagcggacttcgggggctgtctgccaccaggaccccaggacctgcgaggagccagcctccagcggtgcccacatctggcccgatgacatcactaagtggccgatctgcacagagcaggccaggagcaaccacacaggcttcctgcacatggactgcgagatcaagggccgcccctgctgcatcggcaccaagggcagctgtgagatcaccacccgggaatactgtgagttcatgcacggctatttccatgaggaagcaacactctgctcccaggtgcactgcttggacaaggtgtgtgggctgctgcccttcctcaaccctgaggtcccagatcagttctacaggctctggctgtctctcttcctacatgctggcgtggtgcactgcctcgtgtctgtggtctttcaaatgaccatcctgagggacctggagaagctggccggctggcaccgtatcgccatcatcttcatcctcagtggcatcacaggcaacctcgccagtgccatctttctcccataccgggcagaggtaaggatgtggaggatgggaccccttccgcacatagggggccagccctgctgctcctattccacccacctgggatctgccagagggacacggtgcccctcctgtactgggctccacagcggagggacagctaatctgggggcttactggctggtctcttaatcccagtgagagggaacagtgatgctcttgagtcaccctgtccctccaccgcctcatttatcttcctaaccgtgcccactgcctgacagtatgctaggtatctgcaggtcgagcggtaggaaatggcctccgtgcgccgtcggcagtctgatcagttccacctgactgatctagtttgttcagtgtccgtcctctccccaccgtgtgcggcctggaacaggcttgtctgtcttgcttattgctacggacccacaccaggcacgtacacagtaggcgctcagtgtttgctgaaagaatgggcggagcaggcccagctttggtccagcagctccagccgaccccctgcccctcagcctcaggggtccccatgcctgccagggaggagctgatcgatgggatgacccagggtgcaggcccggcccaggccacccacctgatgcctgaagccacgtctcccctgccccgccccaggtgggcccggccggctcacagttcggcctcctcgcctgcctcttcgtggagctcttccagagctggccgctgctggagaggccctggaaggccttcctcaacctctcggccatcgtgctcttcctgttcatctgtggcctcctgccctggatcgacaacatcgcccacatcttcggcttcctcagtggcctgctgctggccttcgccttcctgccctacatcaccttcggcaccagcgacaagtaccgcaagcgggcactcatcctggtgtcactgctggcctttgccggcctcttcgccgccctcgtgctgtggctgtacatctaccccattaactggccctggatcgagcacctcacctgcttccccttcaccagccgcttctgcgagaagtatgagctggaccaggtgctgcactgaccgctgggccacacggctgcccctcagccctgctggaacagggtctgcctgcgagggctgccctctgcagagcgctctctgtgtgccagagagccagagacccaagacagggcccgggctctggacctgggtgcccccctgccaggcgaggctgactccgcgtgagatggttggttaaggcggggtttttctggggcgtgaggcctgtgagatcctgacccaagctcaggcacacccaaggcacctgcctctctgagtcttgggtctcagttcctaatatcccgctccttgctgagaccatctcctggggcagggtccttttcttcccaggtcctcagcgctgcctctgctggtgccttctcccccactactactggagcgtgcccttgctggggacgtggctgtgccctcagttgcccccagggctgggtgcccaccatgccccttcctctttctcctcctacctctgccctgtgagcccatccataaggctctcagatgggacattgtgggaaaggctttggccatggtctgggggcagagaacaaggggggagacacaagtagacctcaggtagaacgacactgggcggagccaccccagggcctgctcccagggagtgctcgaggcgcatcaggcccgttttttaccagtttatatcacggtcttcatttttaaaagtaacgctaactttgtacggacgatgtctcatggattaaataatattctttatggc

SEQ ID NO: 26387 - DNA, 1614 bp, Homo sapiens
  source 1..1614: mol_type = unassigned DNA
tagcacttcatagactgctatcacgcattcatttttactagtacctattgaacactaagttccaggcactgggctaggcactgggatggtgtggtgagcaaaaactgaccagtcctgccgtggagtttgctgggggagacacatgttactcaaagaatcacactaaggatagcaatttatctcaaagctgcaagttcctgccatctacatgtgcccagagtccccaaaattgagtgtcaaacagaggctgggtgacctcctgtccaggattgctctcatcgtatgaatcgaagttttcatcttaacgtatttttttctcctgagaataggccaaccaatcaatggctcagacagataagccaacatgcatcccgccggagctgccgaagatgctgaaggagtttgccaaagccgccattagggtgcagccgcaggacctcatccagtgggcagccgattattttgaggccctgtcccgtggagagacgcctccggtgagagagcggtctgagcgagtcgctttgtgtaaccgggcagagctaacacctgagctgttaaagatcctgcattctcaggttgctggcagactgatcatccgtgcagaggagctggcccagatgtggaaagtggtgaatctcccaacagatctgtttaatagtgtgatgaatgtgggtcgcttcacggaggagatcgagtggctgaagtttttagcccttgcttgcagcgctctgggagttactattaccaaaactctcaagatagtgtgtgaggtcttatcatgtgaccataatggtgggtcgccccggatcccgttcagcaccttccagtttctctacacgtatattgccaaagtggatggggagatctctgcatcacatgtcagcaggatgctaaactacatggaacaggaagtaattggccctgatggtataatcacagtgaatgactttacccaaaaccccagggttcagctggagtaaaagcacaattttggcaattttaaaggaagatacagagatgattgtacttcagaatgactgaaacccatataccacccaaaatcaattttcttgtacaactggtacacactaataaacaattaaacatatgagatcagaaatgtgcagaattaagatgtgaaattgttggaacaaaacaccttcattaccagattagtattcttcccacatggacactgagtaaaagtggctgacaaagcatggatagaaaatgcatcttcaatcaaagccagactgtcagattttaaaaggtagtatgttaaccagacacagtgttgttgttctgtgattgttaggcataatttagatgagtgtcttttatatggtcaattgaagtttttaccagtttatttctccatttgttggtactgtgctagtcattcattcatcctctcactcatcaatatttattgaggttagctatgtgccaggaatagggttgcaagaaataaatacaggacacccagttaaatttgaatttcagacaaacaacaaatatgttttgttttggtttttgctaaacctggcagcattccaggaactatgctggcttctgagcacatacaaataaataatatcagaattctgccttcaa

SEQ ID NO: 26388 - DNA, 1007 bp, Homo sapiens
  source 1..1007: mol_type = unassigned DNA
gccaggcgaaggcggagcgctaacgtctaacgctaacggcggtcgtgccccgccgctgctgtcacccccggccgctgctgccctccccgccgaggttctactgctctccttcttaagaagggtgggaggcactcggtctctccccacacctctcgcctgaggccaggcgccaggtgtcgcctgaagccagacagccggtttgggagcgagcctgaggccaaccaatcaatggctcagacagataagccaacatgcatcccgccggagctgccgaagatgctgaaggagtttgccaaagccgccattagggtgcagccgcaggacctcatccagtgggcagccgattattttgaggccctgtcccgtggagagacgcctccggtgagagagcggtctgagcgagtcgctttgtgtaaccgggcagagctaacacctgagctgttaaagatcctgcattctcaggttgctggcagactgatcatccgtgcagaggagctggcccagatgtggaaagtggtgaatctcccaacagatctgtttaatagtgtgatgaatgtgggtcgcttcacggaggagatcgagtggctgaagtttttagcccttgcttgcagcgctctgggagttactattaccaaaactctcaagatagtgtgtgaggtcttatcatgtgaccataatggtgggtcgccccggatcccgttcagcaccttccagtttctctacacgtatattgccaaagtggatggggagatctctgcatcacatgtcagcaggatgctaaactacatggaacaggaagtaattggccctgatggtataatcacagtgaatgactttacccaaaaccccagggttcagctggagtaaaagcacaattttggcaattttaaaggaagatacagagatgattgtacttcagaatgactgaaacccatataccacccaaaatcaattttcttgtacaactggtacacactaataaacaattaaacatatgagatcagaaa

SEQ ID NO: 26389 - DNA, 727 bp, Homo sapiens
  source 1..727: mol_type = unassigned DNA
aggcggagcgctaacgtctaacgctaacggcggtcgtgccccgccgctgctgtcacccccggccgctgctgccctccccgccgaggttctactgctctccttcttaagaagggtgggaggcactcggtctctccccacacctctcgcctgaggccaggcgccaggtgtcgcctgaagccagacagccggtttgggagcgagcctgagttccaggcactgggctaggcactgggatggtgtggtgagcaaaaactgaccagtcctgccgtggagtttgctgggggagacacatgttactcaaagaatcacactaaggatagcaatttatctcaaagctgcaagttcctgccatctacatgtgcccaggccaaccaatcaatggctcagacagataagccaacatgcatcccgccggagctgccgaagatgctgaaggagtttgccaaagccgccattagggtgcagccgcaggacctcatccagtgggcagccgattattttgaggccctgtcccgtggagagacgcctccggtgagagagcggtctgagcgagtcgctttgtgtaaccgggcagagctaacacctgagctgttaaagatcctgcattctcaggttgctggcagactgatcatccgtgcagaggagctggcccagatgtggaaagtggtgaatctcccaacagatctgtttaatagtgtgatgaatgtgggtcgcttcacggaggaga

SEQ ID NO: 26390 - DNA, 683 bp, Homo sapiens
  source 1..683: mol_type = unassigned DNA
gaggttctactgctctccttcttaagaagggtgggaggcactcggtctctccccacacctctcgcctgaggccaggcgccaggtgtcgcctgaagccagacagccggtttgggagcgagcctgagcaatttatctcaaagctgcaagttcctgccatctacatgtgcccagagtccccaaaattgagtgtcaaacagaggctgggtgacctcctgtccaggattgctctcatcgtatgaatcgaagttttcatcttaacgtatttttttctcctgagaataggccaaccaatcaatggctcagacagataagccaacatgcatcccgccggagctgccgaagatgctgaaggagtttgccaaagccgccattagggtgcagccgcaggacctcatccagtgggcagccgattattttgaggccctgtcccgtggagagacgcctccggtgagagagcggtctgagcgagtcgctttgtgtaaccgggcagagctaacacctgagctgttaaagatcctgcattctcaggttgctggcagactgatcatccgtgcagaggagctggcccagatgtggaaagtggtgaatctcccaacagatctgtttaatagtgtgatgaatgtgggtcgcttcacggaggagatcgagtggctgaagtttttagcccttgcttgcagcgctct

SEQ ID NO: 26391 - DNA, 704 bp, Homo sapiens
  source 1..704: mol_type = unassigned DNA
cccgccgaggttctactgctctccttcttaagaagggtgggaggcactcggtctctccccacacctctcgcctgaggccaggcgccaggtgtcgcctgaagccagacagccggtttgggagcgagcctgagggcaaggggaaggcaaggggatcttcaagagaatgtgactgtgggggattatggctttctggccaatttgttacctattgaacactaagttccaggcactgggctaggcactgggatggtgtggtgagcaaaaactgaccagtcctgccgtggagtttgctgggggagacacatgttactcaaagaatcacactaaggatagcaatttatctcaaagctgcaagttcctgccatctacatgtgcccagaataggccaaccaatcaatggctcagacagataagccaacatgcatcccgccggagctgccgaagatgctgaaggagtttgccaaagccgccattagggtgcagccgcaggacctcatccagtgggcagccgattattttgaggccctgtcccgtggagagacgcctccggtgagagagcggtctgagcgagtcgctttgtgtaaccgggcagagctaacacctgagctgttaaagatcctgcattctcaggttgctggcagactgatcatccgtgcagaggagctggcccagatgtggaaagtggtgaatctcccaacagatct

SEQ ID NO: 26392 - DNA, 548 bp, Homo sapiens
  source 1..548: mol_type = unassigned DNA
gctacccctggtgacctggcagcggagcccgcgcagggtttgccaggcgaaggcggagcgctaacgtctaacgctaacggcggtcgtgccccgccgctgctgtcacccccggccgctgctgccctccccgccgaggttctactgctctccttcttaagaagggtgggaggcactcggtctctccccacacctctcgcctgaggccaggcgccaggtgtcgcctgaagccagacagccggtttgggagcgagcctgagcaatttatctcaaagctgcaagttcctgccatctacatgtgcccaggccaaccaatcaatggctcagacagataagccaacatgcatcccgccggagctgccgaagatgctgaaggagtttgccaaagccgccattagggtgcagccgcaggacctcatccagtgggcagccgattattttgaggccctgtcccgtggagagacgcctccggtgagagagcggtctgagcgagtcgctttgtgtaaccgggcagagctaacacctgagctgttaaagatcctgcattctca

SEQ ID NO: 26393 - DNA, 1066 bp, Homo sapiens
  source 1..1066: mol_type = unassigned DNA
ctcgcgtcccgggtgcctggataccgagcgcgtccgtagtggcggctggcgctagggaactgcagggtctagggtgttgtcggagtggcagttggtccgaatttctcccgaagcccgcggaggagcgggtaagagccccgcgaatccggccccaacctcgggaacgggatgggaggcggccctggccgcaagccccgcgctgctagcgggtccaccgcgtcgtagccgacagccgcccttcttcctcgcagcgcgccgcgattcaccagcctggtcccttctgcggagagcgatgccgcttcccgacaccatgttctgcgctcagcagatccacattcccccggagctgccggacatcctgaagcaattcaccaaggctgccatccgcacccagccggccgacgtgctgcggtggtccgcgggctatttttcagctctgtcgagaggagatccacttcctgtaaaggacagaatggaaatgcccacggcaacccagaaaacagacacaggcctgactcaaggactcctgaaagttttgcacaagcagtgtcaccacaagcggtatgtggaattaacagatcttgagcagaagtggaagaacttgtgcctgccgaaggaaaaattcaaagcgctcttacaactggatccttgtgaaaacaaaatcaagtggataaactttttagcgcttggatgcagcatgcttggtgggtccttgaacactgcgctgaagcacctgtgcgagatcctcacggacgatccggagggcgggcccgctcgcatccccttcaagacgttttcctacgtttaccgctacttggccagattagactcagatgtgtctcccttggagacggaatcctaccttgcctctctaaaggaaaatatagacgccaggaagaacggcatgataggtctttcagatttcttctttccaaagaggaaacttttagaaagcattgaaaactctgaagatgtaggccattaatacagagaagaatacattttaatgtcaaaatagtgctctttaaaattctggcaccaaatacaacttaccctgaatcacaca

SEQ ID NO: 26394 - DNA, 1291 bp, Homo sapiens
  source 1..1291: mol_type = unassigned DNA
gcggccccaggcgcaggcgggtcccgcagcggggcccgtgccgcccaggcgatcagccccttcacttaacccgcttccctcctagcaggcccgagtcccctagcctcagcctcacgcagccagagcaaggggaagagggagtccttcgtgagttcgccgctcacattcggcggtgggaaaccgatccgaagatgcttttgtaggcgaaacgctcagctcgcgcggctctgaaccaccggggagcagcggctgctgctagtcggactacgccagcacctccttgtccagcccgggagcagccccgcctcgctcagggccgcgtgcgcgtgcgcggctccaggggcggggcctgctcgcgtcccgggtgcctggataccgagcgcgtccgtagtggcggctggcgctagggaactgcagggtctagggtgttgtcggagtggcagttggtccgaatttctcccgaagcccgcggaggagcggcgcgccgcgattcaccagcctggtcccttctgcggagagcgatgccgcttcccgacaccatgttctgcgctcagcagatccacattcccccggagctgccggacatcctgaagcaattcaccaaggctgccatccgcacccagccggccgacgtgctgcggtggtccgcgggctatttttcagctctgtcgagaggagatccacttcctgtaaaggacagaatggaaatgcccacggcaacccagaaaacagacacaggcctgactcaaggactcctgaaagttttgcacaagcagtgtcaccacaagcggtatgtggaattaacagatcttgagcagaagtggaagaacttgtgcctgccgaaggaaaaattcaaagcgctcttacaactggatccttgtgaaaacaaaatcaagtggataaactttttagcgcttggatgcagcatgcttggtgggtccttgaacactgcgctgaagcacctgtgcgagatcctcacggacgatccggagggcgggcccgctcgcatccccttcaagacgttttcctacgtttaccgctacttggccagattagactcagatgtgtctcccttggagacggaatcctaccttgcctctctaaaggaaaatatagacgccaggaagaacggcatgataggtctttcagatttcttctttccaaagaggaaacttttagaaagcattgaaaactctgaagatgtaggccattaatacagagaagaatacattttaatgtcaaaatagtgctctttaaaattctggcaccaaatacaacttaccctgaatca

SEQ ID NO: 26395 - DNA, 4473 bp, Homo sapiens
  source 1..4473: mol_type = unassigned DNA
ggggtgggggcaggcgaaggggagggctgcgggtggaaaggggcgagcccctctcgcccgggactgggaagagcggccacggcgccgggcgaggcggcagggcgaggcagtgccatgctgcctttgtgcaaagttgggcggcgggcggcgcgccgcgcgcaggggccccgcacacccgcgaccgcgcgcagccgtggctgctgctgagtggcgggggcccccccgctccccccggcccttgaaggcggagagagctcgcgtctcgctcggcttcagggtaagtccagctgtgagcagagtgttctgttcttcacttccagcaagccagagtttcataaatggacgctgacatggactacgaaagacccaacgttgaaactatcaaatgtgtggtcgtgggtgacaatgccgtggggaagacgcgcttgatctgtgccagggcgtgcaacaccacactcacgcagtatcagctgctggccacccacgtgccaacagtgtgggcgattgaccagtaccgcgtgtgccaggaggtcttggagcgttctcgggatgttgttgatgaagtgagtgtttctctcaggctttgggatacttttggtgatcatcacaaagacagacgctttgcatatggcaggtctgatgttgtggtcctctgtttttcgattgctaatcccaattccctaaatcatgtgaaaagcatgtggtatccagaaatcaagcacttttgccctcgaacacccgttatccttgttgggtgccagcttgatctccgctatgccgacctggaagctgttaatcgagccaggcgcccgttagcaaggcccataaagagaggggatattttgcccccagaaaaaggccgagaggtagcaaaggaacttggcttaccatactatgaaacaagcgtgtttgaccagtttggtatcaaggatgtgtttgacaatgcaatccgagcagcgctgatttcccgcaggcacctgcaattctggaaatcccacctaaagaaagtccagaaacctttacttcaggcacccttcctacctccaaaagcccctccaccggtcatcaaaattccagagtgtccttccatggggacaaatgaagctgcctgtttactggacaatcctctatgtgccgatgttctgttcatccttcaggaccaggaacacatctttgcacatcgaatttacctcgctacctcttcttccaaattttatgatctgtttttaatggaatgtgaagaatccccaaatgggagtgaaggagcctgtgagaaagagaagcagagcagagatttccaggggcggatattgagtgtcgacccagaggaagaaagggaggagggcccgcctaggattcctcaggccgaccagtggaagtcttcaaacaagagcctggtggaggctctggggctggaagccgagggtgcagttcctgagacacagactttgaccggatggagtaaggggttcattggcatgcacagggaaatgcaagtcaaccccatttcaaagcggatggggcccatgactgtggtcaggatggacgcttcagtccagccaggcccttttcggaccctgctccagtttctttatacgggacaactggatgaaaaggaaaaggatttggtgggcctggctcagatcgcagaggtcctcgagatgttcgatttgaggatgatggtggaaaacatcatgaacaaggaagccttcatgaaccaggagattacgaaagcctttcacgtaaggaaagccaatcggataaaagagtgtctcagcaagggaacgttctcggacgtgacatttaaattggacgatggagccatcagtgcccacaagccgctgctgatctgtagctgtgagtggatggcagccatgttcggggggtcatttgtggaaagtgccaacagtgaggtgtatctcccgaacataaacaagatatcaatgcaagcagtattggattatctctataccaagcagttgtctcctaacttggatctggacccgctggaattaattgccttggcaaacagattttgcctgccacacttggttgcacttgcagaacagcatgccgttcaggagttgaccaaagccgccacgagtggcgtgggcattgacggagaagtgctctcttacttggaattggctcagtttcacaatgcccaccagttggccgcctggtgtttgcaccacatctgcaccaactacaacagtgtatgctccaagttccgtaaggaaatcaaatcaaaatctgcagacaaccaggaatacttcgagcggcaccgctggccccctgtgtggtacctgaaggaagaagatcactaccagcgtgtgaaaagggaacgagagaaggaagatattgcactaaataagcatcgctcaagacgaaagtggtgcttctggaattcatctccagcagtggcctgaagaggaagagaaaaaaaacaaaaaacagaaaccaatcggtaatctgatccaccacttttcaaagcactactataaaattcgtcttgttagagatacgacatagttcaggtttcgggcactgatcttcctccacttttgtgcatttatctttgttaggatcaaagcacaagctcaccatcaatgagcctggacaaaaagggaagctgactctcactgcattccttaaactgatatgtatattttttttgttaggaggcttaataaactttagtctgttattttgtttctttttatacaaagaaaaaaaattcagctttcatgtttctgattccagattggaaaatatttttatatggtctgttgtattttgttgaaatgaaaatactgtgtattactttattttacaggccacaattgattatgaagtcaccctgtgattctctttgcccacatgaccaccgagcattattacgtaattagagggttatccttttgttgtgaaaggaaggaggggactgaaatctcccaaagtgcaaattggagagtgtttaatctttgttctgttgaataacatcggtgtaattacaaagtcaactccaagaatgtgtatttacaatatttgccatgttaagtgctggtaattatatggttatatgtgccatgtaaaatatagtgatatcaaatattctgttgtttccaatgtctagtttcaagaggacaatctttataatcattagaagggcttattaaatcccagcattatccagggcaaactcactggtggacctgaatacataagataccattagtgcgctggtgttcggattgctgtattagggtttacatctctcagtattccttgaacttgccatgcttctgcatgcagattcttcactgacttgaattgagatgggcaagggaaaaggtccctggactccctcctgccatctacaggcttgtcacatctcaccaccagaaacaggcttcctcaggcttctcacctgtggccaacttcactttgtaagacccatatttttaactcttcccagggaaaattcatgttgctgcagaagtaggctaaggcagaccacccacttctgctgaaatgcattgggagcctgtgaaagcacaaagctggaggctgggcgcctgcgttctcctacacggaaaggaatctaattccaagagtctaggaaatggtgctattgtgagttcgttctgactctttctcattctgagttttcagtgttaaactaggaagtgtgacagcaggggagctttcgtgaggcagtcagtcattgcttctctgtaaattaaaatgttacagcacacacatacacacacagagagcatttcaaggccacagctccacacctgccatgggatgttaatgtggcagggggtggggctcattctgttgggaggtcaaattaccaatgccaaggactgttgattttgtttttatttttattttttcttctagcttttcagaagatggaaatgagacagttgagtccaaaccccaatgctgacagccatatgcatttgaaaatctatctagattacagatgggcatttattactggcagtggaaacaccagatagaagatcttaggagaggcccagaaatgcatcaccttgtcatgacaaaagagaaggcagtagagtagggatagttacaaatgcatccatcttaattattttcaataggcttgtaaatcttatcgatggaaggagaaaggagacaagatgtggaagaattgacatgtatcccaccataaaatggtagaagatgagttttcaatgagtagtcatagttgaaattttacaaccaaagctcccatttgattgtaatcttgccaaaatataatggatgtataaatgaacttggggtataagcaataatatccactagtgttgttatcagctactgtaaccaagtggctggttcatttggttgatgctgattatggcctttaaccatggtggtttgttgtgtgttttttatttcacaaaaagccaataaaattgtttagctataaaa

SEQ ID NO: 26396 - DNA, 4339 bp, Homo sapiens
  source 1..4339: mol_type = unassigned DNA
ggcgggacccagagccgccgcgggagcttccagcgtccccaggttttataataatcaagaagcacatgaaagaggcctcttcatcaagcattcttgactaagttatgaaaatggaattgaagtttattttcccccttcatatggtaagtccagctgtgagcagagtgttctgttcttcacttccagcaagccagagtttcataaatggacgctgacatggactacgaaagacccaacgttgaaactatcaaatgtgtggtcgtgggtgacaatgccgtggggaagacgcgcttgatctgtgccagggcgtgcaacaccacactcacgcagtatcagctgctggccacccacgtgccaacagtgtgggcgattgaccagtaccgcgtgtgccaggaggtcttggagcgttctcgggatgttgttgatgaagtgagtgtttctctcaggctttgggatacttttggtgatcatcacaaagacagacgctttgcatatggcaggtctgatgttgtggtcctctgtttttcgattgctaatcccaattccctaaatcatgtgaaaagcatgtggtatccagaaatcaagcacttttgccctcgaacacccgttatccttgttgggtgccagcttgatctccgctatgccgacctggaagctgttaatcgagccaggcgcccgttagcaaggcccataaagagaggggatattttgcccccagaaaaaggccgagaggtagcaaaggaacttggcttaccatactatgaaacaagcgtgtttgaccagtttggtatcaaggatgtgtttgacaatgcaatccgagcagcgctgatttcccgcaggcacctgcaattctggaaatcccacctaaagaaagtccagaaacctttacttcaggcacccttcctacctccaaaagcccctccaccggtcatcaaaattccagagtgtccttccatggggacaaatgaagctgcctgtttactggacaatcctctatgtgccgatgttctgttcatccttcaggaccaggaacacatctttgcacatcgaatttacctcgctacctcttcttccaaattttatgatctgtttttaatggaatgtgaagaatccccaaatgggagtgaaggagcctgtgagaaagagaagcagagcagagatttccaggggcggatattgagtgtcgacccagaggaagaaagggaggagggcccgcctaggattcctcaggccgaccagtggaagtcttcaaacaagagcctggtggaggctctggggctggaagccgagggtgcagttcctgagacacagactttgaccggatggagtaaggggttcattggcatgcacagggaaatgcaagtcaaccccatttcaaagcggatggggcccatgactgtggtcaggatggacgcttcagtccagccaggcccttttcggaccctgctccagtttctttatacgggacaactggatgaaaaggaaaaggatttggtgggcctggctcagatcgcagaggtcctcgagatgttcgatttgaggatgatggtggaaaacatcatgaacaaggaagccttcatgaaccaggagattacgaaagcctttcacgtaaggaaagccaatcggataaaagagtgtctcagcaagggaacgttctcggacgtgacatttaaattggacgatggagccatcagtgcccacaagccgctgctgatctgtagctgtgagtggatggcagccatgttcggggggtcatttgtggaaagtgccaacagtgaggtgtatctcccgaacataaacaagatatcaatgcaagcagtattggattatctctataccaagcagttgtctcctaacttggatctggacccgctggaattaattgccttggcaaacagattttgcctgccacacttggttgcacttgcagaacagcatgccgttcaggagttgaccaaagccgccacgagtggcgtgggcattgacggagaagtgctctcttacttggaattggctcagtttcacaatgcccaccagttggccgcctggtgtttgcaccacatctgcaccaactacaacagtgtatgctccaagttccgtaaggaaatcaaatcaaaatctgcagacaaccaggaatacttcgagcggcaccgctggccccctgtgtggtacctgaaggaagaagatcactaccagcgtgtgaaaagggaacgagagaaggaagatattgcactaaataagcatcgctcaagacgaaagtggtgcttctggaattcatctccagcagtggcctgaagaggaagagaaaaaaaacaaaaaacagaaaccaatcggtaatctgatccaccacttttcaaagcactactataaaattcgtcttgttagagatacgacatagttcaggtttcgggcactgatcttcctccacttttgtgcatttatctttgttaggatcaaagcacaagctcaccatcaatgagcctggacaaaaagggaagctgactctcactgcattccttaaactgatatgtatattttttttgttaggaggcttaataaactttagtctgttattttgtttctttttatacaaagaaaaaaaattcagctttcatgtttctgattccagattggaaaatatttttatatggtctgttgtattttgttgaaatgaaaatactgtgtattactttattttacaggccacaattgattatgaagtcaccctgtgattctctttgcccacatgaccaccgagcattattacgtaattagagggttatccttttgttgtgaaaggaaggaggggactgaaatctcccaaagtgcaaattggagagtgtttaatctttgttctgttgaataacatcggtgtaattacaaagtcaactccaagaatgtgtatttacaatatttgccatgttaagtgctggtaattatatggttatatgtgccatgtaaaatatagtgatatcaaatattctgttgtttccaatgtctagtttcaagaggacaatctttataatcattagaagggcttattaaatcccagcattatccagggcaaactcactggtggacctgaatacataagataccattagtgcgctggtgttcggattgctgtattagggtttacatctctcagtattccttgaacttgccatgcttctgcatgcagattcttcactgacttgaattgagatgggcaagggaaaaggtccctggactccctcctgccatctacaggcttgtcacatctcaccaccagaaacaggcttcctcaggcttctcacctgtggccaacttcactttgtaagacccatatttttaactcttcccagggaaaattcatgttgctgcagaagtaggctaaggcagaccacccacttctgctgaaatgcattgggagcctgtgaaagcacaaagctggaggctgggcgcctgcgttctcctacacggaaaggaatctaattccaagagtctaggaaatggtgctattgtgagttcgttctgactctttctcattctgagttttcagtgttaaactaggaagtgtgacagcaggggagctttcgtgaggcagtcagtcattgcttctctgtaaattaaaatgttacagcacacacatacacacacagagagcatttcaaggccacagctccacacctgccatgggatgttaatgtggcagggggtggggctcattctgttgggaggtcaaattaccaatgccaaggactgttgattttgtttttatttttattttttcttctagcttttcagaagatggaaatgagacagttgagtccaaaccccaatgctgacagccatatgcatttgaaaatctatctagattacagatgggcatttattactggcagtggaaacaccagatagaagatcttaggagaggcccagaaatgcatcaccttgtcatgacaaaagagaaggcagtagagtagggatagttacaaatgcatccatcttaattattttcaataggcttgtaaatcttatcgatggaaggagaaaggagacaagatgtggaagaattgacatgtatcccaccataaaatggtagaagatgagttttcaatgagtagtcatagttgaaattttacaaccaaagctcccatttgattgtaatcttgccaaaatataatggatgtataaatgaacttggggtataagcaataatatccactagtgttgttatcagctactgtaaccaagtggctggttcatttggttgatgctgattatggcctttaaccatggtggtttgttgtgtgttttttatttcacaaaaagccaataaaattgtttagctataaaa

SEQ ID NO: 26397 - DNA, 2110 bp, Homo sapiens
  source 1..2110: mol_type = unassigned DNA
ggcgggacccagagccgccgcgggagcttccagcgtccccaggttttataataatcaagaagcacatgaaagaggcctcttcatcaagcattcttgactaagttatgaaaatggaattgaagtttattttcccccttcatatggtaagtccagctgtgagcagagtgttctgttcttcacttccagcaagccagacgtctttgattgctctggaaagccttggtgtccttactgtggtgttcactctcttcttacagagtttcataaatggacgctgacatggactacgaaagacccaacgttgaaactatcaaatgtgtggtcgtgggtgacaatgccgtggggaagacgcgcttgatctgtgccagggcgtgcaacaccacactcacgcagtatcagctgctggccacccacgtgccaacagtgtgggcgattgaccagtaccgcgtgtgccaggaggtcttggagcgttctcgggatgttgttgatgaagtgagtgtttctctcaggctttgggatacttttggtgatcatcacaaagacagacgctttgcatatggcaggtaaaccaagactagtacagcgtggttgagcttgaatgcaatttccttttcaaaaccagcagcgggtttacaaatcaacaaaaaccacatcatatggccttgaaatgtgctgggttctgcactgtgtctaagaaaaggaaaagaaaaaaaaatggtattgtttcctgatgtcaagaaaagaagcgtgccctgccaatgaggaagtactgtgttgaaaacaaccagtggtcaagctggaaggtttgctagattaggattctgtaacaccctccaactgcgggctgctttgattgctggttctctgagtaacacttcacttgccttctgttagaatgttttaagttattttggcacttggtcaccctacttcagaaagactgtttggtcttttcatgaccatattggcagagtctaatgttatttgctttggattttgtgttatctgaaaagtctattatttttattagaaggtcatttttaaaaagaaagaaaaatatctccaaagtccttcgcaagacatatttccaaaatgaacagaaacactaacgtttatttttttaaaaaggagaaaaaaatctagtaatgggaaaactcctctagaaggacattaatatgggtaggaacatggtcaaagtgccttaaaatatttagcaacctctccttgccaccataacttaacgtctctctcaatgaatgggttatagctgttaaattctgtattaatggagactttttttttaccacttaattataaatgaacacatttcattttcagtgtagaacgtagatatcatggccttgttgtctcttcttaacatcaaacatcatatcaccttacaggattttattagttaggtactccaagcacgtgaattactccttggtattgagataagcatttctgaagattcttctatttctacaagccagtagctctttgaacggacttttattgtcatttatctaagtggcctaaaataatgaataaactgctgaaagagtttgccctattcccaggaattatttcacacactgaaagaatctgtgacttagaccactttctttcaaggggactcagagagttatggaagcaaaacacgattttaatgtccccttggtaacaaggacttttgaacttagtatcctacatcatagatagttttcttttccttgaatttcctggattttttttctttctataatgttgttgattgttatcttaggtgccattttgcttttttcttttgtccaattgttctacatgtaaaaataacaattataaatgaacctgcttgtaactgctgggcagtcaggtttgtaacacctatggttttgaggaagcttgatttgatgactttaggcagtgtaaggataaatacagtagatttcaaaggacttttttatatccccacttctaaaacagtgtcatgaaaatgatgagcctgatgatgagttaatggaaatatttgggtttagaatctagagactatttcaacagctcagtggtttgttgccactagaaatttatgcatttgtcaatacctgtg

SEQ ID NO: 26398 - DNA, 5451 bp, Homo sapiens
  source 1..5451: mol_type = unassigned DNA
atttttttctcctcctttttttaccctcccgtttttttcttttcttttttttttccctatcctttttttgtgaatgaaaaaaggaggtcgcgagcggtacctgggactgcagcgccaggcgtcttcgcggcagcgccttcgccgcgggcccgggcgcgtagcggcggcggcctcgcccctctcccggcgcccctgcgcgccgcccgctgcctccgcagcccggctccgcgcgccgccgtgacattgggcgcctggcgcgcggggcgatgctgatccggaaggggcagcggctgcagtgcagcgcgcgcgtccgctcctgggcccacgtccggcctgggctgccctgccggagtttctgagtggccgcgagctggccgggaggctggagcccagcagcagcgcggcggcgccggcgtcgtcccaacttgcaggcgcggagggacccctgacatttcactaaaatgagcgtgctcagcaggaagagatgtgttcctcacgctagaagccaccccgtcacatgtagtggtgtcccgtttaatggattctgacatggattatgaaaggccaaacgtagagaccatcaagtgcgttgtggtgggggacaacgccgtgggtaagaccaggctcatctgtgcccgcgcttgcaatgccaccctcacccagtaccagctgctggccacgcatgtgcccacagtatgggccatcgaccaatatcgtgtgtgccaggaggtgctggaacgctcccgagacgtggtagatgatgtcagcgtctctctgcgcctctgggacacctttggagaccaccacaaagaccgtcgctttgcttatgggagatctgatgtggtggttctgtgcttctccattgccaaccccaattccctccaccatgtcaagaccatgtggtacccagaaatcaagcacttctgcccccgagcacctgtcatcttggtgggctgccagttggacctgcgctacgctgacctggaggctgtcaacagggctaggcgacccttggctaggcccatcaaacctaatgaaatcctgcccccagagaagggtcgggaggtggccaaggagctgggcatcccctactatgagaccagcgtggtggcccagttcggcatcaaggacgtctttgacaacgccatccgagctgcactcatctcccgccgccacctgcagttctggaagtcccacctccgcaatgtgcagcggcctctgctgcaggcacccttcctaccccccaagccaccgcccccgatcatcgtggtgcccgaccctccctccagcagcgaggagtgccccgcccacctcctggaggacccgctctgcgcggacgtcatcctggtgctgcaggagcgggtgcgcatctttgcccacaagatctacctctccacctcttcctccaagttctatgacctgttcctcatggacctgagtgagggggagctggggggcccctcggagccagggggcacccacccagaggaccaccagggccactctgatcaacaccaccaccatcaccaccaccaccatgggcgagacttcctgctccgagcagccagctttgacgtgtgcgagagcgtggatgaggctgggggctccggtcctgctggcctccgtgcttccaccagcgacgggatcttacggggcaacggaacagggtacctaccgggcaggggtcgtgtgctgtcttcctggagccgagcttttgtgagcatccaggaagagatggcagaagatcctctcacctacaaatcccggctgatggtggtggtgaagatggacagttccatccagccggggcccttccgggctgtcctcaagtacctgtacacgggggagctagatgagaacgagcgtgacctcatgcacattgcccacattgctgagctgctcgaggtctttgatctgcgcatgatggtggccaacattctcaacaatgaggccttcatgaaccaggagatcaccaaggccttccacgtccgccggaccaaccgggttaaggagtgcttggcaaaaggcaccttctcagatgtgaccttcatcctggatgatggcaccatcagcgcccacaagcccctgttgatttccagctgtgactggatggctgccatgtttggggggccatttgtggagagctccacccgggaggtggtgtttccctacacaagcaagagctgcatgcgggccgtgctggaatacctctacaccggcatgttcacctccagccccgacctggatgacatgaagctcatcattctagccaaccgcctctgcctgccacacctggttgccctcacagagcagtacacagtgaccgggctgatggaagcgacccagatgatggtggacatcgatggggacgtccttgtgttcctggaactggctcagttccactgtgcgtaccagctggccgactggtgtctccaccacatctgcaccaactacaacaacgtgtgccgcaagttcccccgagacatgaaggccatgtccccagaaaaccaggagtatttcgagaagcatcggtggccacctgtgtggtacctgaaggaggaagatcattaccagcgggcacggaaggagcgtgagaaggaggactacctccacctcaagcggcagcccaaacggcgttggctcttctggaacagtccatcctccccgtcttcctcggcagcctcctcctcatccccatcttcctcctcggctgtggtctgagatgctgccaccctcttctgaccctgctgctgttgtccccatccgccttcacccctctgctcttccgcatcaccccatccaccttacagggaccagggggcccacgtaaccaggacccagagggtggagctcttcttaccagccaccgtggctcagccagagaggagctgagccctgtggagcagaacgggaaccacctgcagaggtccccagacccaaagcaggacgggagacaactgcttggaggagcgaagagccctggcattttatctctgggtttgagagccctagagtcaaagggaaagcctcccagcctccagggcttctctgtgtgtcttggttgctgctctggccagggaggcagccccactcccagcaagcagaagtgatcctcgagggtcctgcccctgttggccatatctttccaccgacggacttgagtgttgcatttgttttgtgggcatttccacacgaagcctactcacaccctcactggagaagtcagggtagaaattgagccttcagagcccaactcaaggcttctacatcctggggtgcagctgcaaaaggccagacgtggaaaggcctgtatcctgccagtgtccctccgtcccagggggctgtgctagcacagacctgagaatggggacacaggtcattcagagctccaggcctggaagcagtgcctcttggtgcaacaagaaacttctccctcaccccctcctttaccctcagatttggagatggtaaccaaaggaagcagctgggacaggtggagaaggaagtaggaatgagtgcacggcgaccccgtgctcctcagggccctcccctgcctctgggtggcactgctttttatagggtggggcaaaattagcaaaaaacaaaaaccaatgacaaccaaactgaaaccgaaacgaaaaatcaacaaacactctgtcctctatccctccaaagaatgaaaatcagaaaaagcccctgcctagctcacatttctataaacagaggcccccatgatgaggaggtgaagatttaggttgcagaatcgactccaatgcctttcaggaaaggactcggcacttctctgactgcggaggccctgaccctgccagctggctccgagggcaacacaggggcctggcctctagagggctggtgattgaggggcccgggctggcggcaaagaggggtttggtctcggggcttaaatggcaccagactcttgcttttgcccatctggagactgcaggctcccttccttaccctcagagagtgcttatggtgggtgtttttgcggggctgcaataggggccaaaagtcagggaaaggggcactgacctgtagtgaaaggccacaggacacagccttattactgctggggtgggataaggggaaggagaagagggagaatggagcaggaggaaaagcagagttggtctagagaggaggagggcggggctggaggaatgtgggggattgaaactagctcccagcccccatggggcagcagctgggccacaattgcccctttccgttttctaaccccgactcagatttcaccacccacactctttttaggtgtaaaagatggagtcccacggaggaggggcagagccaggaggcagtggggctgtgggctcagagctcaggagtcgccttacctgagagagatgttctagctgagagggcctggccctggggtgggctccaggaaaacgctggttaggcctgggattgagctaacctgaaacaaaggtagcaggcaggacctaatgaccagaggttaaatcctcatcaagagagaccaggcggctggaggacaagcggctctaaccctgggggcggccatgttgtccaggcccaggcccctccaggactgtggctgcctcccctccacggcctccagggcggctggctggaaagccacgcgtatgctgccctctacaggctgctcggcctccctgcagctcagcgcagcccagggctccaagtgaggcccagaagcccatgggcagggctggggggacgaagggggaacccggagcacctccacttctagggaagatggacagcgtgggggcacacctgggcctcccggaagctgtggacgaaagggagagcgggtcctccagggcaaggggaacgggaaataggtctcctaggtgcctgaagcgctgagcaacctgggtaccctggtggggatgcagggaaggccggggcagagaaagtgaaggtcgacccagggctgtaggaagccataggagagtgaccacgggattccctgagaaacagggccggccccccaacttcagggacccaccgcccattccccgagagctgtcggaaccagatgcaacccggcagcccagagaactctcctgggaggctgtgggtgagccaggccaacattggtgtccctgtccccagagggaggagcaggcaggagagagaggggaaggaggtatgaatcccagtccccaggaacctagctctttaaactctggggagtcggattcaggaaacacccccaggaggccaagcctgaaaacagaggggagggaggaaggaaggagtcccagcaggagcacagccctggtttcctgtcactcagagctgattcacaggaggaggggaggttggggggcgggagacaaaaaccacacctctttttatataaggtttcatatttaatttggtcatggattcataaatacataagtattttgtacacaa

SEQ ID NO: 26399 - DNA, 3505 bp, Homo sapiens
  source 1..3505: mol_type = unassigned DNA
gtccttcacctgccttcccataagctggactttggatcccagcccttaaaacccttgtgttgtttcttcctgcagacctggtcgagaacactacttcaggacagggaatagtgacaggccagcagagccccagaggcgaggtggcagtaaacaagaatatgcacgcgcagtggaccacttctgaaggtcaacatataactttctcatccctgacatcaactgtcatccctgtgagcagaaccaactaccaaaggagagaggagcctggagggaacacagagcgatgcaagcctggagaaaaggccccgatggcccccagaagacctcttcagacagcatgtcccgtttaatggattctgacatggattatgaaaggccaaacgtagagaccatcaagtgcgttgtggtgggggacaacgccgtgggtaagaccaggctcatctgtgcccgcgcttgcaatgccaccctcacccagtaccagctgctggccacgcatgtgcccacagtatgggccatcgaccaatatcgtgtgtgccaggaggtgctggaacgctcccgagacgtggtagatgatgtcagcgtctctctgcgcctctgggacacctttggagaccaccacaaagaccgtcgctttgcttatgggagatctgatgtggtggttctgtgcttctccattgccaaccccaattccctccaccatgtcaagaccatgtggtacccagaaatcaagcacttctgcccccgagcacctgtcatcttggtgggctgccagttggacctgcgctacgctgacctggaggctgtcaacagggctaggcgacccttggctaggcccatcaaacctaatgaaatcctgcccccagagaagggtcgggaggtggccaaggagctgggcatcccctactatgagaccagcgtggtggcccagttcggcatcaaggacgtctttgacaacgccatccgagctgcactcatctcccgccgccacctgcagttctggaagtcccacctccgcaatgtgcagcggcctctgctgcaggcacccttcctaccccccaagccaccgcccccgatcatcgtggtgcccgaccctccctccagcagcgaggagtgccccgcccacctcctggaggacccgctctgcgcggacgtcatcctggtgctgcaggagcgggtgcgcatctttgcccacaagatctacctctccacctcttcctccaagttctatgacctgttcctcatggacctgagtgagggggagctggggggcccctcggagccagggggcacccacccagaggaccaccagggccactctgatcaacaccaccaccatcaccaccaccaccatgggcgagacttcctgctccgagcagccagctttgacgtgtgcgagagcgtggatgaggctgggggctccggtcctgctggcctccgtgcttccaccagcgacgggatcttacggggcaacggaacagggtacctaccgggcaggggtcgtgtgctgtcttcctggagccgagcttttgtgagcatccaggaagagatggcagaagatcctctcacctacaaatcccggctgatggtggtggtgaagatggacagttccatccagccggggcccttccgggctgtcctcaagtacctgtacacgggggagctagatgagaacgagcgtgacctcatgcacattgcccacattgctgagctgctcgaggtctttgatctgcgcatgatggtggccaacattctcaacaatgaggccttcatgaaccaggagatcaccaaggccttccacgtccgccggaccaaccgggttaaggagtgcttggcaaaaggcaccttctcagatgtgaccttcatcctggatgatggcaccatcagcgcccacaagcccctgttgatttccagctgtgactggatggctgccatgtttggggggccatttgtggagagctccacccgggaggtggtgtttccctacacaagcaagagctgcatgcgggccgtgctggaatacctctacaccggcatgttcacctccagccccgacctggatgacatgaagctcatcattctagccaaccgcctctgcctgccacacctggttgccctcacagagcagtacacagtgaccgggctgatggaagcgacccagatgatggtggacatcgatggggacgtccttgtgttcctggaactggctcagttccactgtgcgtaccagctggccgactggtgtctccaccacatctgcaccaactacaacaacgtgtgccgcaagttcccccgagacatgaaggccatgtccccagaaaaccaggagtatttcgagaagcatcggtggccacctgtgtggtacctgaaggaggaagatcattaccagcgggcacggaaggagcgtgagaaggaggactacctccacctcaagcggcagcccaaacggcgttggctcttctggaacagtccatcctccccgtcttcctcggcagcctcctcctcatccccatcttcctcctcggctgtggtctgagatgctgccaccctcttctgaccctgctgctgttgtccccatccgccttcacccctctgctcttccgcatcaccccatccaccttacagggaccagggggcccacgtaaccaggacccagagggtggagctcttcttaccagccaccgtggctcagccagagaggagctgagccctgtggagcagaacgggaaccacctgcagaggtccccagacccaaagcaggacgggagacaactgcttggaggagcgaagagccctggcattttatctctgggtttgagagccctagagtcaaagggaaagcctcccagcctccagggcttctctgtgtgtcttggttgctgctctggccagggaggcagccccactcccagcaagcagaagtgatcctcgagggtcctgcccctgttggccatatctttccaccgacggacttgagtgttgcatttgttttgtgggcatttccacacgaagcctactcacaccctcactggagaagtcagggtagaaattgagccttcagagcccaactcaaggcttctacatcctggggtgcagctgcaaaaggccagacgtggaaaggcctgtatcctgccagtgtccctccgtcccagggggctgtgctagcacagacctgagaatggggacacaggtcattcagagctccaggcctggaagcagtgcctcttggtgcaacaagaaacttctccctcaccccctcctttaccctcagatttggagatggtaaccaaaggaagcagctgggacaggtggagaaggaagtaggaatgagtgcacggcgaccccgtgctcctcagggccctcccctgcctctgggtggcactgctttttatagggtggggcaaaattagcaaaaaacaaaaaccaatgacaaccaaactgaaaccgaaacgaaaaatcaacaaacactctgtcctctatccctccaaagaatgaaaatcagaaaaag

SEQ ID NO: 26400 - DNA, 4959 bp, Homo sapiens
  source 1..4959: mol_type = unassigned DNA
agaggctgtagtgttccaggagaggggtgccatgaaagcgcggtcccgtttaatggattctgacatggattatgaaaggccaaacgtagagaccatcaagtgcgttgtggtgggggacaacgccgtgggtaagaccaggctcatctgtgcccgcgcttgcaatgccaccctcacccagtaccagctgctggccacgcatgtgcccacagtatgggccatcgaccaatatcgtgtgtgccaggaggtgctggaacgctcccgagacgtggtagatgatgtcagcgtctctctgcgcctctgggacacctttggagaccaccacaaagaccgtcgctttgcttatgggagatctgatgtggtggttctgtgcttctccattgccaaccccaattccctccaccatgtcaagaccatgtggtacccagaaatcaagcacttctgcccccgagcacctgtcatcttggtgggctgccagttggacctgcgctacgctgacctggaggctgtcaacagggctaggcgacccttggctaggcccatcaaacctaatgaaatcctgcccccagagaagggtcgggaggtggccaaggagctgggcatcccctactatgagaccagcgtggtggcccagttcggcatcaaggacgtctttgacaacgccatccgagctgcactcatctcccgccgccacctgcagttctggaagtcccacctccgcaatgtgcagcggcctctgctgcaggcacccttcctaccccccaagccaccgcccccgatcatcgtggtgcccgaccctccctccagcagcgaggagtgccccgcccacctcctggaggacccgctctgcgcggacgtcatcctggtgctgcaggagcgggtgcgcatctttgcccacaagatctacctctccacctcttcctccaagttctatgacctgttcctcatggacctgagtgagggggagctggggggcccctcggagccagggggcacccacccagaggaccaccagggccactctgatcaacaccaccaccatcaccaccaccaccatgggcgagacttcctgctccgagcagccagctttgacgtgtgcgagagcgtggatgaggctgggggctccggtcctgctggcctccgtgcttccaccagcgacgggatcttacggggcaacggaacagggtacctaccgggcaggggtcgtgtgctgtcttcctggagccgagcttttgtgagcatccaggaagagatggcagaagatcctctcacctacaaatcccggctgatggtggtggtgaagatggacagttccatccagccggggcccttccgggctgtcctcaagtacctgtacacgggggagctagatgagaacgagcgtgacctcatgcacattgcccacattgctgagctgctcgaggtctttgatctgcgcatgatggtggccaacattctcaacaatgaggccttcatgaaccaggagatcaccaaggccttccacgtccgccggaccaaccgggttaaggagtgcttggcaaaaggcaccttctcagatgtgaccttcatcctggatgatggcaccatcagcgcccacaagcccctgttgatttccagctgtgactggatggctgccatgtttggggggccatttgtggagagctccacccgggaggtggtgtttccctacacaagcaagagctgcatgcgggccgtgctggaatacctctacaccggcatgttcacctccagccccgacctggatgacatgaagctcatcattctagccaaccgcctctgcctgccacacctggttgccctcacagagcagtacacagtgaccgggctgatggaagcgacccagatgatggtggacatcgatggggacgtccttgtgttcctggaactggctcagttccactgtgcgtaccagctggccgactggtgtctccaccacatctgcaccaactacaacaacgtgtgccgcaagttcccccgagacatgaaggccatgtccccagaaaaccaggagtatttcgagaagcatcggtggccacctgtgtggtacctgaaggaggaagatcattaccagcgggcacggaaggagcgtgagaaggaggactacctccacctcaagcggcagcccaaacggcgttggctcttctggaacagtccatcctccccgtcttcctcggcagcctcctcctcatccccatcttcctcctcggctgtggtctgagatgctgccaccctcttctgaccctgctgctgttgtccccatccgccttcacccctctgctcttccgcatcaccccatccaccttacagggaccagggggcccacgtaaccaggacccagagggtggagctcttcttaccagccaccgtggctcagccagagaggagctgagccctgtggagcagaacgggaaccacctgcagaggtccccagacccaaagcaggacgggagacaactgcttggaggagcgaagagccctggcattttatctctgggtttgagagccctagagtcaaagggaaagcctcccagcctccagggcttctctgtgtgtcttggttgctgctctggccagggaggcagccccactcccagcaagcagaagtgatcctcgagggtcctgcccctgttggccatatctttccaccgacggacttgagtgttgcatttgttttgtgggcatttccacacgaagcctactcacaccctcactggagaagtcagggtagaaattgagccttcagagcccaactcaaggcttctacatcctggggtgcagctgcaaaaggccagacgtggaaaggcctgtatcctgccagtgtccctccgtcccagggggctgtgctagcacagacctgagaatggggacacaggtcattcagagctccaggcctggaagcagtgcctcttggtgcaacaagaaacttctccctcaccccctcctttaccctcagatttggagatggtaaccaaaggaagcagctgggacaggtggagaaggaagtaggaatgagtgcacggcgaccccgtgctcctcagggccctcccctgcctctgggtggcactgctttttatagggtggggcaaaattagcaaaaaacaaaaaccaatgacaaccaaactgaaaccgaaacgaaaaatcaacaaacactctgtcctctatccctccaaagaatgaaaatcagaaaaagcccctgcctagctcacatttctataaacagaggcccccatgatgaggaggtgaagatttaggttgcagaatcgactccaatgcctttcaggaaaggactcggcacttctctgactgcggaggccctgaccctgccagctggctccgagggcaacacaggggcctggcctctagagggctggtgattgaggggcccgggctggcggcaaagaggggtttggtctcggggcttaaatggcaccagactcttgcttttgcccatctggagactgcaggctcccttccttaccctcagagagtgcttatggtgggtgtttttgcggggctgcaataggggccaaaagtcagggaaaggggcactgacctgtagtgaaaggccacaggacacagccttattactgctggggtgggataaggggaaggagaagagggagaatggagcaggaggaaaagcagagttggtctagagaggaggagggcggggctggaggaatgtgggggattgaaactagctcccagcccccatggggcagcagctgggccacaattgcccctttccgttttctaaccccgactcagatttcaccacccacactctttttaggtgtaaaagatggagtcccacggaggaggggcagagccaggaggcagtggggctgtgggctcagagctcaggagtcgccttacctgagagagatgttctagctgagagggcctggccctggggtgggctccaggaaaacgctggttaggcctgggattgagctaacctgaaacaaaggtagcaggcaggacctaatgaccagaggttaaatcctcatcaagagagaccaggcggctggaggacaagcggctctaaccctgggggcggccatgttgtccaggcccaggcccctccaggactgtggctgcctcccctccacggcctccagggcggctggctggaaagccacgcgtatgctgccctctacaggctgctcggcctccctgcagctcagcgcagcccagggctccaagtgaggcccagaagcccatgggcagggctggggggacgaagggggaacccggagcacctccacttctagggaagatggacagcgtgggggcacacctgggcctcccggaagctgtggacgaaagggagagcgggtcctccagggcaaggggaacgggaaataggtctcctaggtgcctgaagcgctgagcaacctgggtaccctggtggggatgcagggaaggccggggcagagaaagtgaaggtcgacccagggctgtaggaagccataggagagtgaccacgggattccctgagaaacagggccggccccccaacttcagggacccaccgcccattccccgagagctgtcggaaccagatgcaacccggcagcccagagaactctcctgggaggctgtgggtgagccaggccaacattggtgtccctgtccccagagggaggagcaggcaggagagagaggggaaggaggtatgaatcccagtccccaggaacctagctctttaaactctggggagtcggattcaggaaacacccccaggaggccaagcctgaaaacagaggggagggaggaaggaaggagtcccagcaggagcacagccctggtttcctgtcactcagagctgattcacaggaggaggggaggttggggggcgggagacaaaaaccacacctctttttatataaggtttcatatttaatttggtcatggattcataaatacataagtattttg

SEQ ID NO: 26401 - DNA, 5537 bp, Homo sapiens
  source 1..5537: mol_type = unassigned DNA
ccgccaccggagctcccggggcctccgcggggagcgcgtcccccgcatccgcccgacccccggggctggcacgtgctgcgcccggtccgctgagggggcggaggccccgatctccccgaccccccttctctgcttagaggaggaggagcagcggcagcggcagcaggaggcgacagctgccagccgaggaggcgcggcggagaggggactgcggtcagctgcgtccacttggggctgtgcggcggtcccgcgcccggcgatgttcccgggcactccctgagtagcggcagcttatcccccgcccgctagcccgccctggtccccggctcgctcgctggctggcgcggccccggccccgctctgcgtcggccccgccgcggtggaggcgcgcgagggggacgcggccggggatgagcggattgcgggtgaactcgccgcccgggggccccgcgaagccgtgagccgctgcttttctccgagtcgccgccctgcccttggatttgagatcatgtccatccacatcgtggcgctggggaacgagggggacacattccaccaggacaaccggccgtcggggcttatccgcacttacctggggagaagccctctggtctccggggacgagagcagcttgttgctgaacgcggccagcacggtcgcgcgtccggtgttcaccgagtatcaggccagtgcgtttgggaatgtcaagctggtggtccacgactgtcccgtctgggacatatttgacagtgattggtacacttctcgaaatctaattgggggcgctgacatcattgtgatcaaatacaacgttaatgacaagttttcattccatgaagtaaaggataattatattccagtgataaaaagagcattaaattcagttccagtaattattgctgctgttggtaccagacaaaatgaagagttaccttgtacatgcccactatgtacctcagacagagggagctgtgttagtacaactgaagggatccaacttgcaaaagaactaggagcgacctatcttgaactccacagccttgatgacttctacataggaaagtattttggaggagtgttggagtattttatgattcaagccttaaatcagaagacaagtgaaaaaatgaagaaaagaaaaatgagcaactcctttcatggaattagaccacctcaacttgaacaaccagaaaaaatgcctgtcttaaaggctgaagcgtcacattataactctgacttaaataacttgctgttctgctgccagtgtgtggacgtggtattttacaaccccaatttaaagaaagttgtagaggcccacaagatcgttctctgcgctgtaagccatgttttcatgctgcttttcaatgtgaagagtcccactgacattcaggattccagtatcatccgaactacccaggatctttttgctataaacagagatactgcatttccaggtgctagccatgaatcttcaggcaacccaccattacgagtcattgttaaagacgccctcttctgttcttgtttatcagacatccttcgcttcatttattcaggtgcttttcagtgggaagaattggaagaagatatcaggaagaagttgaaagattctggggatgtttcaaatgtaatcgagaaagttaaatgcattttaaaaacaccaggaaagattaattgcctaaggaattgcaaaacctatcaagccagaaaacctttgtggttttataacacttccctcaagtttttccttaataagccgatgcttgccgatgttgtcttcgaaattcaaggtacgacagtgccagcccacagggccatcctggtggcccgttgtgaagtgatggcagccatgtttaatggtaattacatggaagcaaagagtgtcctgattcccgtttatggtgtttccaaagagactttcttgtcatttttagaatacctgtacacagactcctgctgcccagctggcatattccaggccatgtgtctcctgatctgtgccgagatgtaccaagtgtccagactgcagcacatctgtgagctgttcatcattacccagctgcagagcatgccaagcagggaactggcatccatgaaccttgatatagttgacctgcttaaaaaggccaagtttcaccactctgattgcctttcaacctggctacttcatttcattgctactaactacctcatcttcagtcaaaagcctgaatttcaggatctttcagtggaagaacgcagttttgttgaaaagcacagatggccgtcgaatatgtacttgaagcagcttgcggaatacaggaagtatattcactcccggaaatgtcgttgcttagtaatgtaacctggagcttttatacactacatttcttttttattattatgaagaatgggatacctccaggttccagtaaaattcttctgaccgaaaccaatgtgggtgttagaaaaattaccatatagcttaatatgtttattagttctctttggaaaaaaactaccactgtggtcttaaaagggaacaaaatataccataggctaaaactaaggctttcactctagaatgcaaagctgttttgcagctgttttcccttaaagatgtcctgttgctttagtgatatttagacccctctcagttaagaaatgcttagattaaaaaaaaaaaattacgtaggattaatacagaaatttaatcatgtctgattaattgctctattaaaataaggggcatttaaagacccagcataaccatttgtataatgagaaatctaggggaaaaccaatcagtccaacatgagattttaggaatagaaatttgccggccatttggaaagtgaaatgccacttagttctcaattgatgacagtgtttgaatcatcataaaaaaaatacctgcttttcatctggacaacccaattgagccactttatctccttttggcaatctgagtaggcggggaacctaggcagggctggctttcttagcgtgtaacttgtgtagcagcacagggcccacacttagaaggaccccacacttggttcaaggctctgctatagcggaaattcttaataatgtttgaagaagggccccatgatttcattttgtgctgagccctcaaaattatgtctgtttcgtggtgggaaatatcctatgttttcttgctcaaacacctttctctctgaaagcagaaaaaggcactgatataaagggaagagaaggaggctcaccggagggaagagaacatagtgaagattcccgcctttggggaggtctggaccacccagggcctccactgccaccttggctggcaagggagaaatgtgttgtgttgtcttagctttaaaacagtcacagttcttgctctatcatagatgaacaaatactttcttgatcattctgtaagaccaggaggttggtaagagtgactaaccagcctaactttaatacacatgtataaagatgttcacagagaaagatgctctgtagagaatttgctaccgaagttggctcaagaatttgtttttagtgttatttaccaagattaggacgtcagtggcttaaattctttgaattcttttcaaggactgcaagattatttgataaagagtagcatgaatcttgtgctctaatattacacagtaagttcaaagaaaggatgtaagtcaaagacttgttacatagagggaaaatggactgggatagaggacagactgatagtttctttctttcatatcacatgtatagagaaataattatatcagaaactcacaaacctagacatggaaaaacagattactgtctattgtcagcatcattttcatctgtaagtcactactggaatatatttttcttttaatttccagtgactttagaatacacacagtttttccgacttttcaaaaatttgattaaatggttttatagtataatattgggaccccataccgttagcccttgtatgtataccaacactgccaaagtaaaacattaggtcaggcatggtggctcaggcctgtaatcccagcattttgggaggctgaggcaagtggataacttgaggtcatgagttcgaaaccagcctggccaaaacagtgaaaccccgtctctactaaaaatacaaaattagccagatgtggtggcgcacacctgtaatcccagctactcaggaagctgaggcaggaaaatcgcttgaacctgggaggtggaagttgcagtgagccgagatcgcaccactgcactccagcctgggtgacaagagcgaaactccatctcaaaaaaaaaaaaaaaaccaaagtgaaacactaaaaattccctatagatatattccaggaaatattttaattgggctgattttaattaggctgtatcattgatgattactggaatcgattttatgtcttttgtattttaatcacttgagttaatcaaccactggcaaatcccatttgacaaagattagcattgtaaaaaacagatactgtggtagatttctagaaattcattcacatttaagacttctaaaatggaataatagccttttgtttttcatgagcatattcgcacccctatatgaattacagcatttaaagttcaaaatcagtaacttttaatctaggaaattgaaaaatattaagttgcaaagcaaaaaaaggtattttcttgaaaatactatttaatgtttaactagactataggtagttccttaaggttgtttgacctgaagtggagttgggtttggaagctggtgcccagttggtgtggagtgtgtagttttgttatgaaagttctctaccacctacctgtgtgagtgacaccaacatccagatgtcacagctctccagagctagtcagaagagaaatcaaattagtgtttaaacccatttgcatattgacttgtcagtacctttaactcaatttaatataacaagaaatcgtaaaatacttataacctatcttagagaaatgagtgctggttttgagagttgttttttaactgaaagattatttctagatgggtagtgctttgtgctggtttctgcttccatatatttcccagtcattttaattagagaagatactctatggtagaactaaggcctttcctttcttggccaaagtctttaccctatttaaccctttgtatatttctgactgctcactgttcatattataggggaccagatttgtaatatagaattctccataacatgaatgaaattaattctgtccaagccagcatggtggcttcatattaagtagtaacagaagtctgaacaattggataaatttgacttccaagacagctaaacttttcaactgcaattttaaaaactacactacactgttatagttaatctgacaaaaatgtcctcaaagagtactttattttatttaaagcatctgtttaattcaacctttaataattttgcaaagaagggtatgtgtgtattttaatatagcctgacctgaatttatatgtttttagctttagtatttaactttttgtaacaaataaaccttttttaaaacaagtttaa

SEQ ID NO: 26402 - DNA, 653 bp, Homo sapiens
  source 1..653: mol_type = unassigned DNA
cgagatgtaccaagtgtccagactgcagcacatctgtgagctgttcatcattacccagctgcagagcatgccaagcagggaactggcatccatgaaccttgatatagttgacctgcttaaaaaggccaagtttcaccactctgattgcctttcaacctggctacttcatttcattgctactaactacctcatcttcagtcaaaagcctgaatttcaggatctttcagtggaagaacgcagttttgttgaaaagcacagatggccgtcgaatatgtacttgaagcagcttgcggaatacaggaagtatattcactcccggaaatgtcgttgcttagtaataaaaaggcactgatataaagggaagagaaggaggctcaccggagggaagagaacatagtgaagattcccgcctttggggaggtctggaccacccagggcctccactgccaccttggctggcaagggagaaatgtgttgtgttgtcttagctttaaaacagtcacagttcttgctctatcatagatgaacaaatactttcttgatcattctgtaagaccaggaggttggtaagagtgactaaccagcctaactttaatacacatgtataaagatgttcacagagaaagatgctctgtagagaatttgctaccgaa

SEQ ID NO: 26403 - DNA, 2142 bp, Homo sapiens
  source 1..2142: mol_type = unassigned DNA
cgagagacagaagccgaggagaggaggctaagccgggcggcgcggggagcgcactgagcaggcaaagtcgcagggccgccagcatgttctcccgaaaccaccggagccgggtcaccgtggccaggggctccgccctggagatggagttcaaacgcggccgcttccgactcagcctcttcagcgacctgcccgaggacacggagttgcagaggaagctagaccatgagatccggatgagggaaggggcctgtaagctgctggcagcctgctcccagcgagagcaggctctggaggccaccaagagcctgctagtgtgcaacagccgcatcctcagctacatgggcgagctgcagcggcgcaaggaggcgcaggtgctggggaagacaagccggcggccttctgacagtggcccgcccgctgagcgctccccctgccgcggccgggtctgcatctctgacctccggattccactcatgtggaaggacacagaatatttcaagaacaaaggtgacttgcaccgctgggctgtgttcctgctgctgcagctgggggaacacatccaggacacagagatgatcctagtggacaggaccctcacagacatctcctttcagagcaatgtgctcttcgctgaggcggggccagactttgaactgcggttagagctgtatggggcctgtgtggaagaagagggggccctgactggcggccccaagaggcttgccaccaaactcagcagctccctgggccgctcctcagggaggcgtgtccgggcatcgctggacagtgctgggggttcagggagcagtcccatcttgctccccaccccagttgttggtggtcctcgttaccacctcttggctcacaccacactcaccctggcagcagtgcaagatggattccgcacacatgacctcacccttgccagtcatgaggagaaccctgcctggctgcccctttatggtagcgtgtgttgccgtctggcagctcagcctctctgcatgactcagcccactgcaagtggtaccctcagggtgcagcaagctggggagatgcagaactgggcacaagtgcatggagttctgaaaggcacaaacctcttctgttaccggcaacctgaggatgcagacactggggaagagccgctgcttactattgctgtcaacaaggagactcgagtccgggcaggggagctggaccaggctctaggacggcccttcaccctaagcatcagtaaccagtatggggatgatgaggtgacacacacccttcagacagaaagtcgggaagcactgcagagctggatggaggctctgtggcagcttttctttgacatgagccaatggaagcagtgctgtgatgaaatcatgaaaattgaaactcctgctccccggaaaccaccccaagcactggcaaagcaggggtccttgtaccatgagatggctattgagccgctggatgacatcgcagcggtgacagacatcctgacccagcgggagggcgcaaggctggagacacccccaccctggctggcaatgtttacagaccagcctgccctgcctaacccctgctcgcctgcctcagtggccccagccccagactggacccaccccctgccctgggggagaccccgaaccttttccctggatgctgtccccccagaccactcccctagggctcgctcggttgcccccctcccacctcagcgatccccacggaccagaggcctctgcagcaaaggccaacctcgcacttggctccagtcaccagtgtgagagagaaaggtgctggcataggatctgcccagaagagaaaatgacccatgcgcagttgggctctggatacggcgctgtctatagcaagttggccagtctggcctcctgttcctctgctggacctggggtaggctgcaggggtgggcagaagcccctcttaaattgtggttgccatggtaccgagggactcattcctggggctcgctgggacctccctaaacccttcctggaagaaaactggaaccaactctgccctacctccctgcactaaccagctttgaggatggcactgaagaacccttggagcaaacatacctcccttgtgactcccacatcaaccattaaagttatttaacagcagccttca

SEQ ID NO: 26404 - DNA, 2646 bp, Homo sapiens
  source 1..2646: mol_type = unassigned DNA
gggacagctcggaggagctggggcggagccgcagggcctggcggccgccgagtgaagtgtgactccgtgggcctggcgtggaggcgggggcgctaggctgcagctggctcggaatcggggctggtttcctgtctggaagggaaggggcctgcagaagggagcggggacagcagcagacaggcacacccctgccttcctctctccctctcctcccttctctggaaaagcgagctgggagaacagctgccaccaaagcgagactggacactctgtgcctagagccccctctgcagctggcctttcctcctgggaccccacttatcctcacttcgctttctttttcttccctgcctggctcccggcagggccccggagcagcagtgggcgaggaaaatttgtcacagcagccagaggggtttaacaggagtgcagagggataagggcagcttctgccctctgcccaagagctggccacctctttaaagactgagggaacagtgggaggaggaactgtgggacagtgtggtacctatctgtcccccctctggaggggttgacaagggaaagggcaccggggggcacagagatgcaggacagattgcacatcctggaggacctgaatatgctctacattcggcagatggcactcagcctggaggacacggagttgcagaggaagctagaccatgagatccggatgagggaaggggcctgtaagctgctggcagcctgctcccagcgagagcaggctctggaggccaccaagagcctgctagtgtgcaacagccgcatcctcagctacatgggcgagctgcagcggcgcaaggaggcgcaggtgctggggaagacaagccggcggccttctgacagtggcccgcccgctgagcgctccccctgccgcggccgggtctgcatctctgacctccggattccactcatgtggaaggacacagaatatttcaagaacaaaggtgacttgcaccgctgggctgtgttcctgctgctgcagctgggggaacacatccaggacacagagatgatcctagtggacaggaccctcacagacatctcctttcagagcaatgtgctcttcgctgaggcggggccagactttgaactgcggttagagctgtatggggcctgtgtggaagaagagggggccctgactggcggccccaagaggcttgccaccaaactcagcagctccctgggccgctcctcagggaggcgtgtccgggcatcgctggacagtgctgggggttcagggagcagtcccatcttgctccccaccccagttgttggtggtcctcgttaccacctcttggctcacaccacactcaccctggcagcagtgcaagatggattccgcacacatgacctcacccttgccagtcatgaggagaaccctgcctggctgcccctttatggtagcgtgtgttgccgtctggcagctcagcctctctgcatgactcagcccactgcaagtggtaccctcagggtgcagcaagctggggagatgcagaactgggcacaagtgcatggagttctgaaaggcacaaacctcttctgttaccggcaacctgaggatgcagacactggggaagagccgctgcttactattgctgtcaacaaggagactcgagtccgggcaggggagctggaccaggctctaggacggcccttcaccctaagcatcagtaaccagtatggggatgatgaggtgacacacacccttcagacagaaagtcgggaagcactgcagagctggatggaggctctgtggcagcttttctttgacatgagccaatggaagcagtgctgtgatgaaatcatgaaaattgaaactcctgctccccggaaaccaccccaagcactggcaaagcaggggtccttgtaccatgagatggctattgagccgctggatgacatcgcagcggtgacagacatcctgacccagcgggagggcgcaaggctggagacacccccaccctggctggcaatgtttacagaccagcctgccctgcctaacccctgctcgcctgcctcagtggccccagccccagactggacccaccccctgccctgggggagaccccgaaccttttccctggatgctgtccccccagaccactcccctagggctcgctcggttgcccccctcccacctcagcgatccccacggaccagaggcctctgcagcaaaggccaacctcgcacttggctccagtcaccagtgtgagagagaaaggtgctggcataggatctgcccagaagagaaaatgacccatgcgcagttgggctctggatacggcgctgtctatagcaagttggccagtctggcctcctgttcctctgctggacctggggtaggctgcaggggtgggcagaagcccctcttaaattgtggttgccatggtaccgagggactcattcctggggctcgctgggacctccctaaacccttcctggaagaaaactggaaccaactctgccctacctccctgcactaaccagctttgaggatggcactgaagaacccttggagcaaacatacctcccttgtgactcccacatcaaccattaaagttatttaacagcagccttcacctggctcctgaggacagggtgcctctctctgcctggtct

SEQ ID NO: 26405 - DNA, 2220 bp, Homo sapiens
  source 1..2220: mol_type = unassigned DNA
ggaggggcctgtgagctggggccgcccctgggattagcccggccttcggggacagctcggaggagctggggcggagccgcagggcctggcggccgccgagtgaagtgtgactccgtgggcctggcgtggaggcgggggcgctaggctgcagctggctcggaatcggggctggtttcctgtctggaagggaaggggcctgcagaagggagcggggacagcagcagacaggcacacccctgccttcctctctccctctcctcccttctctggaaaagcgaggacacggagttgcagaggaagctagaccatgagatccggatgagggaaggggcctgtaagctgctggcagcctgctcccagcgagagcaggctctggaggccaccaagagcctgctagtgtgcaacagccgcatcctcagctacatgggcgagctgcagcggcgcaaggaggcgcaggtgctggggaagacaagccggcggccttctgacagtggcccgcccgctgagcgctccccctgccgcggccgggtctgcatctctgacctccggattccactcatgtggaaggacacagaatatttcaagaacaaaggtgacttgcaccgctgggctgtgttcctgctgctgcagctgggggaacacatccaggacacagagatgatcctagtggacaggaccctcacagacatctcctttcagagcaatgtgctcttcgctgaggcggggccagactttgaactgcggttagagctgtatggggcctgtgtggaagaagagggggccctgactggcggccccaagaggcttgccaccaaactcagcagctccctgggccgctcctcagggaggcgtgtccgggcatcgctggacagtgctgggggttcagggagcagtcccatcttgctccccaccccagttgttggtggtcctcgttaccacctcttggctcacaccacactcaccctggcagcagtgcaagatggattccgcacacatgacctcacccttgccagtcatgaggagaaccctgcctggctgcccctttatggtagcgtgtgttgccgtctggcagctcagcctctctgcatgactcagcccactgcaagtggtaccctcagggtgcagcaagctggggagatgcagaactgggcacaagtgcatggagttctgaaaggcacaaacctcttctgttaccggcaacctgaggatgcagacactggggaagagccgctgcttactattgctgtcaacaaggagactcgagtccgggcaggggagctggaccaggctctaggacggcccttcaccctaagcatcagtaaccagtatggggatgatgaggtgacacacacccttcagacagaaagtcgggaagcactgcagagctggatggaggctctgtggcagcttttctttgacatgagccaatggaagcagtgctgtgatgaaatcatgaaaattgaaactcctgctccccggaaaccaccccaagcactggcaaagcaggggtccttgtaccatgagatggctattgagccgctggatgacatcgcagcggtgacagacatcctgacccagcgggagggcgcaaggctggagacacccccaccctggctggcaatgtttacagaccagcctgccctgcctaacccctgctcgcctgcctcagtggccccagccccagactggacccaccccctgccctgggggagaccccgaaccttttccctggatgctgtccccccagaccactcccctagggctcgctcggttgcccccctcccacctcagcgatccccacggaccagaggcctctgcagcaaaggccaacctcgcacttggctccagtcaccagtgtgagagagaaaggtgctggcataggatctgcccagaagagaaaatgacccatgcgcagttgggctctggatacggcgctgtctatagcaagttggccagtctggcctcctgttcctctgctggacctggggtaggctgcaggggtgggcagaagcccctcttaaattgtggttgccatggtaccgagggactcattcctggggctcgctgggacctccctaaacccttcctggaagaaaactggaaccaactctgccctacctccctgcactaaccagctttgaggatggcactgaagaacccttggagcaaacatacctcccttgtgactcccacatcaaccattaaagttatttaacagca

SEQ ID NO: 26406 - DNA, 2684 bp, Homo sapiens
  source 1..2684: mol_type = unassigned DNA
aagggagcgcacgccggcggcgcggaggccggctctgcgcttcgggccgccccctccccccaccccgctcacacccggcacttacttcggctgtctccgctgccctccagcggagacgcagctcctcaggcgcccggcggtatttgttgggtcggcggcgtcagggattcgcagtggcctgtggtcggcgtcgtccggccactggtgcgcccccgcggcaggcagagctcacgctcctgtcccccggctggtccggggtctgggcgccgcgtcgacggcggctccgcaggacgcgcagaccgggccgcagcccattccccgagcggactgcattatgaggcacctgccttacttctgccggggtcaagtggtgcggggcttcggccgcggctccaagcagctgggcatccccacagctaattttcctgagcaagtggtagataatcttccagctgatatatccactggtatttactatggttgggccagtgttggaagtggagatgtccataagatggtggtgagcataggatggaacccatattacaagaatacgaagaagtctatggaaacacatatcatgcataccttcaaagaggacttctatggggaaatcctcaatgtggccattgttggctacctgagaccagaaaagaactttgattctttagagtcacttatttcagcaattcaaggtgatattgaagaagctaagaaacgactagagttaccagaacatttgaaaatcaaagaagacaatttcttccaggtttctaaaagcaaaataatgaatggccactgatgaaaaattgtattatttattcattcactgttttctagtgtttctgtgtttattactgttcagcatcatcttggttatatactgaaaatcaaacactttactacagttgtgaattagtttaaaccgtacaatgttgttatcatatcatgcttcaactattaaattaagcccatcatatcatagcactaaaaagattgagttaaaaataagatttaaaaaatatatattgattaaaatgtaccactagaaaggtattacatgtgtataagtatgggtaaaaaggcaagtcactagtttgagatgaaaactaaaattttcatggtaaaatgccagcatgtatgtacttgtgtagtgtgtacttctaaacagagaaggcttataaaagtaaatgcattaaggccaagtgcagtggctcacaccggtaatcccagcactttgggaggccgaggtgggaggattgcttgagctcatgagttcaagaccagcctgggcaacatagcgagactccatctctataaataaaaaaaaaggaaatgcattaaatagaaggttgatagtttatcataaacctgcggggaagaaactcagactttctatttttgatattttgtgcattaatacattacaaacatgaagatgtttgtaaagttttgttttagtcattttctttgcagtcacatcattgtaccaccttcattattgtatagagctgcttcaattctgagtcctctggacttcccctgcctatctgtttgttgttgttgttgaagacagtaaaataagtgttttcaaatctatatgtctcctttttgttggataatgtttcttctttttaatggtaaatattcttgttcttcaacatttttctttggttcttttttccttttttaggaaaaacaaaacaacagacttcatccttaggttttctcaagatttaagtgaacacatttacacatatcaatttcttaaagaacacaaaatgtttcctccctagcaaaactatttaagagccaattaaactatgaaatagttataaaattatttttaatatttaaggccttgaaattatattccaaggcaaatctaaatgggtgtagttgtatatgcacgatgtaatttaatgctaaagagtacttacagcttgagggaaaagcataaagttttagttaaatagccttcatactgtggatttttcctcctactaactaatatgtgggaaattaagattacagatgctttgggccccctcaaacagtacattgctacagttcactgtagcaacagatttggtggtgatggggggatagaggtagaagcagatagaaggtaattttaaagttaatttattatgaatcattttcccctaatctgcataaatgaattagaactgattttaataaaaatattctgtgtaaaaagtactcagaaaaacatctaaagctgttggagaagagggactcatataaatagttggattgcgttttgctttttatttctttataaaaatatgtcaaaaacagtttttaattttagaaatcttatacttgaaagaaacctcaattatcagtggctttatgaagtaaagttaaaaacaaacataggaaatgtgaaaatatttgtgtttgttttgtctgactaacttgctgctaaatgctatctttaggtgtgtgaaagttctttgatatgttattgtccttttacatcttgttaaatagccattgcttttgagaatcagatagtgtgttgtttaggggttaattgtgtctatatctttcaaaaacttttatattatgtattataagaagttacagtagtaccattttgattagtctgaatgttttcaggccttgaaataaattttgactaagtgatattttttctt

SEQ ID NO: 26407 - DNA, 1973 bp, Homo sapiens
  source 1..1973: mol_type = unassigned DNA
caggcaacaaggaactaatactcggggtttacaggaaccaggggatgggccagatatggagaaagagacgcctctggccttgggggctcgttcttgagggaatcagcgtgatggggatgagaagggcatctttggaacgggggccttctccataggaagaggaggcgagtcccctggccatatttaaaccacagttctccacgccacctgtgcgactcgggatccaacctccccgcaccagccccagtccaggtacctggaacttagtccgatcggtaaccggcgactacgtggggtacaggtacccgagcgcgcccccgacagacgcaccgacctgcgcgcgcgccgcgggcaggatgcgtgcgcactccccggacgtcccgccccgccccctctgcggccccgaagctgggcggcgtgcgcgcccccgcgccgcgccgagccgggcgctcggaaaggcgtccccgcggtgcctgacagttccttcctcagcgcctgccccgtgagtgacgaggagcgcggagtctcgccatatcaggagggccctgttacgtgaggctgtgcaccgagactattccaggaagaagaggggacacttggtgggcggggtgatttcgggcagtcaggtgggcgacccgcgtaggcgtctgaaaggcccgcgtcgttagggagggcaggagtggcgtctctggttacggggtcgggcaaagggcagaggtcaccgtccaggttggacagcagcacctttgagcgatggcggcgtctggggaaccccagaggcagtggcaagaggaggtggcggcggtggtagtggtgggctcctgcatgaccgacctggtcagtcttacttctcgtttgccaaaaactggagaaaccatccatggacataagttttttattggctttggagggaaaggtgccaaccagtgtgtccaagctgctcggcttggagcaatgacgtccatggtgtgtaaggttggcaaagattcttttggcaatgattatatagaaaacttaaaacagaatgatatttctacagaatttacatatcagactaaagatgctgctacaggaactgcttctataattgtcaataatgaaggccagaatatcattgtcatagtggctggagcaaatttacttttgaatacggaggatctgagggcagcagccaatgtcattagcagagccaaagtcatggtctgccagctcgaaataactccagcaacttctttggaagccctaacaatggcccgcaggagtggagtgaaaaccttgttcaatccagcccctgccattgctgacctggatccccagttctacaccctctcagatgtgttctgctgcaatgaaagtgaggctgagattttaactggcctcacggtgggcagcgctgcagatgctggggaggctgcattagtgctcttgaaaaggggctgccaggtggtaatcattaccttaggggctgaaggatgtgtggtgctgtcacagacagaacctgagccaaagcacattcccacagagaaagtcaaggctgtggataccacgggtgctggtgacagctttgtgggagctctggccttctacctggcttactatccaaatctgtccttggaagacatgctcaacagatccaatttcattgcagcagtcagtgtccaggctgcaggaacacagtcatcttacccttacaaaaaagaccttccgcttactctgttttgattgctattagtcccaaaataaatatacctgggaataaaatgtacttgggggtggctgctcctggctaatgcttattagaaaatgtcctcgtcccctttctttgcaaatattagttcttttacgaagtcatcctcaagcttcaatttatttataacgatgattcttttgctttccatgcatttgcacaaaacaaccagaattaaagattccacaaccaagatctgtacaaacataaagacaagtaacctcaa

SEQ ID NO: 26408 - DNA, 1547 bp, Homo sapiens
  source 1..1547: mol_type = unassigned DNA
gagcgatggcggcgtctggggaaccccagaggcagtggcaagaggaggtggcggcggtggtagtggtgggctcctgcatgaccgacctggtcagtcttacttctcgtttgccaaaaactggagaaaccatccatggacataagttttttattggctttggagggaaaggtgccaaccagtgtgtccaagctgctcggcttggagcaatgacgtccatggtgtgtaaggttggcaaagattcttttggcaatgattatatagaaaacttaaaacagaatgatatttctacagaatttacatatcagactaaagatgctgctacaggaactgcttctataattgtcaataatgaaggccagaatatcattgtcatagtggctggagcaaatttacttttgaatacggaggatctgagggcagcagccaatgtcattagcagagccaaagtcatggtctgccagctcgaaataactccagcaacttctttggaagccctaacaatggcccgcaggagtggagtgaaaaccttgttcaatccagcccctgccattgctgacctggatccccagttctacaccctctcagatgtgttctgctgcaatgaaagtgaggctgagattttaactggcctcacggtgggcagcgctgcagatgctggggaggctgcattagtgctcttgaaaaggggctgccaggtggtaatcattaccttaggggctgaaggatgtgtggtgctgtcacagacagaacctgagccaaagcacattcccacagagaaagtcaaggctgtggataccacgtgtagacctggctcaagacccaagagtgaagcagcaagtgtgaagaagcagaaacattataaataacccagagaatccttttataacagcaactgcctactgattttgtggcctaacagctcgagcaaaaatgaatataaatacaacattgtgcaatgactaattactcaaaattttgtgcatcagcagaagtggaacctgtggttggtgctaatattatgaaatgcctttgctgtttaataatctggtagctctgtattatttagcatgcatttttcttggagaacaatgattttatttcaagtacctctcactgaaataaaaaagcagctgttagaagatgaacatttagcagaaaatattttagcgagtcttttgtaagatactaagtcctattggattaactgttttctgtctagaatagtggggtcacaaaaaaaaggggattgctgaccacaaaaggcaaaaggccaacctttagaactcagtgaatcactaacagacattttagttttaattgcgatttactcaccaatatatatacaaagctctcattaatattgcctgaagaatgggccctttttaattccatttttagctcgctctcaggattccacttctctttcattaacatggaattctttaaattatagaataaattaacccaccgcaaacattttgggcagaatggggttttcagcaattttcagcctccacaggccattcttctcagcagcttgccagcca

SEQ ID NO: 26409 - DNA, 1887 bp, Homo sapiens
  source 1..1887: mol_type = unassigned DNA
ggggagagaaggggcccaacatggtccatctcgaccttcctctgccgggcccagggcttcagccccgctcccataggccccgccccatcccagacctcgcccgccttcgggatctcagccctggctccgcttcttcaagtaccgacaggaagttgacgagttcgggctcgtcaggggccgagctccgggctccgccctacgacaccgcccctccctaggccccggccctcatcaggactccgcccagacgtgcgtcatcttcccgcgccggtgacggaagtgcggtgttgagcgccggcggctcgcgcccacgctgggccgggagtcgaaatgcttcccggtgccgggagtgagcgatgagctggcttctgttcctggcccacagagtcgccttggccgccttgccctgccgccgcggctctcgcgggttcgggatgttctatgccgtgaggaggggccgcaagaccggggtctttctgacctggaatgagtgcagagcacaggtggaccggtttcctgctgccagatttaagaagtttgccacagaggatgaggcctgggcctttgtcaggaaatctgcaagcccggaagtttcagaagggcatgaaaatcaacatggacaagaatcggaggcgaaagccagcaagcgactccgtgagccactggatggagatggacatgaaagcgcagagccgtatgcaaagcacatgaagccgagcgtggagccggcgcctccagttagcagagacacgttttcctacatgggagacttcgtcgtcgtctacactgatggctgctgctccagtaatgggcgtagaaggccgcgagcaggaatcggcgtttactgggggccaggccatcctttaaatgtaggcattagacttcctgggcggcagacaaaccaaagagcggaaattcatgcagcctgcaaagccattgaacaagcaaagactcaaaacatcaataaactggttctgtatacagacagtatgtttacgataaatggtataactaactgggttcaaggttggaagaaaaatgggtggaagacaagtgcagggaaagaggtgatcaacaaagaggactttgtggcactggagaggcttacccaggggatggacattcagtggatgcatgttcctggtcattcgggatttataggcaatgaagaagctgacagattagccagagaaggagctaaacaatcggaagactgagccatgtgactttagtccttgggagaacttgagccagcggctgtcttgctgcctgtacttactggtgtggaaaatagcctgcaggtaggaccattgcagtgatgggcagatgcgtctttcacacggaatcaggcacagtggccttctgtgacatgtgtttataaaaaatggttaagtatataataaattgaacatctttgagattggagaattatgtgagatttccacattatgtttactgggttcaatactgtccttgcttgttttattgcaggcaagcaaggcaaatggcctaaaatgctgtggcttatattttgataagaaatcaaaaaaccattggttaaaagatgcaactcagaagtctggaagtattctgaaagcatccatttaccgtccagttgacaggtttgagtctcctgcttgtataggtgacttgtgcccatgggtacattaaaggaacatgctgcccagggcctgggcggacagctcagtgggcaggatgtgtgctgggtctcagccccatgtgcctgcttgctgggcagttagtatagggcaaagcctgcctgcggcgaccctggctgctaggccattctctaggaacagctgcgactcataaagaccaagaagcataaataaactttcaaaaatttatttggctctttcgttaaaa

SEQ ID NO: 26410 - DNA, 1142 bp, Homo sapiens
  source 1..1142: mol_type = unassigned DNA
gcgccgagacccgctcctgcagtattagttcttgcagctggtggtggcggctgaggcggcatggatctcagcgagctggagagagacaatacaggccgctgtcgcctgagttcgcctgtgcccgcggtgtgccgcaaggagccttgcgtcctgggcgtcgatgaggcgggcaggggccccgtgctgggccccatggtctacgccatctgttattgtcccctgcctcgcctggcagatctggaggcgctgaaagtggcagactcaaagaccctattggagagcgagcgggaaaggctgtttgcgaaaatggaggacacggactttgtcggctgggcgctggatgtgctgtctccaaacctcatctctaccagcatgcttgggcgggtcaaatacaacctgaactccctgtcacatgatacagccactgggcttatacagtatgcattggaccagggcgtgaacgtcacccaggtattcgtggacaccgtagggatgccagagacataccaggcgcggctgcagcaaagttttcccgggattgaggtgacggtcaaggccaaagcagatgccctctacccggtggttagtgctgccagcatctgtgccaaggtggcccgggaccaggccgtgaagaaatggcagttcgtggagaaactgcaggacttggatactgattatggctcaggctaccccaatgatcccaagacaaaagcgtggttgaaggagcacgtggagcctgtgttcggcttcccccagtttgtccggttcagctggcgcacggcccagaccatcctggagaaagaggcggaagatgttatatgggaggactcagcatccgagaatcaggagggactcaggaagatcacatcctacttcctcaatgaagggtcccaagcccgtccccgttcttcccaccgatatttcctggaacgcggcctggagtcagcaaccagcctctagcagctgcctctacgcgctctacctgcttccccaacccagacattaaaattgtttaaggagaaccacacgtaggggatgtacttttgggacagaagcaaggtgggagtgtgctctgcagccgggtccagctacttccttttggaaccttaaatagaatgggtgttggttgattaattttattt

SEQ ID NO: 26411 - DNA, 1594 bp, Homo sapiens
  source 1..1594: mol_type = unassigned DNA
ccgctggctagaccatggagggccgctgggtgcagccacagagcgcggggccccggcgaccccgccccgctccgcgtcactcggcgccctgcggcgcgcgatgagcacctaccactagcggagccgcgagggagaggccgcggccccttcccgttgcctgcggccaccggccggcattcagagcccctcgcctggcgctaaatttaaaaacgtaacacgagcagcaggctggtctcggaaacgaaacgaaattcggtccctgggcctcctcccgggcgctgccggtccctcagcgcgccgcgccacccggaacagacccttctcccgccattttcggcggggctgggagactgaggcccgcggcgctgagcctgcggcgccccggaagaggcgggcggcatggccgctggcgtggactgcggggacggggttggcgcccggcagcacgtgttcctggtttcagaatatttaaaagatgcttcaaagaagatgaaaaatgggctaatgtttgtaaaactggttaacccctgttcaggagaaggagccatttacttgttcaatatgtgtctacagcagctgtttgaagtaaaagttttcaaggaaaaacaccattcttggtttataaatcaatcagttcaatcaggaggtcttctccattttgccacacctgtggatcctctatttctgcttctccactacctcataaaggctgataaggaggggaagtttcagccccttgatcaagttgtggtggataacgtgtttccaaattgcatcttgttgctgaaacttcctggacttgagaagttacttcatcatgtgacagaggaaaaaggtaatccagaaatagacaacaagaaatattacaagtacagcaaagagaagacattaaagtggctggaaaaaaaggttaatcaaactgtggcagcattaaaaaccaataatgtgaatgtcagttcccgggtacagtcaactgcatttttctctggtgaccaagcttccactgacaaggaagaggattatattcgttatgcccatggtctgatatctgactacatccctaaagaattaagtgatgacttatctaaatacttaaagcttccagaaccttcagcctcattgccaaatcctccatcaaagaaaataaagttatcagatgagcctgtagaagcaaaagaagattacactaagtttaatactaaagatttgaagactgaaaagaaaaatagcaaaatgactgcagctcagaaggctttggctaaagttgacaagagtggaatgaaaagtattgataccttttttggggtaaaaaataaaaaaaaaattggaaaggtttgaaactttgaaaataaaatctagcaaaaatatttgctttttacatgtttcagtttgtccttcctgactgttaatgactacctttggttgggggaaggaagaggccaatttcatgttctcttaaacatttctttgcatttggtttttgtgttcctgaacaaaatatgggaaagtgtctaacttcatggctatggccttttggagtctcatctgacataatgaaaagtaatcacttgaagagaattaacatatagcatca

SEQ ID NO: 26412 - DNA, 1587 bp, Homo sapiens
  source 1..1587: mol_type = unassigned DNA
actcggcgccctgcggcgcgcgatgagcacctaccactagcggagccgcgagggagaggccgcggccccttcccgttgcctgcggccaccggccggcattcagagcccctcgcctggcgctaaatttaaaaacgtaacacgagcagcaggctggtctcggaaacgaaacgaaattcggtccctgggcctcctcccgggcgctgccggtccctcagcgcgccgcgccacccggaacagacccttctcccgccattttcggcggggctgggagactgaggcccgcggcgctgagcctgcggcgccccggaagaggcgggcggcatggccgctggcgtggactgcggggacggggttggcgcccggcagcacgtgttcctggtttcagaatatttaaaagatgcttcaaagaagatgaaaaatgggctaatgtttgtaaaactggttaacccctgttcaggagaaggagccatttacttgttcaatatgtgtctacagcagctgtttgaagtaaaagttttcaaggaaaaacaccattcttggtttataaatcaatcagttcaatcaggaggtcttctccattttgccacacctgtggatcctctatttctgcttctccactacctcataaaggctgataaggaggggaagtttcagccccttgatcaagttgtggtggataacgtgtttccaaattgcatcttgttgctgaaacttcctggacttgagaagttacttcatcatgtgacagaggaaaaaggtaatccagaaatagacaacaagaaatattacaagtacagcaaagagaagacattaaagtggctggaaaaaaaggttaatcaaactgtggcagcattaaaaaccaataatgtgaatgtcagttcccgggtacagtcaactgcatttttctctggtgaccaagcttccactgacaaggaagaggattatattcgttatgcccatggtctgatatctgactacatccctaaagaattaagtgatgacttatctaaatacttaaagcttccagaaccttcagcctcattgccaaatcctccatcaaagatggcagcacaaagacagaaaaggggcaagtgatggtggtggctccacgcaaggcttggcggttttccctgcaacttcagacactcccagaggactcggactttttcttctgcacttttttggaaaatcgccaggtgccaaaaggtgcattttaaagcgctgactgtaaatgctttatttctttgattagtaccactagtctatgtgggcagcggcattcctccctggagcactcagctaggcggttccgtccaggagcttgaaagcatcccagcggtgcacctgttcagtctgaggacctcaagcttgggtcaggccagcatgttttaggtatggatgtggtgacttaaagtacttgattgtcttgatttcaccctgaaagctttggcaaaccaagtttcaacccttactttaaaaatctgacactgctttactccatatcaatttggaagcttctaattcataaatatacctaaacgttggcattttatctctccaggagttattaaacatttcttccttttt

SEQ ID NO: 26413 - DNA, 1587 bp, Homo sapiens
  source 1..1587: mol_type = unassigned DNA
ccgctggctagaccatggagggccgctgggtgcagccacagagcgcggggccccggcgaccccgccccgctccgcgtcactcggcgccctgcggcgcgcgatgagcacctaccactagcggagccgcgagggagaggccgcggccccttcccgttgcctgcggccaccggccggcattcagagcccctcgcctggcgctaaatttaaaaacgtaacacgagcagcaggctggtctcggaaacgaaacgaaattcggtccctgggcctcctcccgggcgctgccggtccctcagcgcgccgcgccacccggaacagacccttctcccgccattttcggcggggctgggagactgaggcccgcggcgctgagcctgcggcgccccggaagaggcgggcggcatggccgctggcgtggactgcggggacggggttggcgcccggcagcacgtgttcctggtttcagaatatttaaaagatgcttcaaagaagatgaaaaatgggctaatgtttgtaaaactggttaacccctgttcaggagaaggagccatttacttgttcaatatgtgtctacagcagctgtttgaagtaaaagttttcaaggaaaaacaccattcttggtttataaatcaatcagttcaatcaggaggtcttctccattttgccacacctgtggatcctctatttctgcttctccactacctcataaaggctgataaggaggggaagtttcagccccttgatcaagttgtggtggataacgtgtttccaaattgcatcttgttgctgaaacttcctggacttgagaagttacttcatcatgtgacagaggaaaaaggtaatccagaaatagacaacaagaaatattacaagtacagcaaagagaagacattaaagtggctggaaaaaaaggttaatcaaactgtggcagcattaaaaaccaataatgtgaatgtcagttcccgggtacagtcaactgcatttttctctggtgaccaagcttccactgacaaggaagaggattatattcgttatgcccatggtctgatatctgactacatccctaaagaattaagtgatgacttatctaaatacttaaagcttccagaaccttcagcctcattgccaaatcctccatcaaagaaaataaagttatcagatgagcctgtagaagcaaaagaagattacactaagtttaatactaaagatttgaagactgaaaagaaaaatagcaaaatgactgcagctcagaaggctttggctaaagttgacaagagtggaatgaaaagtattgataccttttttggggtaaaaaaaaaattggaaaggtttgaaactttgaaaataaaatctagcaaaaatatttgctttttacatgtttcagtttgtccttcctgactgttaatgactacctttggttgggggaaggaagaggccaatttcatgttctcttaaacatttctttgcatttggtttttgtgttcctgaacaaaatatgggaaagtgtctaacttcatggctatggccttttggagtctcatctgacataatgaaaagtaatcacttgaagagaattaacatatagcatca

SEQ ID NO: 26414 - DNA, 2794 bp, Homo sapiens
  source 1..2794: mol_type = unassigned DNA
aaaacacaactggaaaaccctaggacttgaacccagggaaagcgttagggggtaaggggactacacttcccgtgaagctccgcggcggcttcccgtgaggccccgcggaggcttcctgagaggtcctgcgcgctttccgcgccagcttcagtgtcagctcgcgagccctggcgtcgcgtaggagggaggatggagagcggcgacgaagcggccatcgagaggcaccgcgtccacttgcgctccgccacattgcgcgacgccgtacccgccacactgcatctgctgccctgcgaggttgcggtggacgggcccgccccggtggggcgcttcttcacgcccgccatccgccagggccccgagggactcgaagtgtcgtttcggggccgctgtctacggggagaggaggtggcggtgccgcctggcctcgtgggatacgtgatggtgacagaagagaagaaggtgtcgatggggaagccagaccccttgcgggattccgggactgacgaccaagaggaggagccgctggagcgggacttcgaccgcttcattggagccactgccaacttcagccgcttcaccctgtggggtctggagaccatccctggcccggatgccaaagtgcgtggggccttaacttggcccagccttgcggcagcgattcacgcacaggtgcccgaggactgagaaccagagcttgaaattcaaagctgcgatcccttcacagcagtaaaccagctctttggaaccgattccatcaccccaataaaggagctcttcacagcacctgtgagtctgggcgccttagagcccctaagccagcatgggccctttccccctccccaccaagaactttgcatggctctggcatatagaaacaatttattgccgggggcaataggggtaagagaagccagaaatttttgcagccagcacccaccccacccccaacttctactttacaaaagaaatttttacaatcaccagccctctgtacagagctcccccatccggatcccttctcactgtacacagctgcctggctccctctggtccctgcttcagaggaggcctgggcctgtggccagctgaccttggagttggtctgagcccggagctcgccttggtgctgggcaccagtgggcccctgccaggcctgtcctctcctttttgagctgtcctcagccccatctcccttagagtgctttgtgggagctgcagtgggggcggggtgggctatcagccccagtcctgctgccgtcttggcactgcagtgggcagtgtctggtcaccacttccccctcttgctccagtccttgggagtgaagtgcagacacttggagtcgatccgcaggagccgcttgagcatggcccgctcatggccatccacgatgtcctctgacagtgtgaggatgtactggccctgggcagaggagatgggttcagcaggtggtcagcccacagaggactgcactctgcatcccacacacctgtctcccctgcctgcctccctaccttgtagtagttgatgagattgaggtactgcagagtggagatgacatcctccttcttgatgctggtgatttcactaatctcactgtgggagagcacaggtcaggttccctgaggacctttatctgtccccaggagccctgagagagaaagcccaggaacagacaagccatgccatgtacccccaggtagacagcgccaggctcacttgatggtgatctgtggcctctccccgctctccgacttcagccccatcaggatctccaggatggtctgggaccagtagcttcgataggataggaggccaaggtctgagaggggcttctcaggggtccctgttttcccttccactttggagagttcatagcctaaagcaatggagcaggagagggtgagtaagaggtcacagatgaacataagcaacatttaaaaacacaggttgccaaggcaggctgcctagttcctatcatggccctgccacttggcagttctatgccctccacttctctgtgcctcagttccctcaggaagaactgagtattcactctttccgtgcgctgagcacagtggagggcatgagggcactgagaggagcagctgcagtcaaccatgagggtgatcagaggccagtgaaggcttatgggcaggggatgcagagaaaatggctcatgggaagaaggggcctccaattttcctttgccatcccgggctctgtgtctagccatgtaaggaagtggagacagattcctgtctctaatccagacctgagaatgcttgaattctcaaagtcctcctagctgggaccttgggagtgtcacctgctgtaagacttgagtggcctgactgggtggttgtgaggatgcaaggagaaaaggtgcaccaaggtgcttcctaagtcggggagaccattcctgggagccacgtgactgacccccaccatggctctttccctccaactcgtgctgatagctggccgctgggaggccgtccccagtgagatcctcagaccctgcacagccctgagtggcttcacatctcttggtcagtgtcttcattctccccagtcagggacctgggatgtttgttacttctagaagcccttcctcaccctcataatggaccttagccccttgctggtcccactcacatcccgtctccattgctgtctgagttccaagactgagtttcttcaagcatccacttgtgctaccaggctgagaagttctgaggatgtgaccccatctgggcatcatttaaccaataaaatttctcgaatggaccataa

SEQ ID NO: 26415 - DNA, 4238 bp, Homo sapiens
  source 1..4238: mol_type = unassigned DNA
gacgcagcaggaggaaactgctcgggctgcaagcagtcttccaggctttgcggctgccaaaggaataattgagacgtctgagttgagcaggtggaatgtcagaagactgagaacattgttccttcttcatactgctgctctgttgccagagaatcccaatttacactcaaagcttctttgattaagtgctaggagataaatttgcattttctcaaggaaaaggctaaaagtggtagcaggtggcatttaccgtcatggagagcagggatcataacaacccccaggagggacccacgtcctccagcggtagaagggctgcagtggaagacaatcacttgctgattaaagctgttcaaaacgaagatgttgacctggtccagcaattgctggaaggtggagccaatgttaatttccaggaagaggaagggggctggacacctctgcataacgcagtacaaatgagcagggaggacattgtggaacttctgcttcgtcatggtgctgaccctgttctgaggaagaagaatggggccacgccttttatcctcgcagcgattgcggggagcgtgaagctgctgaaacttttcctttctaaaggagcagatgtcaatgagtgtgatttttatggcttcacagccttcatggaagccgctgtgtatggtaaggtcaaagccctaaaattcctttataagagaggagcaaatgtgaatttgaggcgaaagacaaaggaggatcaagagcggctgaggaaaggaggggccacagctctcatggacgctgctgaaaaaggacacgtagaggtcttgaagattctccttgatgagatgggggcagatgtaaacgcctgtgacaatatgggcagaaatgccttgatccatgctctcctgagctctgacgatagtgatgtggaggctattacgcatctgctgctggaccatggggctgatgtcaatgtgaggggagaaagagggaagactcccctgatcctggcagtggagaagaagcacttgggtttggtgcagaggcttctggagcaagagcacatagagattaatgacacagacagtgatggcaaaacagcactgctgcttgctgttgaactcaaactgaagaaaatcgccgagttgctgtgcaaacgtggagccagtacagattgtggggatcttgttatgacagcgaggcggaattatgaccattcccttgtgaaggttcttctctctcatggagccaaagaagattttcaccctcctgctgaagactggaagcctcagagctcacactggggggcagccctgaaggatctccacagaatataccgccctatgattggcaaactcaagttctttattgatgaaaaatacaaaattgctgatacttcagaaggaggcatctacctggggttctatgagaagcaagaagtagctgtgaagacgttctgtgagggcagcccacgtgcacagcgggaagtctcttgtctgcaaagcagccgagagaacagtcacttggtgacattctatgggagtgagagccacaggggccacttgtttgtgtgtgtcaccctctgtgagcagactctggaagcgtgtttggatgtgcacagaggggaagatgtggaaaatgaggaagatgaatttgcccgaaatgtcctgtcatctatatttaaggctgttcaagaactacacttgtcctgtggatacacccaccaggatctgcaaccacaaaacatcttaatagattctaagaaagctgctcacctggcagattttgataagagcatcaagtgggctggagatccacaggaagtcaagagagatctagaggaccttggacggctggtcctctatgtggtaaagaagggaagcatctcatttgaggatctgaaagctcaaagtaatgaagaggtggttcaactttctccagatgaggaaactaaggacctcattcatcgtctcttccatcctggggaacatgtgagggactgtctgagtgacctgctgggtcatcccttcttttggacttgggagagccgctataggacgcttcggaatgtgggaaatgaatccgacatcaaaacacgaaaatctgaaagtgagatcctcagactactgcaacctgggccttctgaacattccaaaagttttgacaagtggacgactaagattaatgaatgtgttatgaaaaaaatgaataagttttatgaaaaaagaggcaatttctaccagaacactgtgggtgatctgctaaagttcatccggaatttgggagaacacattgatgaagaaaagcataaaaagatgaaattaaaaattggagacccttccctgtattttcagaagacatttccagatctggtgatctatgtctacacaaaactacagaacacagaatatagaaagcatttcccccaaacccacagtccaaacaagcctcagtgtgatggagctggtggggccagtgggttggccagccctgggtgctgatggactgatttgctggagttcagggaactacttattagctgtagagtccttggcaaatcacaacattctgggccttttaactcaccaggttgcttgtgagggatgagttgcatagctgatatgtcagtccctggcatcgtgtattccatatgtctataacaaaagcaatatatacccagactacactagtccataagctttacccactaactgggaggacattctgctaagattccttttgtcaattgcaccaaaagaatgagtgccttgacccctaatgctgcatatgttacaattctctcacttaattttcccaatgatcttgcaaaacagggattatcatccccatttaagaactgaggaacctgagactcagagagtgtgagctactggcccaagattattcaatttatacctagcactttataaatttatgtggtgttattggtacctctcatttgggcaccttaaaacttaactatccttccagggctcttccagatgaggcccaaaacatatataggggttccaggaatctcattcattcattcagtatttattgagcatctagtataagtctgggcactggatgcatgaattccactccttccagaaccaactgcattggttttccatgaccttaaggcagtagttctcaactggggggcaattttgcactgaagagagcatttggcagagtctgaagaagtttttggtgtcacagctttgtggggagcatgctatggcatttagtgggtaaagaccagggatgctgccaaacctgccttgcacaggacagcccctgcaacaaagaattatccagacaaaaatatcaatggtgctgaggttgagaaaacctgacttaaggggctgggatgcttttgaactagcttaaggcccaggactgtggagtgtgtggaccaccccacagaggagggactcagatttatttactcttgctggatctgtagtgatggagttccttctggtgtcagccccacaggaggctcccaggcctccctcacttcccatacccagtctaggagctccttctggctcccaagcacccagagctttcctccgccttttagttttggttcctccactggaatgtaggctcctcacgggcgatggctgtcttttcttgactttgtatcttcactgccaagcaaaaagtctgccaagtgggaatgtttaataaatattcattgaataatgaatgaaccatcttcgtacatgaataataatactgtcttacgtttttctggtgctttataatgtatacattacatctgagtattttattttatttaattttcaaaacaatcctttaaggtcaacattgttatccctattttgctgatgaggaaactaaggttagaaacattttgatttcctctaggacgtatagctaggaagtgttactatcttgatttgaacaaattttctggtgctaagtctgatgttctttccatgaatcattgtggtggttgagatggagctttgtaatgggaataaaacagtaccttaggttctttctgaaaaggaggtatctagcaatggataaatagataccactgaatgaaattaaatgttgattaggaacaaatttaaggcttaaaaaatactttatgagcagcaagattgctttaacttttaaaatgaagctttggttctctgatttgtaatgagcacctggacatgtcaattaaaatgcccatttgtgaagcttactcaataaaactttaaattgtctta

SEQ ID NO: 26416 - DNA, 4148 bp, Homo sapiens
  source 1..4148: mol_type = unassigned DNA
caggtggaatgtcagaagactgagaacattgttccttcttcatactgctgctctgttgccagagaatcccaatttacactcaaagcttctttgattaagtgctaggagataaatttgcattttctcaaggaaaaggctaaaagtggtagcaggtggcatttaccgtcatggagagcagggatcataacaacccccaggagggacccacgtcctccagcggtagaagggctgcagtggaagacaatcacttgctgattaaagctgttcaaaacgaagatgttgacctggtccagcaattgctggaaggtggagccaatgttaatttccaggaagaggaagggggctggacacctctgcataacgcagtacaaatgagcagggaggacattgtggaacttctgcttcgtcatggtgctgaccctgttctgaggaagaagaatggggccacgccttttatcctcgcagcgattgcggggagcgtgaagctgctgaaacttttcctttctaaaggagcagatgtcaatgagtgtgatttttatggcttcacagccttcatggaagccgctgtgtatggtaaggtcaaagccctaaaattcctttataagagaggagcaaatgtgaatttgaggcgaaagacaaaggaggatcaagagcggctgaggaaaggaggggccacagctctcatggacgctgctgaaaaaggacacgtagaggtcttgaagattctccttgatgagatgggggcagatgtaaacgcctgtgacaatatgggcagaaatgccttgatccatgctctcctgagctctgacgatagtgatgtggaggctattacgcatctgctgctggaccatggggctgatgtcaatgtgaggggagaaagagggaagactcccctgatcctggcagtggagaagaagcacttgggtttggtgcagaggcttctggagcaagagcacatagagattaatgacacagacagtgatggcaaaacagcactgctgcttgctgttgaactcaaactgaagaaaatcgccgagttgctgtgcaaacgtggagccagtacagattgtggggatcttgttatgacagcgaggcggaattatgaccattcccttgtgaaggttcttctctctcatggagccaaagaagattttcaccctcctgctgaagactggaagcctcagagctcacactggggggcagccctgaaggatctccacagaatataccgccctatgattggcaaactcaagttctttattgatgaaaaatacaaaattgctgatacttcagaaggaggcatctacctggggttctatgagaagcaagaagtagctgtgaagacgttctgtgagggcagcccacgtgcacagcgggaagtctcttgtctgcaaagcagccgagagaacagtcacttggtgacattctatgggagtgagagccacaggggccacttgtttgtgtgtgtcaccctctgtgagcagactctggaagcgtgtttggatgtgcacagaggggaagatgtggaaaatgaggaagatgaatttgcccgaaatgtcctgtcatctatatttaaggctgttcaagaactacacttgtcctgtggatacacccaccaggatctgcaaccacaaaacatcttaatagattctaagaaagctgctcacctggcagattttgataagagcatcaagtgggctggagatccacaggaagtcaagagagatctagaggaccttggacggctggtcctctatgtggtaaagaagggaagcatctcatttgaggatctgaaagctcaaagtaatgaagaggtggttcaactttctccagatgaggaaactaaggacctcattcatcgtctcttccatcctggggaacatgtgagggactgtctgagtgacctgctgggtcatcccttcttttggacttgggagagccgctataggacgcttcggaatgtgggaaatgaatccgacatcaaaacacgaaaatctgaaagtgagatcctcagactactgcaacctgggccttctgaacattccaaaagttttgacaagtggacgactaagattaatgaatgtgttatgaaaaaaatgaataagttttatgaaaaaagaggcaatttctaccagaacactgtgggtgatctgctaaagttcatccggaatttgggagaacacattgatgaagaaaagcataaaaagatgaaattaaaaattggagacccttccctgtattttcagaagacatttccagatctggtgatctatgtctacacaaaactacagaacacagaatatagaaagcatttcccccaaacccacagtccaaacaagcctcagtgtgatggagctggtggggccagtgggttggccagccctgggtgctgatggactgatttgctggagttcagggaactacttattagctgtagagtccttggcaaatcacaacattctgggccttttaactcaccaggttgcttgtgagggatgagttgcatagctgatatgtcagtccctggcatcgtgtattccatatgtctataacaaaagcaatatatacccagactacactagtccataagctttacccactaactgggaggacattctgctaagattccttttgtcaattgcaccaaaagaatgagtgccttgacccctaatgctgcatatgttacaattctctcacttaattttcccaatgatcttgcaaaacagggattatcatccccatttaagaactgaggaacctgagactcagagagtgtgagctactggcccaagattattcaatttatacctagcactttataaatttatgtggtgttattggtacctctcatttgggcaccttaaaacttaactatccttccagggctcttccagatgaggcccaaaacatatataggggttccaggaatctcattcattcattcagtatttattgagcatctagtataagtctgggcactggatgcatgaattccactccttccagaaccaactgcattggttttccatgaccttaaggcagtagttctcaactggggggcaattttgcactgaagagagcatttggcagagtctgaagaagtttttggtgtcacagctttgtggggagcatgctatggcatttagtgggtaaagaccagggatgctgccaaacctgccttgcacaggacagcccctgcaacaaagaattatccagacaaaaatatcaatggtgctgaggttgagaaaacctgacttaaggggctgggatgcttttgaactagcttaaggcccaggactgtggagtgtgtggaccaccccacagaggagggactcagatttatttactcttgctggatctgtagtgatggagttccttctggtgtcagccccacaggaggctcccaggcctccctcacttcccatacccagtctaggagctccttctggctcccaagcacccagagctttcctccgccttttagttttggttcctccactggaatgtaggctcctcacgggcgatggctgtcttttcttgactttgtatcttcactgccaagcaaaaagtctgccaagtgggaatgtttaataaatattcattgaataatgaatgaaccatcttcgtacatgaataataatactgtcttacgtttttctggtgctttataatgtatacattacatctgagtattttattttatttaattttcaaaacaatcctttaaggtcaacattgttatccctattttgctgatgaggaaactaaggttagaaacattttgatttcctctaggacgtatagctaggaagtgttactatcttgatttgaacaaattttctggtgctaagtctgatgttctttccatgaatcattgtggtggttgagatggagctttgtaatgggaataaaacagtaccttaggttctttctgaaaaggaggtatctagcaatggataaatagataccactgaatgaaattaaatgttgattaggaacaaatttaaggcttaaaaaatactttatgagcagcaagattgctttaacttttaaaatgaagctttggttctctgatttgtaatgagcacctggacatgtcaattaaaatgcccatttgtgaagcttactcaataaaactttaaattgtc

SEQ ID NO: 26417 - DNA, 4046 bp, Homo sapiens
  source 1..4046: mol_type = unassigned DNA
gacgcagcaggaggaaactgctcgggctgcaagcagtcttccaggctttgcggctgccaaaggaataattgagacgtctgagttgagcaggtggaatgtcagaagactgagaacattgttccttcttcatactgctgctctgttgccagagaatcccaatttacactcaaagcttctttgattaagtgctaggagataaatttgcattttctcaaggaaaaggctaaaagtggtagcaggtggcatttaccgtcatggagagcagggatcataacaacccccaggagggacccacgtcctccagcggtagaagggctgcagtggaagacaatcacttgctgattaaagctgttcaaaacgaagatgttgacctggtccagcaattgctggaaggtggagccaatgttaatttccaggaagaggaagggggctggacacctctgcataacgcagtacaaatgagcagggaggacattgtggaacttctgcttcgtcatggtgctgaccctgttctgaggaagaagaatggggccacgccttttatcctcgcagcgattgcggggagcgtgaagctgctgaaacttttcctttctaaaggagcagatgtcaatgagtgtgatttttatggcttcacagccttcatggaagccgctgtgtatggtaaggtcaaagccctaaaattcctttataagagaggagcaaatgtgaatttgaggcgaaagacaaaggaggatcaagagcggctgaggaaaggaggggccacagctctcatggacgctgctgaaaaaggacacgtagaggtcttgaagattctccttgatgagatgggggcagatgtaaacgcctgtgacaatatgggcagaaatgccttgatccatgctctcctgagctctgacgatagtgatgtggaggctattacgcatctgctgctggaccatggggctgatgtcaatgtgaggggagaaagagggaagactcccctgatcctggcagtggagaagaagcacttgggtttggtgcagaggcttctggagcaagagcacatagagattaatgacacagacagtgatggcaaaacagcactgctgcttgctgttgaactcaaactgaagaaaatcgccgagttgctgtgcaaacgtggagccagtacagattgtggggatcttgttatgacagcgaggcggaattatgaccattcccttgtgaaggttcttctctctcatggagccaaagaagattttcaccctcctgctgaagactggaagcctcagagctcacactggggggcagccctgaaggatctccacagaatataccgccctatgattggcaaactcaagttctttattgatgaaaaatacaaaattgctgatacttcagaaggaggcatctacctggggttctatgagaagcaagaagtagctgtgaagacgttctgtgagggcagcccacgtgcacagcgggaagtctcttgtctgcaaagcagccgagagaacagtcacttggtgacattctatgggagtgagagccacaggggccacttgtttgtgtgtgtcaccctctgtgagcagactctggaagcgtgtttggatgtgcacagaggggaagatgtggaaaatgaggaagatgaatttgcccgaaatgtcctgtcatctatatttaaggctgttcaagaactacacttgtcctgtggatacacccaccaggatctgcaaccacaaaacatcttaatagattctaagaaagctgctcacctggcagattttgataagagcatcaagtgggctggagatccacaggaagtcaagagagatctagaggaccttggacggctggtcctctatgtggtaaagaagggaagcatctcatttgaggatctgaaagctcaaagtaatgaagaggtggttcaactttctccagatgaggaaactaaggacctcattcatcgtctcttccatcctggggaacatgtgagggactgtctgagtgacctgctgggtcatcccttcttttggacttgggagagccgctataggacgcttcggaatgtgggaaatgaatccgacatcaaaacacgaaaatctgaaagtgagatcctcagactactgcaacctgggccttctgaacattccaaaagttttgacaagtggacgactaagatgagcaagctgaggcacagacaaataatttttccaactacacagaaccagtaaggggtgcaccaggatttgaagctgggaaggatggctgcagaggccatgtgcttaagccacaccactacatgaagctgtgatggcatcaagtctaccaactcatttactcactgaggaaattgaggctcagagaccacactcaaattactcatgctggacagtcagagattggcagacctggaaagaggaacttgttcttttatttcccaatttattggttcttttccctaaattccatgggcttatattgaattttgatagtcttcaggttttaacttcaagttttaccttttaattcccattttacactttgtttttctgttgacttgcccattttcatggtcacacaattaattttgtcagcataggtctggagcccaagttttccagcttgtatgactgtattggttcttgacttgccccatcctgccacacatacgtgcttggcgtttctcacgggtgttctgcacagagtgcacctggccagtctcagcagcatcctcactagcattgctctttcatcagttactcttcctaagtgacccactggattcttgactgttgcatcttgatctcgtagcccaaactctttctaaatatgagagccatctatggctctgtatctatgagggtgacaagcacagacaaagaggatgacattactgtgatatgaaaggagttgccctgggacacctgcaggcaaggagaagcaagtaaccttgtttaaaatataaattttagagggtactagtatagttttgttacatggatatattgtgtagtggtaaagttgggcttttagtgtaaccattacctgaataacgcacattgtacccattaagtaatttctcatccctctccctccaaccctcccacctttccaagtctccaattatattattccactctgtacatccatgtgtacacattattgagctcccacttataagagagaacatgtgatatttgactttctgtttgtaagtcatttcacttaaaataatggcctccagttccgtccatgtggccacaaaagacatgatttcattcttcttttttatggctgaaatggcccagacacattttctttatccaatcatctgttgatggacacttaggtggattccatatctttgctattgtgaatagtgctgtagtaaacatatgagtgccggtatctttttgatataagatttcttgggctgagtgcagtggctcacacctgtaatcccagcactttgggaggccgagatgggtggatcatttgaggtcaggagtttaagaccagcctggccaacatggcaaaaccctgtctctactaaaaatacaaaacttagccaagcattgtggcacacgtctgtaatcccagctacttgggcggctgaggcatgagaattgcttcagcctgtgaagcagaggttacagctttattttggcagatactcagtacattcttttctctgcatcctcatcaacatctgttactttttgactttttaatagtagcccctagtataagatgatatctcattggttttaatttgcatttctctgatgattagtgatgttaagcattttttcatatgctttttggcaatttgtacgtcttcttttgagaaatgtctattcttgtcatttgcccactttttaatggtgttattattttttattgttaagttgtttgagttccttgtaaattctggatatcaatcctctgttggatgcatagtttgcaaatattttttttcccatgctgcaggttgtttgttcactctgtttatttcttttgctgcgcagaagtttttagtttaattaaaccccatctgtttcttt

SEQ ID NO: 26418 - DNA, 2348 bp, Homo sapiens
  source 1..2348: mol_type = unassigned DNA
tttgcggctgccaaaggaataattgagacgtctgagttgagcaggtggaatgtcagaagactgagaacattgttccttcttcatactgctgctctgttgccagagaatcccaatttacactcaaagcttctttgattaagtgctaggagataaatttgcattttctcaaggaaaaggctaaaagtggtagcaggtggcatttaccgtcatggagagcagggatcataacaacccccaggagggacccacgtcctccagcggtagaagggctgcagtggaagacaatcacttgctgattaaagctgttcaaaacgaagatgttgacctggtccagcaattgctggaaggtggagccaatgttaatttccaggaagaggaagggggctggacacctctgcataacgcagtacaaatgagcagggaggacattgtggaacttctgcttcgtcatggtgctgaccctgttctgaggaagaagaatggggccacgccttttatcctcgcagcgattgcggggagcgtgaagctgctgaaacttttcctttctaaaggagcagatgtcaatgagtgtgatttttatggcttcacagccttcatggaagccgctgtgtatggtaaggtcaaagccctaaaattcctttataagagaggagcaaatgtgaatttgaggcgaaagacaaaggaggatcaagagcggctgaggaaaggaggggccacagctctcatggacgctgctgaaaaaggacacgtagaggtcttgaagattctccttgatgagatgggggcagatgtaaacgcctgtgacaatatgggcagaaatgccttgatccatgctctcctgagctctgacgatagtgatgtggaggctattacgcatctgctgctggaccatggggctgatgtcaatgtgaggggagaaagagggaagactcccctgatcctggcagtggagaagaagcacttgggtttggtgcagaggcttctggagcaagagcacatagagattaatgacacagacagtgatggcaaaacagcactgctgcttgctgttgaactcaaactgaagaaaatcgccgagttgctgtgcaaacgtggagccagtacagattgtggggatcttgttatgacagcgaggcggaattatgaccattcccttgtgaaggttcttctctctcatggagccaaagaagattttcaccctcctgctgaagactggaagcctcagagctcacactggggggcagccctgaaggatctccacagaatataccgccctatgattggcaaactcaagttctttattgatgaaaaatacaaaattgctgatacttcagaaggaggcatctacctggggttctatgagaagcaagaagtagctgtgaagacgttctgtgagggcagcccacgtgcacagcgggaagtctcttgtctgcaaagcagccgagagaacagtcacttggtgacattctatgggagtgagagccacaggggccacttgtttgtgtgtgtcaccctctgtgagcagactctggaagcgtgtttggatgtgcacagaggggaagatgtggaaaatgaggaagatgaatttgcccgaaatgtcctgtcatctatatttaaggctgttcaagaactacacttgtcctgtggatacacccaccaggatctgcaaccacaaaacatcttaataggaccttggacggctggtcctctatgtggtaaagaagggaagcatctcatttgaggatctgaaagctcaaagtaatgaagaggtggttcaactttctccagatgaggaaactaaggacctcattcatcgtctcttccatcctggggaacatgtgagggactgtctgagtgacctgctgggtcatcccttcttttggacttgggagagccgctataggacgcttcggaatgtgggaaatgaatccgacatcaaaacacgaaaatctgaaagtgagatcctcagactactgcaacctgggccttctgaacattccaaaagttttgacaagtggacgactaagattaatgaatgtgttatgaaaaaaatgaataagttttatgaaaaaagaggcaatttctaccagaacactgtgggtgatctgctaaagttcatccggaatttgggagaacacattgatgaagaaaagcataaaaagatgaaattaaaaattggagacccttccctgtattttcagaagacatttccagatctggtgatctatgtctacacaaaactacagaacacagaatatagaaagcatttcccccaaacccacagtccaaacaagcctcagtgtgatggagctggtggggccagtgggttggccagccctgggtgctga

SEQ ID NO: 26419 - DNA, 525 bp, Homo sapiens
  source 1..525: mol_type = unassigned DNA
gagcgcggcggtgatggcggggccggtgaaggaccgcgaggccttccagaggctcaacttcctgtaccaggccgcccattgtgtccttgcccaggaccccgagaaccaggcgctggcgaggttttactgctacactgagaggaccattgcgaagcggctcgtcttgcggcgagatccctcggtgaagaggactctctgtcgaggctgctcttccctcctcgtcccgggcctcacctgcacccagcgccagagacgctgcaggggacagcgctggaccgtacagacctgcctaacatgccagcgcagccaacgcttcctcaatgatcccgggcatttactctggggagacaggcctgaggcccagctcgggagccaagcagattccaaaccactacaacccttgccaaacacagcccactccatttcagaccgccttcctgaggagaaaatgcagactcagggttccagtaaccagtgatggattcaccccatctcccaaataaagtttacttgttttacattcca

SEQ ID NO: 26420 - DNA, 579 bp, Homo sapiens
  source 1..579: mol_type = unassigned DNA
gcgaggggtggggcgctgcgggaggccctggagcgcggcggtgatggcggggccggtgaaggaccgcgaggccttccagaggctcaacttcctgtaccaggccgcccattgtgtccttgcccaggaccccgagaaccaggcgctggcgaggttttactgctacactgagaggaccattgcgaagcggctcgtcttgcggcgaccactatcctcctccgcccccagggatccctcggtgaagaggactctctgtcgaggctgctcttccctcctcgtcccgggcctcacctgcacccagcgccagagacgctgcaggggacagcgctggaccgtacagacctgcctaacatgccagcgcagccaacgcttcctcaatgatcccgggcatttactctggggagacaggcctgaggcccagctcgggagccaagcagattccaaaccactacaacccttgccaaacacagcccactccatttcagaccgccttcctgaggagaaaatgcagacgaagggttccagtaaccagtgatggattcacctcatctcccaaataaagtttacttgttttacattcca

SEQ ID NO: 26421 - DNA, 594 bp, Homo sapiens
  source 1..594: mol_type = unassigned DNA
gagcgcggcggtgatggcggggccggtgaaggaccgcgaggccttccagaggctcaacttcctgtaccaggtgagtctgcgacaagggccccacggggacggtgctcggcgtcccagagtgactgctcccctcccgcaggccgcccattgtgtccttgcccaggaccccgagaaccaggcgctggcgaggttttactgctacactgagaggaccattgcgaagcggctcgtcttgcggcgggatccctcggtgaagaggactctctgtcgaggctgctcttccctcctcgtcccgggcctcacctgcacccagcgccagagacgctgcaggggacagcgctggaccgtacagacctgcctaacatgccagcgcagccaacgcttcctcaatgatcccgggcatttactctggggagacaggcctgaggcccagctcgggagccaagcagattccaaaccactacaacccttgccaaacacagcccactccatttcagaccgccttcctgaggagaaaatgcagactcagggttccagtaaccagtgatggattcaccccatctcccaaataaagtttacttgttttacattcca

SEQ ID NO: 26422 - DNA, 577 bp, Homo sapiens
  source 1..577: mol_type = unassigned DNA
gcgaggggtggggctgcgggaggccctggagcgcggcggtgatggcggggccggtgaaggaccgcgaggccttccagaggctcaacttcctgtaccaggccgcccattgtgtccttgcccaggaccccgagaaccaggcgctggcgaggttttactgctacactgagaggaccattgcgaagcggctcgtcttgcggcgaccactatcctcctccgcccccagggatccctcggtgaagaggactctctgtcgaggctgctcttccctcctcgtcccgggcctcacctgcacccaccgccagagacgctgcaggggacagcgctggaccgtacagacctgcctaacatgccagcgcagccaacgcttcctcaatgatcccgggcatttactctggggagacaggcctgaggcccagctcgggagccaagcagattccaaaccactacaacccttgccaaacacagcccactccatttcagaccgccttcctgaggagaaaatgcagactcagggttccagtaaccagtgatggattcaccccatctcccaaataaagtttacttgttttacattcca

SEQ ID NO: 26423 - DNA, 594 bp, Homo sapiens
  source 1..594: mol_type = unassigned DNA
gagcgcggcggtgatggcggggccggtgaaggaccgcgaggccttccagaggctcaacttcctgtaccaggtgagtctgcgacaagggccccacggggacggtgctcggcgtcccagagtgactgctcccctcccgcaggccgcccattgtgtccttgcccaggaccccgagaaccaggcgctggcgaggttttactgctacactgagaggaccattgcgaagcggctcgtcttgcggcgggatccctcggtgaagaggactctctgtcgaggctgctcttccctcctcgtcccgggcctcacctgcacccagcgccagagacgctgcaggggacagcgctggaccgtacagacctgcctaacatgccagcgcagccaacgcttcctcaatgatcccgggcatttactctggggagacaggcctgaggcccagctcgggagccaagcagattccaaaccactacaacccttgccaaacacagcccactccatttcagaccgccttcctgaggagaaaatgcagacgaagggttccagtaaccagtgatggattcacctcatctcccaaataaagtttacttgttttacattcca

SEQ ID NO: 26424 - DNA, 525 bp, Homo sapiens
  source 1..525: mol_type = unassigned DNA
gagcgcggcggtgatggcggggccggtgaaggaccgcgaggccttccagaggctcaacttcctgtaccaggccgcccattgtgtccttgcccaggaccccgagaaccaggcgctggcgaggttttactgctacactgagaggaccattgcgaagcggctcgtcttgcggcgggatccctcggtgaagaggactctctgtcgaggctgctcttccctcctcgtcccgggcctcacctgcacccaccgccagagacgctgcaggggacagcgctggaccgtacagacctgcctaacatgccagcgcagccaacgcttcctcaatgatcccgggcatttactctggggagacaggcctgaggcccagctcgggagccaagcagattccaaaccactacaacccttgccaaacacagcccactccatttcagaccgccttcctgaggagaaaatgcagactcagggttccagtaaccagtgatggattcaccccatctcccaaataaagtttacttgttttacattcca

SEQ ID NO: 26425 - DNA, 522 bp, Homo sapiens
  source 1..522: mol_type = unassigned DNA
gtgatggcggggccggtgaaggaccgcgaggccttccagaggctcaacttcctgtaccaggccgcccattgtgtccttgcccaggaccccgagaaccaggcgctggcgaggttttactgctacactgagaggaccattgcgaagcggctcgtcttgcggcgagatccctcggtgaagaggactctctgtcgaggctgctcttccctcctcgtcccgggcctcacctgcacccagcgccagagacgctgcaggggacagcgctggaccgtacagacctgcctaacatgccagcgcagccaacgcttcctcaatgatcccgggcatttactctggggagacaggcctgaggcccagctcgggagccaagcaggtgagagattccaaaccactacaacccttgccaaacacagcccactccatttcagaccgccttcctgaggagaaaatgcagactcagggttccagtaaccagtgatggattcaccccatctcccaaataaagtttacttgttttacattcca

SEQ ID NO: 26426 - DNA, 525 bp, Homo sapiens; identical to SEQ ID NO: 26424
  source 1..525: mol_type = unassigned DNA

SEQ ID NO: 26427 - DNA, 525 bp, Homo sapiens
  source 1..525: mol_type = unassigned DNA
gagcgcggcggtgatggcggggccggtgaaggaccgcgaggccttccagaggctcaacttcctgtaccaggccgcccattgtgtccttgcccaggaccccgagaaccaggcgctggcgaggttttactgctacactgagaggaccattgcgaagcggctcgtcttgcggcgggatccctcggtgaagaggactctctgtcgaggctgctcttccctcctcgtcccgggcctcacctgcacccagcgccagagacgctgcaggggacagcgctggaccgtacagacctgcctaacatgccagcgcagccaacgcttcctcaatgatcccgggcatttactctggggagacaggcctgaggcccagctcgggagccaagcagattccaaaccactacaacccttgccaaacacagcccactccatttcagaccgccttcctgaggagaaaatgcagacgaagggttccagtaaccagtgatggattcacctcatctcccaaataaagtttacttgttttacattcca

SEQ ID NO: 26428 - DNA, 594 bp, Homo sapiens
  source 1..594: mol_type = unassigned DNA
gagcgcggcggtgatggcggggccggtgaaggaccgcgaggccttccagaggctcaacttcctgtaccaggtgagtctgcgacaagggccccacggggacggtgctcggcgtcccagagtgactgctcccctcccgcaggccgcccattgtgtccttgcccaggaccccgagaaccaggcgctggcgaggttttactgctacactgagaggaccattgcgaagcggctcgtcttgcggcgggatccctcggtgaagaggactctctgtcgaggctgctcttccctcctcgtcccgggcctcacctgcacccaccgccagagacgctgcaggggacagcgctggaccgtacagacctgcctaacatgccagcgcagccaacgcttcctcaatgatcccgggcatttactctggggagacaggcctgaggcccagctcgggagccaagcagattccaaaccactacaacccttgccaaacacagcccactccatttcagaccgccttcctgaggagaaaatgcagactcagggttccagtaaccagtgatggattcaccccatctcccaaataaagtttacttgttttacattcca

SEQ ID NO: 26429 - DNA, 522 bp, Homo sapiens
  source 1..522: mol_type = unassigned DNA
gtgatggcggggccggtgaaggaccgcgaggccttccagaggctcaacttcctgtaccaggccgcccattgtgtccttgcccaggaccccgagaaccaggcgctggcgaggttttactgctacactgagaggaccattgcgaagcggctcgtcttgcggcgggatccctcggtgaagaggactctctgtcgaggctgctcttccctcctcgtcccgggcctcacctgcacccaccgccagagacgctgcaggggacagcgctggaccgtacagacctgcctaacatgccagcgcagccaacgcttcctcaatgatcccgggcatttactctggggagacaggcctgaggcccagctcgggagccaagcaggtgagagattccaaaccactacaacccttgccaaacacagcccactccatttcagaccgccttcctgaggagaaaatgcagactcagggttccagtaaccagtgatggattcaccccatctcccaaataaagtttacttgttttacattcca

SEQ ID NO: 26430 - DNA, 525 bp, Homo sapiens
  source 1..525: mol_type = unassigned DNA
gagcgcggcggtgatggcggggccggtgaaggaccgcgaggccttccagaggctcaacttcctgtaccaggccgcccattgtgtccttgcccaggaccccgagaaccaggcgctggcgaggttttactgctacactgagaggaccattgcgaagcggctcgtcttgcggcgggatccctcggtgaagaggactctctgtcgaggctgctcttccctcctcgtcccgggcctcacctgcacccagcgccagagacgctgcaggggacagcgctggaccgtacagacctgcctaacatgccagcgcagccaacgcttcctcaatgatcccgggcatttactctggggagacaggcctgaggcccagctcgggagccaagcagattccaaaccactacaacccttgccaaacacagcccactccatttcagaccgccttcctgaggagaaaatgcagactcagggttccagtaaccagtgatggattcaccccatctcccaaataaagtttacttgttttacattcca

SEQ ID NO: 26431 - DNA, 577 bp, Homo sapiens
  source 1..577: mol_type = unassigned DNA
gcgaggggtggggctgcgggaggccctggagcgcggcggtgatggcggggccggtgaaggaccgcgaggccttccagaggctcaacttcctgtaccaggccgcccattgtgtccttgcccaggaccccgagaaccaggcgctggcgaggttttactgctacactgagaggaccattgcgaagcggctcgtcttgcggcgaccactatcctcctccgcccccagagatccctcggtgaagaggactctctgtcgaggctgctcttccctcctcgtcccgggcctcacctgcacccagcgccagagacgctgcaggggacagcgctggaccgtacagacctgcctaacatgccagcgcagccaacgcttcctcaatgatcccgggcatttactctggggagacaggcctgaggcccagctcgggagccaagcagattccaaaccactacaacccttgccaaacacagcccactccatttcagaccgccttcctgaggagaaaatgcagactcagggttccagtaaccagtgatggattcaccccatctcccaaataaagtttacttgttttacattcca

SEQ ID NO: 26432 - DNA, 522 bp, Homo sapiens; identical to SEQ ID NO: 26429
  source 1..522: mol_type = unassigned DNA

SEQ ID NO: 26433 - DNA, 594 bp, Homo sapiens; identical to SEQ ID NO: 26421
  source 1..594: mol_type = unassigned DNA

SEQ ID NO: 26434 - DNA, 577 bp, Homo sapiens; identical to SEQ ID NO: 26422
  source 1..577: mol_type = unassigned DNA

SEQ ID NO: 26435 - DNA, 594 bp, Homo sapiens
  source 1..594: mol_type = unassigned DNA
gagcgcggcggtgatggcggggccggtgaaggaccgcgaggccttccagaggctcaacttcctgtaccaggtgagtctgcgacaagggccccacggggacggtgctcggcgtcccagagtgactgctcccctcccgcaggccgcccattgtgtccttgcccaggaccccgagaaccaggcgctggcgaggttttactgctacactgagaggaccattgcgaagcggctcgtcttgcggcgagatccctcggtgaagaggactctctgtcgaggctgctcttccctcctcgtcccgggcctcacctgcacccagcgccagagacgctgcaggggacagcgctggaccgtacagacctgcctaacatgccagcgcagccaacgcttcctcaatgatcccgggcatttactctggggagacaggcctgaggcccagctcgggagccaagcagattccaaaccactacaacccttgccaaacacagcccactccatttcagaccgccttcctgaggagaaaatgcagactcagggttccagtaaccagtgatggattcaccccatctcccaaataaagtttacttgttttacattcca

SEQ ID NO: 26436 - DNA, 577 bp, Homo sapiens
  source 1..577: mol_type = unassigned DNA
gcgaggggtggggctgcgggaggccctggagcgcggcggtgatggcggggccggtgaaggaccgcgaggccttccagaggctcaacttcctgtaccaggccgcccattgtgtccttgcccaggaccccgagaaccaggcgctggcgaggttttactgctacactgagaggaccattgcgaagcggctcgtcttgcggcgaccactatcctcctccgcccccagggatccctcggtgaagaggactctctgtcgaggctgctcttccctcctcgtcccgggcctcacctgcacccagcgccagagacgctgcaggggacagcgctggaccgtacagacctgcctaacatgccagcgcagccaacgcttcctcaatgatcccgggcatttactctggggagacaggcctgaggcccagctcgggagccaagcagattccaaaccactacaacccttgccaaacacagcccactccatttcagaccgccttcctgaggagaaaatgcagactcagggttccagtaaccagtgatggattcaccccatctcccaaataaagtttacttgttttacattcca

SEQ ID NO: 26437 - DNA, 525 bp, Homo sapiens; identical to SEQ ID NO: 26424
  source 1..525: mol_type = unassigned DNA

SEQ ID NO: 26438 - DNA, 522 bp, Homo sapiens
  source 1..522: mol_type = unassigned DNA
gtgatggcggggccggtgaaggaccgcgaggccttccagaggctcaacttcctgtaccaggccgcccattgtgtccttgcccaggaccccgagaaccaggcgctggcgaggttttactgctacactgagaggaccattgcgaagcggctcgtcttgcggcgggatccctcggtgaagaggactctctgtcgaggctgctcttccctcctcgtcccgggcctcacctgcacccagcgccagagacgctgcaggggacagcgctggaccgtacagacctgcctaacatgccagcgcagccaacgcttcctcaatgatcccgggcatttactctggggagacaggcctgaggcccagctcgggagccaagcaggtgagagattccaaaccactacaacccttgccaaacacagcccactccatttcagaccgccttcctgaggagaaaatgcagacgaagggttccagtaaccagtgatggattcacctcatctcccaaataaagtttacttgttttacattcca

SEQ ID NO: 26439 - DNA, 522 bp, Homo sapiens
  source 1..522: mol_type = unassigned DNA
gtgatggcggggccggtgaaggaccgcgaggccttccagaggctcaacttcctgtaccaggccgcccattgtgtccttgcccaggaccccgagaaccaggcgctggcgaggttttactgctacactgagaggaccattgcgaagcggctcgtcttgcggcgggatccctcggtgaagaggactctctgtcgaggctgctcttccctcctcgtcccgggcctcacctgcacccagcgccagagacgctgcaggggacagcgctggaccgtacagacctgcctaacatgccagcgcagccaacgcttcctcaatgatcccgggcatttactctggggagacaggcctgaggcccagctcgggagccaagcaggtgagagattccaaaccactacaacccttgccaaacacagcccactccatttcagaccgccttcctgaggagaaaatgcagactcagggttccagtaaccagtgatggattcaccccatctcccaaataaagtttacttgttttacattcca

SEQ ID NO: 26440 - DNA, 522 bp, Homo sapiens; identical to SEQ ID NO: 26439
  source 1..522: mol_type = unassigned DNA

SEQ ID NO: 26441 - DNA, 594 bp, Homo sapiens; identical to SEQ ID NO: 26428
  source 1..594: mol_type = unassigned DNA

SEQ ID NO: 26442 - DNA, 522 bp, Homo sapiens; identical to SEQ ID NO: 26429
  source 1..522: mol_type = unassigned DNA

SEQ ID NO: 26443 - DNA, 525 bp, Homo sapiens; identical to SEQ ID NO: 26430
  source 1..525: mol_type = unassigned DNA

SEQ ID NO: 26444 - DNA, 594 bp, Homo sapiens; identical to SEQ ID NO: 26428
  source 1..594: mol_type = unassigned DNA

SEQ ID NO: 26445 - DNA, 577 bp, Homo sapiens; identical to SEQ ID NO: 26436
  source 1..577: mol_type = unassigned DNA

SEQ ID NO: 26446 - DNA, 577 bp, Homo sapiens; identical to SEQ ID NO: 26422
  source 1..577: mol_type = unassigned DNA

SEQ ID NO: 26447 - DNA, 767 bp, Homo sapiens
  source 1..767: mol_type = unassigned DNA
cagcatggcggtgtttgcagatttggacctgcgagcgggttctgacctgaaggctctgcgcggacttgtggagacagccgctcaccgtgagttgccccggcttcgcgcctggccaacctcatgccacccagaccatcgggccacactccggattggctattcagttgttgctatcaatcatatcgttgactttaaggaaaagaaacaggaaattgaaaaaccagtagctgtttctgaactcttcacaactttgccaattgtacagggaaaatcaagaccaattaaaattttaactagattaacaattattgtctcggatccatctcactgcaatgttttgagagcaacttcttcaagggcccggctctatgatgttgttgcagtttttccaaagacagaaaagctttttcatattgcttgcacacatttagatgtggatttagtctgcataactgtaacagagaaactaccattttacttcaaaagacctcctattaatgtggcgattgaccgaggcctggcttttgaacttgtctatagccctgctatcaaagactccacaatgagaaggtatacaatttccagtgccctcaatttgatgcaaatctgcaaaggaaagaatgtaattatatctagtgctgcagaaaggcctttagaaataagagggccatatgacgtggcaaatctaggcttgctgtttgggctctctgaaagtgacgccaaggctgcggtgtccaccaactgccgagcagcgcttctccatggag

SEQ ID NO: 26448 - DNA, 2589 bp, Homo sapiens
  source 1..2589: mol_type = unassigned DNA
ggagtattgaatagttgggaattggaacccctccagggggaaccaaacattgtcgttcagaagaagacaaagagagattgaaatgaagctgttgatttcaacacacaaattctggtggtagatgaaagcaaagcaagtaagtttctccgaatccctagtcaactggaggtagagacggactgcgcaggttaactacagctcccagcatgcctgaggggcgggctcagcggctgcgcagactggcgcgcgcggacggtcatgggacttcagcatggcggtgtttgcagatttggacctgcgagcgggttctgacctgaaggctctgcgcggacttgtggagacagccgctcaccttggctattcagttgttgctatcaatcatatcgttgactttaaggaaaagaaacaggaaattgaaaaaccagtagctgtttctgaactcttcacaactttgccaattgtacagggaaaatcaagaccaattaaaattttaactagattaacaattattgtctcggatccatctcactgcaatgttttgagagcaacttcttcaagggcccggctctatgatgttgttgcagtttttccaaagacagaaaagctttttcatattgcttgcacacatttagatgtggatttagtctgcataactgtaacagagaaactaccattttacttcaaaagacctcctattaatgtggcgattgaccgaggcctggcttttgaacttgtctatagccctgctatcaaagactccacaatgagaaggtatacaatttccagtgccctcaatttgatgcaaatctgcaaaggaaagaatgtaattatatctagtgctgcagaaaggcctttagaaataagagggccatatgacgtggcaaatctaggcttgctgtttgggctctctgaaagtgacgccaaggctgcggtgtccaccaactgccgagcagcgcttctccatggagaaactagaaaaactgcttttggaattatctctacagtgaagaaacctcggccatcagaaggagatgaagattgtcttccagcttccaagaaagccaagtgtgagggctgaaaagaatgccccagtctctgtcagcactcccttcttcccttttatagttcatcagccacaacaaaaataaaacctttgtgtgatttactgttttcatttggagctagaaatcaatagtctataaaaacagttttacttgcaatccattaaaacaacaaacgaaacctagtgaagcatctttttaaaaggctgccagcttaatgaatttagatgtactttaagagagaaagactggttatttctcctttgtgtaagtgataaacaacagcaaatatacttgaataaaatgtttcaggtatttttgtttcattttgtttttgagatagggtctttgttgctcaggctggagtacagtggcataatcacagctcactgcaacctcaatcctgggctcaagtgatcctcccgcttcagcctctcaagcagcgggaactacaggtgtgcactaccacacctggctattttttttttttttttttttttcccttgtagagacatggtctcactatgttgctgaggctggtctcaaactcctaggatcaagccatcctcccgctttggcctcctaaagtgctgggattacatgagccaccacatgcagccagatgtttgaatattttaagagcttctttcgaaagtttcttgttcatactcaaatagtagttattttgaagatattcaaacttatattgaagaagtgactttagttcctcttgttttaagcttctttcatgtattcaaatcagcatttttttctaagaaattgctatagaatttgtggaaggagagaggatacacatgtaaaattacatctggtctcttccttcactgcttcatgcctacgtaaggtctttgaaataggattccttacttttagttagaaacccctaaaacgctaatattgattttcctgatagctgtattaaaaatagcaaagcatcggactgaaccaactttggaaataatttatttttataatgggatcatgttaagtagaagtagctttttatgcaaatacatgcatttatgcaatattaatgtaagggctctaaaacaatggagtagagccagaggtataactgaataagaaatttttttaagcaagagaaagacaactgttctgcgggttggagaaaatacaatttttttttttttttttgagacagtctcgctctgtcccccaggctggagtgcagtggctcgatctctgctcactgcaagctccgcctcctgggttcatgccattctcctgcctcagcctcctgagtagctgggactacaggcgctcgccatgtatttagcagagacggggtttcaccgtgttagccaggatggtctcaatctcctgacctcatattccacccgcctcggcctcccaaagtgctgggattacaggcgttagccactgcgcccggcccgagaaaatacagttttaaaaagagaaagctttataacctcaccaatgaatacaaatgtttaaataaaatattgattaaaaaaacattaaaagt

SEQ ID NO: 26449 - DNA, 1721 bp, Homo sapiens
  source 1..1721: mol_type = unassigned DNA
acttcagcatggcggtgtttgcagatttggacctgcgagcgggttctgacctgaaggctctgcgcggacttgtggagacagccgctcaccttggctattcagttgttgctatcaatcatatcgttgactttaaggaaaagaaacaggaaattgaaaaaccagtagctgtttctgaactcttcacaactttgccaattgtacagggaaaatcaagaccaattaaaattttaactagattaacaattattgtctcggatccatctcactgcaatgttttgagagcaacttcttcaagggcccggctctatgatgttgttgcagtttttccaaagacagaaaagctttttcatattgcttgcacacatttagatgtggatttagtctgcataactgtaacagagaaactaccattttacttcaaaagacctcctattaatgtggcgattgaccgaggcctggcttttgaacttgtctatagccctgctatcaaagactccacaatgagaaggtatacaatttccagtgccctcaatttgatgcaaatctgcaaaggaaagcctttagaaataagagggccatatgacgtggcaaatctaggcttgctgtttgggctctctgaaagtgacgccaaggctgcggtgtccaccaactgccgagcagcgcttctccatggagaaactagaaaaactgcttttggaattatctctacagtgaagaaacctcggccatcagaaggagatgaagattgtcttccagcttccaagaaagccaagtggtctcactctgtcacccaggctggagtgcagtggcacaatctcggctcactgcaacctttgcctcttgggctcaagccatcctcccacctcagcctcccaagaactagaattcaacaaagacaacttttgatctctcatcagagagatcatactcccaagaacaggctttgacccttctttaaaagaggattgtcctgggctgatgagagtcactttacctgaagatacctgggaagttttgtctcctctgaggttggcccatggccagtgactgatgcaggacattacagcctggcccactggcctcggtggtacaatttatgctcctgagcaccccatgggattacgctgtgtgtggatttctcctgaaaccacatatttgcctcttctgccctgttctgttttttctcattcccttatagaggactctcagtaagtcacttacacaagaatcctaatttgaaatgctgcttccaggagacctgacttagaaaattggacaaataaagttgatttttttaaatgtccagtaacatgaagatgctgaactttcctagtcatttagggggaaatcaccacaaatatatctggctgatcaggttgaaagttaaaagaaaaaaagatttataaagtgggtattttcaagatggtgtggagggagatacaatttgatgcaagtcttatacttttgatgtcaatttattcttcagaaataactggttaattataaagggtggatggataaggatattcactgcaacaatgtcttaaatgtgaaaatggaaacaacctaaatacccaataataacaggattaaataattcattgtacattaaaagaatactgtctataaagatgtctagaataagttgttcagttgaagttgtaaagctaaatacacaatacccataatgtgcacagaaataatcagaatgtcatgaaacc

SEQ ID NO: 26450 - DNA, 4272 bp, Homo sapiens
  source 1..4272: mol_type = unassigned DNA
agactggcgcgcgcggacggtcatgggacttcagcatggcggtgtttgcagatttggacctgcgagcgggttctgacctgaaggctctgcgcggacttgtggagacagccgctcaccttggctattcagttgttgctatcaatcatatcgttgactttaaggaaaagaaacaggaaattgaaaaaccagtagctgtttctgaactcttcacaactttgccaattgtacagggaaaatcaagaccaattaaaattttaactagattaacaattattgtctcggatccatctcactgcaatgttttgagagcaacttcttcaagggcccggctctatgatgttgttgcagtttttccaaagacagaaaagctttttcatattgcttgcacacatttagatgtggatttagtctgcataactgtaacagagaaactaccattttacttcaaaagacctcctattaatgtggcgattgaccgaggcctggcttttgaacttgtctatagccctgctatcaaagactccacaatgagaaggtatacaatttccagtgccctcaatttgatgcaaatctgcaaaggaaagaatgtaattatatctagtgctgcagaaaggcctttagaaataagagggccatatgacgtggcaaatctaggcttgctgtttgggctctctgaaagtgacgccaaggctgcggtgtccaccaactgccgagcagcgcttctccatggagaaactagaaaaactgcttttggaattatctctacagtgaagaaacctcggccatcagaaggagatgaagattgtcttccagcttccaagaaagccaagtggtctcactctgtcacccaggctggagtgcagtggcacaatctcggctcactgcaacctttgcctcttgggctcaagccatcctcccacctcagcctcccaagaactagaattcaacaaagacaacttttgatctctcatcagagagatcatactcccaagaacaggctttgacccttctttaaaagaggattgtcctgggctgatgagagtcactttacctgaagatacctgggaagttttgtctcctctgaggttggcccatggccagtgactgatgcaggacattacagcctggcccactggcctcggtggtacaatttatgctcctgagcaccccatgggattacgctgtgtgtggatttctcctgaaaccacatatttgcctcttctgccctgttctgttttttctcattcccttatagaggactctcagtaagtcacttacacaagaatcctaatttgaaatgctgcttccaggagacctgacttagaaaattggacaaataaagttgatttttttaaatgtccagtaacatgaagatgctgaactttcctagtcatttagggggaaatcaccacaaatatatctggctgatcaggttgaaagttaaaagaaaaaaagatttataaagtgggtattttcaagatggtgtggagggagatacaatttgatgcaagtcttatacttttgatgtcaatttattcttcagaaataactggttaattataaagggtggatggataaggatattcactgcaacaatgtcttaaatgtgaaaatggaaacaacctaaatacccaataataacaggattaaataattcattgtacattaaaagaatactgtctataaagatgtctagaataagttgttcagttgaagttgtaaagctaaatacacaatacccataatgtgcacagaaataatcagaatgtcatgaaaccaggattattggtgatgtgttgcttcctttgttactcatttctgtattggcataatgagtattgggtgttcaagaggagggggaaggaagtatgacagatgttatggggaaaaagcaaagtacaacaggaagacaccttgggggaactaatagaatctaaggactcaaggatggcttcctggaggaaatacagctagaacaaaggggaggaatgagaagtgatgtgatggcgtggagtgggctgtagtgggaagaagagtcttccagggagctggcacagtatgtgaaaacagtaaagcaagtgcctggattttttaaggaactgaaaatttagttgagttgaaatttagagtttggctaggaaggttatgagagataagaataaagagttaacagcagccagattttaaggattttataagacatttttaggagtttttatttcatcctgagagaaatgtgaagccatcgaagggttgaaagaggagagtgagttgatcagcattgcattttagaaaaatccctctatctgcaacttgaaaaacattctggaggtaagcaagcctggaggccaggagcctaggagggctatttgatccagatgagaagtaatggtgacctgaactagggcagaggcacctaggattggaaaacatggacagatcacagcactacttatgtagtatacttggtaagacctggttgtttaaaagagaaggatgagggaaagaaggtcaaaaacaacttctaggactctccattggccagtgtggtgtgcccttcactgaagagcaaacacaaaatgaaagattgtgggcaaagagttgagtcagtgagaaggcaaggagagaaccttataaaaaaattgactatgtgattaaaaacttaaaaatttcccccaacgtgtttatcttttccattagcagaaataactaagagttgtcttaattctaatgggatttattccatattgtctctcatgccctctacctagttattagtgcaaatatttatatgtggcaacataaaactttttaactctttattctcttctctcgtgtaccctcccagctctttaggggaggtggatttgaggcagataccataaagaaaagttggtcacatggtggtaacacgttgaagttatgccacatgagacatcagcactggcaagagaaatgtctgtgttgtagatgtttcacttggaagaaattgaaggaccctgagccttaaaagtctgacaaacttaagccaggacccctgtggggaaggtagaggggccaacaaacaagattgggagtcagagagataacaatgaaatccccaatgcctgtgggaggtggactccctggattagtactagacagaaaaggtacaaaaatatttcaaaccattctcacaactctatatgtgtctatgaccagataactggaagaccttctggttatggactatgcgtatacactctcccagatagttagaggcatatctaagaggttaacatatatgatcttatccaaaatgggtctcttggtgctagtgttttacatcagacttcactggctttcatgtatttccacaagtgccaaacatttctcatatccttgctgtattccatagagcagtgttcctgctacctggaacacttgattcttgaataactcctgtttacctttcagacaaaccctaaaggttaccacctcaaagaagtctttatagaagcctcatcatcttagacactctgtattgtttccttcatcgtatttacaacagacagatactgtgcacttactgcctcacttaacgacagggatacgttctgaaaggtgcatcattaggcggttttgttgtgtgaacatcacagagtgttacttacacaaacctaaatgatacagcctactaaacacctaggctatatgagcaatacagcctattgctcttaggcttcaaacttgtacgacatgtcactgtactgaatactgtaggcaactataacacagtggtaagtatattgtgtatctaaacaaacatagaaaaggtaatgcactgtactatgatgttacaacagctaggatgttgctatcaatagaaatttttcagcttcattttatttttatgggaccacctttgtatatgtggttcattgttggccgaaacaccattctgtggcacatgactatgtatttattcctcattattcctttaatattcatctcttccaggagggcatgtcatggacaatctctttttcttaccacaggtcttaggacctggcctagcacctggccaagaactactggcatacctccttttattgtgcttcaatttattgtgctttgcaaatactgaattttttacaagttgaagatttgtggcacctctgtaaccagcaagtctattggtgccattttttcaacatcatgtgcctgtttcctgtctcgctcatgtcacattttggtaattttcacaatattaaaaactttttcattattatt

SEQ ID NO: 26451 - DNA, 726 bp, Homo sapiens
  source 1..726: mol_type = unassigned DNA
gaaattgaaaaaccagtagctgtttctgaactcttcacaactttgccaattgtacagggaaaatcaagaccaattaaaattttaactagattaacaattattgtctcggatccatctcactgcaatgttttgagagcaacttcttcaagggcccggctctatgatgttgttgcagtttttccaaagacagaaaagctttttcatattgcttgcacacatttagatgtggatttagtctgcataactgtaacagagaaactaccattttacttcaaaagacctcctattaatgtggcgattgaccgaggcctggcttttgaacttgtctatagccctgctatcaaagactccacaatgagaaggtatacaatttccagtgccctcaatttgatgcaaatctgcaaaggaaagcctttagaaataagagggccatatgacgtggcaaatctaggcttgctgtttgggctctctgaaagtgacgccaaggctgcggtgtccaccaactgccgagcagcgcttctccatggagaaactagaaaaactgcttttggaattatctctacagtgaagaaacctcggccatcagaaggagatgaagattgtcttccagcttccaagaaagccaagtgtgagggctgaaaagaatgccccagtctctgtcagcactcccttcttcccttttatagttcatcagccacaacaaaaataaaacctttgtgtgattta

SEQ ID NO: 26452 - DNA, 1457 bp, Homo sapiens
  source 1..1457: mol_type = unassigned DNA
accacggattcgccatcgtgagttccaggtgggcgcgcggggcccacgtagggcaggaggccagccccggggggatcgggcccgggactctgcggaatctggaggccgaagcccgcgcgcacgcagggtctctgctgcttccccaacgcctgttgcgtggccgcaggacccgccgccctcccggttgggccgcccagtcccgggccgggcgcgtgcacccagagcttccgcgtttctagtccggctcctctgctggattgcagcgccggctgggcaccaggagtacaaagcgaaaacccccgccggcccttctgttctccacggtctccaaggagacacggacaacagaacaacacttccgtgtgctaaatagtaaagcaccaagacagggtcagatgtgttactgggctggagtgtggtggcacaatcacgctcactgcatccttgacctcctgggctcaagtgatcttcccacctcagcctcccaagtagctgggactacaggattttcaaaatggctgcagctcctcaagcaccggggcggggatctctccgtaagacgagacctctggttgtgaagacgtcgttgaacaacccatacatcatccgctggagcgctctggagagcgaggatatgcacttcatcctacagacgcttgaggacaggcttaaagctattggacttcagaagattgaagataagaagaaaaagaacaaaacaccttttctgaaaaaagaaagcagagagaaatgcagcattgctgttgatattagtgagaatctgaaggagaagaaaacagatgctaagcagcaagtgtcagggtggacgcctgcacacgtcaggaagcagcttgccattggcgttaacgaagttaccagagccctggaaaggagggaactgctgttagttctggtgtgtaaatcagtcaagcctgccatgatcacctcacacttgattcagttaagcctaagcagaagtgtccctgcctgtcaggtcccccggctcagtgagagaatcgcccccgtcattggcttaaaatgtgttctagccttggcgttcaaaaagaacaccactgactttgtggacgaagtaagagccatcatccccagagtccccagtttaagtgtaccatggcttcaagacagaattgaagattctggggaaaatttagagactgaacctctggaaagccaagacagagagcttttggacacttcatttgaagatctgtcaaaacctaagagaaagcttgctgacggtcggcaggcttctgtaacattacaaccccttaaaataaagaaactgattccaaaccctaataagataaggaaaccacccaaaagtaaaaaagctactccaaagtaatcttgcataaacttgtcatgtcatacagtttgtgaaaggacaccttgtaaagaagccttgaaactaataaaatgagttatacttacataga

SEQ ID NO: 26453 - DNA, 834 bp, Homo sapiens
  source 1..834: mol_type = unassigned DNA
ggccgctttcccctctccggagtgacctaacacaggataacgaaacctgcactgctccgagcgcttcctccccggcccgtcgcgtctgcgaggcgaggccgggaggcgagggctctgcgcacgcgcggcgcaggcgcactgggcgccggtgctgttgccttcaggtgaccacggattcgccatcgtgagttccagacagggtcagatgtgttactgggctggagtgtggtggcacaatcacgctcactgcatccttgacctcctgggctcaagtgatcttcccacctcagcctcccaagtagctgggactacaggattttcaaaatggctgcagctcctcaagcaccggggcggggatctctccgtaagacgagacctctggttgtgaagacgtcgttgaacaacccatacatcatccgctggagcgctctggagagcgaggatatgcacttcatcctacagacgcttgaggacaggcttaaagctattggacttcagaagattgaagataagaagaaaaagaacaaaacaccttttctgaaaaaagaaagcagagagaaatgcagcattgctgttgatattagtgagaatctgaaggagaagaaaacagatgctaagcagcaagtgtcagggtggacgcctgcacacgtcaggaagcagcttgccattggcgttaacgaagttaccagagccctggaaaggagggaactgctgttagttctggttctcactctgttgcccaggctggagtgcagtggtgtgatcccggctcactgcaaccccgcctcctgggttcaagcgattctcctgcctcagcctcctgaatagctggga

SEQ ID NO: 26454 - DNA, 1030 bp, Homo sapiens
  source 1..1030: mol_type = unassigned DNA
gcgcacgcgcggcgcaggcgcactgggcgccggtgctgttgccttcaggtgaccacggattcgccatcgtgagttccaggattttcaaaatggctgcagctcctcaagcaccggggcggggatctctccgtaagacgagacctctggttgtgaagacgtcgttgaacaacccatacatcatccgctggagcgctctggagagcgaggatatgcacttcatcctacagacgcttgaggacaggcttaaagctattggacttcagaagattgaagataagaagaaaaagaacaaaacaccttttctgaaaaaagaaagcagagagaaatgcagcattgctgttgatattagtgagaatctgaaggagaagaaaacagatgctaagcagcaagtgtcagggtggacgcctgcacacgtcaggaagcagcttgccattggcgttaacgaagttaccagagccctggaaaggagggaactgctgttagttctggtgtgtaaatcagtcaagcctgccatgatcacctcacacttgattcagttaagcctaagcagaagtgtccctgcctgtcaggtcccccggctcagtgagagaatcgcccccgtcattggcttaaaatgtgttctagccttggcgttcaaaaagaacaccactgactttgtggacgaagtaagagccatcatccccagagtccccagtttaagtgtaccatggcttcaagacagaattgaagattctggggaaaatttagagactgaacctctggaaagccaagacagagagcttttggacacttcatttgaagatctgtcaaaacctaagagaaagcttgctgacggtcggcaggcttctgtaacattacaaccccttaaaataaagaaactgattccaaaccctaataagataaggaaaccacccaaaagtaaaaaagctactccaaagtaatcttgcataaacttgtcatgtcatacagtttgtgaaaggacaccttgtaaagaagccttgaaactaataaaatgagttatacttacata

SEQ ID NO: 26455 - DNA, 1296 bp, Homo sapiens
  source 1..1296: mol_type = unassigned DNA
ctcgttgtgtcgtttccgggtcgcgcgacgctgtgggccgctttcccctctccggagtgacctaacacaggataacgaaacctgcactgctccgagcgcttcctccccggcccgtcgcgtctgcgaggcgaggccgggaggcgagggctctgcgcacgcgcggcgcaggcgcactgggcgccggtgctgttgccttcaggtgaccacggattcgccatcgtgagttccagacagggtcagatgtgttactgggctggagtgtggtggcacaatcacgctcactgcatccttgacctcctgggctcaagtgatcttcccacctcagcctcccaagtagctgggactacaggattttcaaaatggctgcagctcctcaagcaccggggcggggatctctccgtaagacgagacctctggttgtgaagacgtcgttgaacaacccatacatcatccgctggagcgctctggagagcgaggatatgcacttcatcctacagacgcttgaggacaggcttaaagctattggacttcagaagattgaagataagaagaaaaagaacaaaacaccttttctgaaaaaagaaagcagagagaaatgcagcattgctgttgatattagtgagaatctgaaggagaagaaaacagatgctaagcagcaagtgtcagggtggacgcctgcacacgtcaggaagcagcttgccattggcgttaacgaagttaccagagccctggaaaggagggaactgctgttagttctggtgtgtaaatcagtcaagcctgccatgatcacctcacacttgattcagttaagcctaagcagaagtgtccctgcctgtcaggtcccccggctcagtgagagaatcgcccccgtcattggcttaaaatgtgttctagccttggcgttcaaaaagaacaccactgactttgtggacgaagtaagagccatcatccccagagtccccagtttaagtgtaccatggcttcaagacagaattgaagattctggggaaaatttagagactgaacctctggaaagccaagacagagagcttttggacacttcatttgaagatctgtcaaaacctaagagaaagcttgctgacggtcggcaggcttctgtaacattacaaccccttaaaataaagaaactgattccaaaccctaataagataaggaaaccacccaaaagtaaaaaagctactccaaagtaatcttgcataaacttgtcatgtcatacagtttgtgaaaggacaccttgtaaagaagccttgaaactaataaaatgagttatactta

SEQ ID NO: 26456 - DNA, 863 bp, Homo sapiens
  source 1..863: mol_type = unassigned DNA
ggggcccacgtagggcaggaggccagccccggggggatcgggcccgggactctgcggaatctggaggccgaagcccgcgcgcacgcagggtctctgctgcttccccaacgcctgttgcgtggccgcaggacccgccgccctcccggttgggccgcccagtcccgggccgggcgcgtgcacccagagcttccgcgtttctagtccggctcctctgctggattgcagcgccggctgggcaccaggagtacaaagcgaaaacccccgccggcccttctgttctccacggtctccaaggagacacggacaacagaacaacacttccgtgtgctaaatagtaaagcaccaaggattttcaaaatggctgcagctcctcaagcaccggggcggggatctctccgtaagacgagacctctggttgtgaagacgtcgttgaacaacccatacatcatccgctggagcgctctggagagcgaggatatgcacttcatcctacagacgcttgaggacaggcttaaagctattggacttcagaagattgaagataagaagaaaaagaacaaaacaccttttctgaaaaaagaaagcagagagaaatgcagcattgctgttgatattagtgagaatctgaaggagaagaaaacagatgctaagcagcaagtgtcagggtggacgcctgcacacgtcaggaagcagcttgccattggcgttaacgaagttaccagagccctggaaaggagggaactgctgttagttctggtgtgtaaatcagtcaagcctgccatgatcacctcacacttgattcagttaagcctaagcagaagtgtccctgcctgtcaggtcccccggctcagtgagagaatcgc

SEQ ID NO: 26457 - DNA, 1483 bp, Homo sapiens
  source 1..1483: mol_type = unassigned DNA
gtgccccgccagcggaggccgggaggaccaggaacccaggagagcatggccacgctgcgccggcttcgggaggcgccgcggcacttactggtttgcgagaaatccaacttcggcaaccacaagtcgcgccaccggcatcttgtgcagacgcactactataactacagggtttcatttctcattcctgaatgtgggatactatcggaagaactgaaaaacctggtcatgaacactggaccctattactttgtgaagaatttacctcttcatgaattaattacacctgaattcatcagtacctttataaagaaaggttcttgctatgcactaacatacaatacacatattgatgaagataatactgttgccctgctaccaaatgggaaattaattttgtcactggataaagacacttatgaagaaactggacttcagggtcatccatctcagttttctggcagaaaaattatgaaatttattgtttccattgatttgatggaattatccttaaacttggattctaagaagtatgaaagaatatcttggtctttcaaagaaaagaagccattgaaatttgattttcttttggcttggcataaaacaggttcagaagaatcgacaatgatgtcatatttttccaagtaccaaattcaggagcatcagccaaaagtagcactgagcacgttgagagatctccagtgcccagtgctgcagagcagcgagctggagggaacgccagaggtgtcctgccgggctctggagctcttcgactggctcggcgccgtcttcagtaatgtcgacctaaataatgagcctaataatttcatatcaacctattgctgtcctgagccaagcacagtggtggcaaaagcttatttgtgtacaatcactggcttcatacttccagagaagatctgtctcctattggaacatctctgtcactactttgatgaaccgaagttagctccatgggttacactgtccgttcaaggctttgcagacagccctgtttcttgggaaaaaaatgaacatggttttcgaaaaggaggagaacatttatataactttgtgatttttaataatcaggactattggcttcagatggctgttggggcaaatgatcactgtccaccataaaaaataaaaattaaaaatcgtgtttacttacatttacgcttgctttcagatttcttaatggtaaaaggtctgtgtgtccactcaggcttgtgtgatggtgacatttctcagatcagcatttgctggcatcctgccctgcacctgagacccatctgtgatggcagcaaggcctgctgtccagtgaatagctcatagttgatttctctctgtcaacataagcacagggttgtgggttactatgtggtacactgggccaggatgtccagggaccggggatattggtccccatctcactccattggttgagatatattttgttcattacaactttttcagataataaaaa

SEQ ID NO: 26458 - DNA, 1042 bp, Homo sapiens
  source 1..1042: mol_type = unassigned DNA
ggtacccagtctggagggagctgttgtcaggggcgttctggctgctcactcgtgtcaacccgccgaactgggagtttcatttctcattcctgaatgtgggatactatcggaagaactgaaaaacctggtcatgaacactggaccctattactttgtgaagaatttacctcttcatgaattaattacacctgaattcatcagtacctttataaagaaaggttcttgctatgcactaacatacaatacacatattgatgaagataatactgttgccctgctaccaaatgggaaattaattttgtcactggataaagacacttatgaagaaactggacttcagggtcatccatctcagttttctggcagaaaaattatgaaatttattgtttccattgatttgatggaattatccttaaacttggattctaagaagtatgaaagaatatcttggtctttcaaagaaaagaagccattgaaatttgattttcttttggcttggcataaaacaggttcagaagaatcgacaatgatgtcatatttttccaagtaccaaattcaggagcatcagccaaaagtagcactgagcacgttgagagatctccagtgcccagtgctgcagagcagcgagctggagggaacgccagaggtgtcctgccgggctctggagctcttcgactggctcggcgccgtcttcagtaatgtcgacctaaataatgagcctaataatttcatatcaacctattgctgtcctgagccaagcacagtggtggcaaaagcttatttgtgtacaatcactggcttcatacttccagagaagatctgtctcctattggaacatctctgtcactactttgatgaaccgaagttagctccatgggttacactgtccgttcaaggctttgcagacagccctgtttcttgggaaaaaaatgaacatggttttcgaaaaggaggagaacatttatataactttgtgatttttaataatcaggactattggcttcagatggctgttggggcaaatgatcactgtccaccataa

SEQ ID NO: 26459 - DNA, 1124 bp, Homo sapiens
  source 1..1124: mol_type = unassigned DNA
ctctgctccggtgcaggcccgcagggcgccctgggctgggagcaacgcgactgaccgtggtcgtgggcggacggcggctgcagcgtggaggagctggggtcgctgtgggtcgcgaagcagagcccgggacgtgcgcgcttggtgcacgatcctgaaggggagctccgaggggcccgggtcgccagggctgctgcggccattcccggagcccggcgcggggcccgcgagatactggtttaggccgtcccagggctccgggcgcacccggtggccgctgctgcagcggagggagcgcggcggcgcgggggctcggagacagcgtttctcccggaagtcttcctcgggcagcaggtgggaagtgggagccggagcggcagctggcagcgttctctccgcaggtcggcaccatgcgccctgcagccctgcgcggggccctgctgggctgcctctgcctggcgttgctttgcctgggcggtgcggacaagcgcctgcgtgacaaccatgagtggaaaaaactaattatggttcagcactggcctgagacagtatgcgagaaaattcaaaacgactgtagagaccctccggattactggacaatacatggactatggcccgataaaagtgaaggatgtaatagatcgtggcccttcaatttagaagagattaagaaaaattggatggagattacagacagttcactcccttcccccagcatgggacctgcgccgcccaggtggatgcgctcaactcccagaagaagtactttggcagaagcctggaactctacagggagctggacctcaacaggtgggtgcgcccttcccccggctgcacttcccagtggggatctctgctgtcgcccaagcctgacagctggatccaggggagtgggtgtagacctcactgccctccagcagcttctgcatgtgcactattcggctactgggatcattcctgaggaatgttctgagcctaccaagcctttccagatcattctacatcacgatcacacagagtgggtgcagagtattgggatgcccatctggaccatctcatcatcagagtcggccatagggaaaacgaggactcaaccagcatgtgccgttctcagccatgattcctga

SEQ ID NO: 26460 - DNA, 1031 bp, Homo sapiens
  source 1..1031: mol_type = unassigned DNA
ctctgctccggtgcaggcccgcagggcgccctgggctgggagcaacgcgactgaccgtggtcgtgggcggacggcggctgcagcgtggaggagctggggtcgctgtgggtcgcgaagcagagcccgggacgtgcgcgcttggtgcacgatcctgaaggggagctccgaggggcccgggtcgccagggctgctgcggccattcccggagcccggcgcggggcccgcgagatactggtttaggccgtcccagggctccgggcgcacccggtggccgctgctgcagcggagggagcgcggcggcgcgggggctcggagacagcgtttctcccggaagtcttcctcgggcagcaggtgggaagtgggagccggagcggcagctggcagcgttctctccgcaggtcggcaccatgcgccctgcagccctgcgcggggccctgctgggctgcctctgcctggcgttgctttgcctgggcggtgcggacaagcgcctgcgtgacaaccatgagtggaaaaaactaattatggttcagcactggcctgagacagtatgcgagaaaattcaaaacgactgtagagaccctccggattactggacaatacatggactatggcccgataaaagtgaaggatgtaatagatcgtggcccttcaatttagaagagattaagaaaaattggatggagattacagacagttcactcccttccccctcaactgatcttttgccagaaatgagggcatactggcctgacgtaattcactcgtttcccaatcgcagccgcttctgtgggacctgcgccgcccaggtggatgcgctcaactcccagaagaagtactttggcagaagcctggaactctacagggagctggacctcaacaggtgggtgcgcccttcccccggctgcacttcccagtggggatctctgctgtcgcccaagcctgacagctggatccaggggagtgggtgtagacctcactgccctccagcagcttctgcatgtgcactattcggctactgggatcattcctga

SEQ ID NO: 26461 - DNA, 1391 bp, Homo sapiens
  source 1..1391: mol_type = unassigned DNA
ctctgctccggtgcaggcccgcagggcgccctgggctgggagcaacgcgactgaccgtggtcgtgggcggacggcggctgcagcgtggaggagctggggtcgctgtgggtcgcgaagcagagcccgggacgtgcgcgcttggtgcacgatcctgaaggggagctccgaggggcccgggtcgccagggctgctgcggccattcccggagcccggcgcggggcccgcgagatactggtttaggccgtcccagggctccgggcgcacccggtggccgctgctgcagcggagggagcgcggcggcgcgggggctcggagacagcgtttctcccggaagtcttcctcgggcagcaggtgggaagtgggagccggagcggcagctggcagcgttctctccgcaggtcggcaccatgcgccctgcagccctgcgcggggccctgctgggctgcctctgcctggcgttgctttgcctgggcggtgcggacaagcgcctgcgtgacaaccatgagtggaaaaaactaattatggttcagcactggcctgagacagtatgcgagaaaattcaaaacgactgtagagaccctccggattactggacaatacatggactatggcaagtgtctcacacaagcagaagaggcttgctattcttatttaaaaatatctttagtctttctagcagaaatttctctttttattctttgcagacttcaatgaaaaagccaccccaaccaagcctaatatttcttattttctcttttaagcccgataaaagtgaaggatgtaatagatcgtggcccttcaatttagaagagattaaggatcttttgccagaaatgagggcatactggcctgacgtaattcactcgtttcccaatcgcagccgcttctggaagcatgagtgggaaaagcatgggacctgcgccgcccaggtggatgcgctcaactcccagaagaagtactttggcagaagcctggaactctacagggagctggacctcaacagtgtgcttctaaaattggggataaaaccatccatcaattactaccaagttgcagattttaaagatgcccttgccagagtatatggagtgatacccaaaatccagtgccttccaccaagccaggatgaggaagtacagacaattggtcagatagaactgtgcctcactaagcaagaccagcagctgcaaaactgcaccgagccgggggagcagccgtcccccaagcaggaagtctggctggcaaatggggccgccgagagccggggtctgagagtctgtgaagatggcccagtcttctatcccccacctaaaaagaccaagcattgatgcccaagttttggaaatattctgttttaaaaagcaagagaaattcacaaactgcagctttct

SEQ ID NO: 26462 - DNA, 887 bp, Homo sapiens
  source 1..887: mol_type = unassigned DNA
ttggtgctcccagcacctagcaccgggagactggagaggtttccaggagagtgacccgagtcggcaccatgcgccctgcagccctgcgcggggccctgctgggctgcctctgcctggcgttgctttgcctgggcggtgcggacaagcgcctgcgtgacaaccatgagtggaaaaaactaattatggttcagcactggcctgagacagtatgcgagaaaattcaaaacgactgtagagaccctccggattactggacaatacatggactatggcccgataaaagtgaaggatgtaatagatcgtggcccttcaatttagaagagattaaggatcttttgccagaaatgagggcatactggcctgacgtaattcactcgtttcccaatcgcagccgcttctggaagcatgagtgggaaaagcatgggacctgcgccgcccaggtggatgcgctcaactcccagaagaagtactttggcagaagcctggaactctacagggagctggacctcaacagtgtgcttctaaaattggggataaaaccatccatcaattactaccaagttgcagattttaaagatgcccttgccagagtatatggagtgatacccaaaatccagtgccttccaccaagccaggatgaggaagtacagacaattggtcagatagaactgtgcctcactaagcaagaccagcagctgcaaaactgcaccgagccgggggagcagccgtcccccaagcaggaagtctggctggcaaatggggccgccgagagccggggtctgagagtctgtgaagatggcccagtcttctatcccccacctaaaaagaccaagcattgatgcccaagttttggaaatattctgttttaaaaagcaagagaaattcac

SEQ ID NO: 26463 - DNA, 963 bp, Homo sapiens
  source 1..963: mol_type = unassigned DNA
caggagagtgacccgagtaggtcccctcctaattctggagccgtccctcgggctgcgcagtggagcgccgaggtggcgggaggctgcggggagcctgggcggccaagcaccatctgcagtcaggagctcccgggcagcttgcagggcgcagtttttgaaagcgggtgctgcgtgcggaccgcgggcctgcagggtcggcaccatgcgccctgcagccctgcgcggggccctgctgggctgcctctgcctggcgttgctttgcctgggcggtgcggacaagcgcctgcgtgacaaccatgagtggaaaaaactaattatggttcagcactggcctgagacagtatgcgagaaaattcaaaacgactgtagagaccctccggattactggacaatacatggactatggcccgataaaagtgaaggatgtaatagatcgtggcccttcaatttagaagagattaaggatcttttgccagaaatgagggcatactggcctgacgtaattcactcgtttcccaatcgcagccgcttctggaagcatgagtgggaaaagcatgggacctgcgccgcccaggtggatgcgctcaactcccagaagaagtactttggcagaagcctggaactctacagggagctggacctcaacagtgtgcttctaaaattggggataaaaccatccatcaattactaccaagttgcagattttaaagatgcccttgccagagtatatggagtgatacccaaaatccagtgccttccaccaagccaggatgaggaagtacagacaattggtcagatagaactgtgcctcactaagcaagaccagcagctgcaaaactgcaccgagccgggggagcagccgtcccccaagcaggaagtctggctggcaaatggggccgccgagagccggggtctgagagtctgtgaagatggcccagtcttctatcccccacctaaaaagac

SEQ ID NO: 26464 - DNA, 1375 bp, Homo sapiens
  source 1..1375: mol_type = unassigned DNA
ctgcctcggcctctctgagccaaccacggggcggggcgtgaacgccgggcggggacgtgccgttctggggggcgtgtccaccggcgggggcgtgccgtcctgggggcgtggctctctgctccggtgcaggcccgcagggcgccctgggctgggagcaacgcgactgaccgtggtcgtgggcggacggcggctgcagcgtggaggagctggggtcgctgtgggtcgcgaagcagagcccgggacgtgcgcgcttggtgcacgatcctgaaggggagctccgaggggcccgggtcgccagggctgctgcggccattcccggagcccggcgcggggcccgcgagatactggtttaggccgtcccagggctccgggcgcacccggtggccgctgctgcagcggagggagcgcggcggcgcgggggctcggagacagcgtttctcccggaagtcttcctcgggcagcaggtgggaagtgggagccggagcggcagctggcagcgttctctccgcaggtcggcaccatgcgccctgcagccctgcgcggggccctgctgggctgcctctgcctggcgttgctttgcctgggcggtgcggacaagcgcctgcgtgacaaccatgagtggaaaaaactaattatggttcagcactggcctgagacagtatgcgagaaaattcaaaacgactgtagagaccctccggattactggacaatacatggactatggcccgataaaagtgaaggatgtaatagatcgtggcccttcaatttagaagagattaaggatcttttgccagaaatgagggcatactggcctgacgtaattcactcgtttcccaatcgcagccgcttctggaagcatgagtgggaaaagcatgggacctgcgccgcccaggtggatgcgctcaactcccagaagaagtactttggcagaagcctggaactctacagggagctggacctcaacagtgtgcttctaaaattggggataaaaccatccatcaattactaccaagttgcagattttaaagatgcccttgccagagtatatggagtgatacccaaaatccagtgccttccaccaagccaggatgaggaagtacagacaattggtcagatagaactgtgcctcactaagcaagaccagcagctgcaaaactgcaccgagccgggggagcagccgtcccccaagcaggaagtctggctggcaaatggggccgccgagagccggggtctgagagtctgtgaagatggcccagtcttctatcccccacctaaaaagaccaagcattgatgcccaagttttggaaatattctgttttaaaaagcaagagaaattcacaaactgcagctttctaaaaaacaactccaaagtgaa

SEQ ID NO: 26465 - DNA, 878 bp, Homo sapiens
  source 1..878: mol_type = unassigned DNA
gctgagtgattgcagaaactggccttccatctctctcagacaccaagctgcagatccaggtcaccacctagaggggaggaagacctcgctttggagagtgggaataaaacgctcgtggaaaagggtacacgcttttctgggaaagtgaggccaccatggctctggagaagtctcttgtccggctccttctgcttgtcctgatactgctggtgctgggctgggtccagccttccctgggcaaggaatcccgggccaagaaattccagcggcagcatatggactcagacagttcccccagcagcagctccacctactgtaaccaaatgatgaggcgccggaatatgacacaggggcggtgcaaaccagtgaacacctttgtgcacgagcccctggtagatgtccagaatgtctgtttccaggaaaaggtcacctgcaagaacgggcagggcaactgctacaagagcaactccagcatgcacatcacagactgccgcctgacaaacggctccaggtaccccaactgtgcataccggaccagcccgaaggagagacacatcattgtggcctgtgaagggagcccatatgtgccagtccactttgatgcttctgtggaggactctacctaaggtcagagcagcgagataccccacctccctcaacctcatcctctccacagctgcctcttccctcttccttccctgctgtgaaagaagtaactacagttagggctcctattcaacacacacatgcttccctttcctgagtcccatccctgcgtgattttgggggtgaagagtgggttgtgaggtgggccccatgttaacccctccactctttctttcaataaaacgcagttgcaaacacctgatttctgaagc

SEQ ID NO: 26466 - DNA, 1348 bp, Homo sapiens
  source 1..1348: mol_type = unassigned DNA
agagacttgggttttgctccctaggagccctggaatagctttggccagaattccctatctcccattagaacctctcctttgcgtcctttgttaacctccaagtctacttggtgaaaacgcccacgaagaagtaacaaggactttgttcctagtgtgccaggtttgggcaccagtgctgtagtggctttctctgctgctccttgtgcatcagcagacagatgtggttcacataggaagaaagactaacgtaggcaaagatttgctctttcttcagcagccctagaaagacggcggcctgggtgattcaccactccttcctcacgtccttgattttatttgaactgagctccagatgctcctcccacccttttcctcttggaagccaaacccctttgtaatctgtataaggtccacaccccgggagctgagtgattgcagaaactggccttccatctctctcagacaccaagctgcagatccaggcttttctgggaaagtgaggccaccatggctctggagaagtctcttgtccggctccttctgcttgtcctgatactgctggtgctgggctgggtccagccttccctgggcaaggaatcccgggccaagaaattccagcggcagcatatggactcagacagttcccccagcagcagctccacctactgtaaccaaatgatgaggcgccggaatatgacacaggggcggtgcaaaccagtgaacacctttgtgcacgagcccctggtagatgtccagaatgtctgtttccaggaaaaggtcacctgcaagaacgggcagggcaactgctacaagagcaactccagcatgcacatcacagactgccgcctgacaaacggctccaggtaccccaactgtgcataccggaccagcccgaaggagagacacatcattgtggcctgtgaagggagcccatatgtgccagtccactttgatgcttctgtggaggactctacctaaggtcagagcagcgagataccccacctccctcaacctcatcctctccacagctgcctcttccctcttccttccctgctgtgaaagaagtaactacagttagggctcctattcaacacacacatgcttccctttcctgagtcccatccctgcgtgattttgggggtgaagagtgggttgtgaggtgggccccatgttaacccctccactctttctttcaataaaacgcagttgcaaacacctgatttctgaagcggttctgtctaggtactgtttctggcattgccttccagcaaggggtaagaactgtaaatctgattcactttggagaacggtgaatggagtaattaaatgccttcccttctgacttgga

SEQ ID NO: 26467 - DNA, 769 bp, Homo sapiens
  source 1..769: mol_type = unassigned DNA
gattgcagaaactggccttccatctctctcagacaccaagctgcagatccaggtcactttgtaggtcaccacctagaggggaggaagacctcgctttggagagtgggaataaaacgctcgtggaaaagggtacacgcttttctgggaaagtgaggccaccatggctctggagaagtctcttgtccggctccttctgcttgtcctgatactgctggtgctgggctgggtccagccttccctgggcaaggaatcccgggccaagaaattccagcggcagcatatggactcagacagttcccccagcagcagctccacctactgtaaccaaatgatgaggcgccggaatatgacacaggggcggtgcaaaccagtgaacacctttgtgcacgagcccctggtagatgtccagaatgtctgtttccaggaaaaggtcacctgcaagaacgggcagggcaactgctacaagagcaactccagcatgcacatcacagactgccgcctgacaaacggctccaggtaccccaactgtgcataccggaccagcccgaaggagagacacatcattgtggcctgtgaagggagcccatatgtgccagtccactttgatgcttctgtggaggactctacctaaggtcagagcagcgagataccccacctccctcaacctcatcctctccacagctgcctcttccctcttccttccctgctgtgaaagaagtaactacagttagggctcctattcaacacacacatgcttccctttcctgag

SEQ ID NO: 26468 - DNA, 896 bp, Homo sapiens
  source 1..896: mol_type = unassigned DNA
ttgagcactgggtacaaatgtattttggatcaaagaaactccagtattcaaagataggaactgacaggattttaggtcactttgtaggtcaccacctagaggggaggaagacctcgctttggagagtgggaataaaacgctcgtggaaaagggtacacgcttttctgggaaagtgaggccaccatggctctggagaagtctcttgtccggctccttctgcttgtcctgatactgctggtgctgggctgggtccagccttccctgggcaaggaatcccgggccaagaaattccagcggcagcatatggactcagacagttcccccagcagcagctccacctactgtaaccaaatgatgaggcgccggaatatgacacaggggcggtgcaaaccagtgaacacctttgtgcacgagcccctggtagatgtccagaatgtctgtttccaggaaaaggtcacctgcaagaacgggcagggcaactgctacaagagcaactccagcatgcacatcacagactgccgcctgacaaacggctccaggtaccccaactgtgcataccggaccagcccgaaggagagacacatcattgtggcctgtgaagggagcccatatgtgccagtccactttgatgcttctgtggaggactctacctaaggtcagagcagcgagataccccacctccctcaacctcatcctctccacagctgcctcttccctcttccttccctgctgtgaaagaagtaactacagttagggctcctattcaacacacacatgcttccctttcctgagtcccatccctgcgtgattttgggggtgaagagtgggttgtgaggtgggccccatgttaacccctccactctttctttcaataaaacgcagttgcaaacacctga

SEQ ID NO: 26469 - DNA, 755 bp, Homo sapiens
  source 1..755: mol_type = unassigned DNA
ttccaagtaggggagaccagctgcccctgaaccccagaacaaccagctggatcagttctcacaggagctacagcgcggagactgggaaacatggttccaaaactgttcacttcccaaatttgtctgcttcttctgttggggcttctggctgtggagggctcactccatgtcaaacctccacagtttacctgggctcaatggtttgaaacccagcacatcaatatgacctcccagcaatgcaccaatgcaatgcaggtcattaacaattatcaacggcgatgcaaaaaccaaaatactttccttcttacaacttttgctaacgtagttaatgtttgtggtaacccaaatatgacctgtcctagtaacaaaactcgcaaaaattgtcaccacagtggaagccaggtgcctttaatccactgtaacctcacaactccaagtccacagaatatttcaaactgcaggtatgcgcagacaccagcaaacatgttctatatagttgcatgtgacaacagagatcaacgacgagaccctccacagtatccggtggttccagttcacctggatagaatcatctaagctcctgtatcagcactcctcatcatcactcatctgccaagctcctcaatcatagccaagatcccatctctccatatactttgggtatcagcatctgtcctcatcagtctccataccccttcagctttcctgagctgaagtgccttgtgaaccctgcaataaactgctttgcaaattca

SEQ ID NO: 26470 - DNA, 720 bp, Homo sapiens
  source 1..720: mol_type = unassigned DNA
cccagaacaaccagctggatcagttctcacaggagccacagctcagagactgggaaacatggttccaaaactgttcacttcccaaatttgtctgcttcttctgttggggcttatgggtgtggagggctcactccatgccagacccccacagtttacgagggctcagtggtttgccatccagcacatcagtctgaacccccctcgatgcaccattgcaatgcgggcaattaacaattatcgatggcgttgcaaaaaccaaaatacttttcttcgtacaacttttgctaatgtagttaatgtttgtggtaaccaaagtatacgctgccctcataacagaactctcaacaattgtcatcggagtagattccgggtgcctttactccactgtgacctcataaatccaggtgcacagaatatttcaaactgcacgtatgcagacagaccaggaaggaggttctatgtagttgcatgtgacaacagagatccacgggattctccacggtatcctgtggttccagttcacctggataccaccatctaagctcctgtatcagcagtcctcatcatcactcatctgccaagctcctcaatcatagccaagatcccatccctccatgtactctgggtatcagcaactgtcctcatcagtctccataccccttcagctttcctgagctgaagtcccttgtgaaccctgcaataaactgctttgcaaattca

SEQ ID NO: 26471 - DNA, 1401 bp, Homo sapiens
  source 1..1401: mol_type = unassigned DNA
accggctccccatcatcgtactagggaggaagaagcgggtgagaaacaaaacttctttccattgtcctgcccgtttctgcggacttgttctgaggccgaggagcctgtgttggaagagatggtgatgggcctgggcgttttgttgttggtcttcgtgctgggtctgggtctgaccccaccgaccctggctcaggataactccaggcacctctaagatactgatggctctgcagaggacccattcattgcttctgcttttgctgctgaccctgctggggctggggctggtccagccctcctatggccaggatggcatgtaccagcgattcctgcggcaacacgtgcaccctgaggagacaggtggcagtgatcgctactgcaacttgatgatgcaaagacggaagatgactttgtatcactgcaagcgcttcaacaccttcatccatgaagatatctggaacattcgtagtatctgcagcaccaccaatatccaatgcaagaacggcaagatgaactgccatgagggtgtagtgaaggtcacagattgcagggacacaggaagttccagggcacccaactgcagatatcgggccatagcgagcactagacgtgttgtcattgcctgtgagggtaacccacaggtgcctgtgcactttgacggttagatgccaccatgtagggattatcgcgagtggttgaccttacacttactccttaaatagcagtgagtaatgcatttgagctgtcccaggctctgtctcctcagctcatttcctactctttttctctatataactcattctattaaatacattgcaccaaagagatatggagacataaacctgtaatgaatgaggctgggcttttctgtaataagcttccttttataatactggtcagcttagctctctcagatcctatcctgtggaatttagttattatgtgtatttatgtagtatttcaaacatttcaaaatgctttcatctatgtttatcacattttaataccacagcacttataatgatgtcactacatatagaagctcaaagttaagggatttgctgaagactgtaaagttaatggaagaattgagacaaaaatccagtgtagctggccacttatccagggctttttctacttcatcacaaggaatgttttgaaagtgtctgctttttttatccttaaaattcacctgtcagggaggcattaaaaatttggaaatgtatgccagcaaaatgtgagctctgtattttttggcattcttatgtttgggtttaataagattaagaaaatgatactgggaattttctttttcctgaaactttgaatcaccctagtaagtcaaagtactaaaaaatgtactagatcattaagacttatgtgctcttactgattgaaaga

SEQ ID NO: 26472 - DNA, 1346 bp, Homo sapiens
  source 1..1346: mol_type = unassigned DNA
tccaggttcacacaactggaacccatctccaggaacaaacagctggaacccatctcccgttgaagggaaactgccagatttttgtaagattcttcctcctgggcacctctaagatactgatggctctgcagaggacccattcattgcttctgcttttgctgctgaccctgctggggctggggctggtccagccctcctatggccaggatggcatgtaccagcgattcctgcggcaacacgtgcaccctgaggagacaggtggcagtgatcgctactgcaacttgatgatgcaaagacggaagatgactttgtatcactgcaagcgcttcaacaccttcatccatgaagatatctggaacattcgtagtatctgcagcaccaccaatatccaatgcaagaacggcaagatgaactgccatgagggtgtagtgaaggtcacagattgcagggacacaggaagttccagggcacccaactgcagatatcgggccatagcgagcactagacgtgttgtcattgcctgtgagggtaacccacaggtgcctgtgcactttgacggttagatgccaccatgtagggattatcgcgagtggttgaccttacacttactccttaaatagcagtgagtaatgcatttgagctgtcccaggctctgtctcctcagctcatttcctactctttttctctatataactcattctattaaatacattgcaccaaagagatatggagacataaacctgtaatgaatgaggctgggcttttctgtaataagcttccttttataatactggtcagcttagctctctcagatcctatcctgtggaatttagttattatgtgtatttatgtagtatttcaaacatttcaaaatgctttcatctatgtttatcacattttaataccacagcacttataatgatgtcactacatatagaagctcaaagttaagggatttgctgaagactgtaaagttaatggaagaattgagacaaaaatccagtgtagctggccacttatccagggctttttctacttcatcacaaggaatgttttgaaagtgtctgctttttttatccttaaaattcacctgtcagggaggcattaaaaatttggaaatgtatgccagcaaaatgtgagctctgtattttttggcattcttatgtttgggtttaataagattaagaaaatgatactgggaattttctttttcctgaaactttgaatcaccctagtaagtcaaagtactaaaaaatgtactagatcattaagacttatgtgctcttactgattgaaagattttttatgttttccttgtaataaaggacctaaaccgaaggtacctg

SEQ ID NO: 26473 - DNA, 1790 bp, Homo sapiens
  source 1..1790: mol_type = unassigned DNA
gcagatggtgctgtcgaccagtgtcaagaccaagtttcatgggttcctggacgctcagccaggggtagtctctgaagggccgcctggcaattgggagcagaagccagtttcccgccatctgctctccgtggaggcagtgctctcgcggctgctgcccgttggggtccagctgaggaaggagcgcggatcccaggctcgttctttgcctgggctgcccctgcggcccctggggcgggtgctgctgcggcgccagctccaagggcggatccaggcgggaggggcctcctcggagaagcggggcgcggtcccaactacgcagaggctggcacgccgaccctccacacctcaccacgcccccatctccgtccgtgtacacacactcacacaaggacgccaaccccacctagatgcaaagcaggattcaaaagaacatctttgcgttttctaccggctccccatcatcgtactagggaggaagaagcgggtgagaaacaaaacttctttccattgtcctgcccgtttctgcggacttgttctgaggccgaggcacctctaagatactgatggctctgcagaggacccattcattgcttctgcttttgctgctgaccctgctggggctggggctggtccagccctcctatggccaggatggcatgtaccagcgattcctgcggcaacacgtgcaccctgaggagacaggtggcagtgatcgctactgcaacttgatgatgcaaagacggaagatgactttgtatcactgcaagcgcttcaacaccttcatccatgaagatatctggaacattcgtagtatctgcagcaccaccaatatccaatgcaagaacggcaagatgaactgccatgagggtgtagtgaaggtcacagattgcagggacacaggaagttccagggcacccaactgcagatatcgggccatagcgagcactagacgtgttgtcattgcctgtgagggtaacccacaggtgcctgtgcactttgacggttagatgccaccatgtagggattatcgcgagtggttgaccttacacttactccttaaatagcagtgagtaatgcatttgagctgtcccaggctctgtctcctcagctcatttcctactctttttctctatataactcattctattaaatacattgcaccaaagagatatggagacataaacctgtaatgaatgaggctgggcttttctgtaataagcttccttttataatactggtcagcttagctctctcagatcctatcctgtggaatttagttattatgtgtatttatgtagtatttcaaacatttcaaaatgctttcatctatgtttatcacattttaataccacagcacttataatgatgtcactacatatagaagctcaaagttaagggatttgctgaagactgtaaagttaatggaagaattgagacaaaaatccagtgtagctggccacttatccagggctttttctacttcatcacaaggaatgttttgaaagtgtctgctttttttatccttaaaattcacctgtcagggaggcattaaaaatttggaaatgtatgccagcaaaatgtgagctctgtattttttggcattcttatgtttgggtttaataagattaagaaaatgatactgggaattttctttttcctgaaactttgaatcaccctagtaagtcaaagtactaaaaaatgtactagatcattaagacttatgtgctcttactgattgaaagattttttatgttttccttgtaataaaggacctaaaccgaaggtacctg

SEQ ID NO: 26474 - DNA, 634 bp, Homo sapiens
  source 1..634: mol_type = unassigned DNA
caagactcccccatgatgacctattcatccacctacctcctcactctgttccactgtctcccttaagagagatggcaccggccagagcaggatgctgccccctgctgctgctgcttctggggctgtgggtggcagaggtcctagtcagagccaagcccaaggacatgacatcatctcagtggtttaaaactcagcatgtgcagcccagccctcaagcatgcaactcagccatgagcatcatcaataagtacacagaacggtgcaaagacctcaacaccttcctgcacgagcccttctccagtgtggccatcacctgccagacccccaacatagcctgcaagaatagctgtaaaaactgccaccagagccacgggcccatgtccctgaccatgggtgagctcacctcagggaagtacccaaactgcaggtacaaagagaagcacctgaacacaccttacatagtggcctgtgaccctccacaacagggtgacccagggtacccacttgttcctgtgcacttggataaagttgtctaagccctggtgcccacgttccacctcacactctgcagactgtatgctgctgcttttcctccctccagttcgttattaatccttgctccccactgcaaatg

SEQ ID NO: 26475 - DNA, 1061 bp, Homo sapiens
  source 1..1061: mol_type = unassigned DNA
gttttcagtcatgttgtttctttaagttggtttagccttcctgtatacatgtgataatgatactgttttaaagaacaggtgtgaaagtctaagagtttaatccagactctgcacaagaagttaatctgccaaaccctaggattctccttctgaaagctcagaatatttcttccccttccctatacacacagggctcgaagggttagagaagaaaggcagacaacagcttctgagctttggactaatcacagcctctgttctcagcaggagccccaacactgagaccagaaaagatggtgctatgctttcctcttcttttactgctgctggttctatggggaccagtgtgtccacttcatgcttggcctaagcgtctcaccaaggctcactggtttgaaattcagcatatacagccaagtcctctccaatgcaacagggcaatgagtggcatcaacaattatacccagcactgtaagcatcaaaatacctttctgcatgactctttccagaatgtggctgctgtctgtgatttgctcagcattgtctgcaaaaatcgtcggcacaactgccaccagagctcaaagcctgtcaacatgactgactgcagactcacttcaggaaagtatccccagtgccgctatagtgctgctgcccagtacaaattcttcattgttgcctgtgacccccctcagaagagcgatcccccctacaagttggttcctgtacacttagatagtattctctaaggcatccactgcatttcctttcatttgacatagcttctgttacaattgcatccatgttttcttttcttttgttgattttcttgttcccgtagaagaaagaagaaaggtgtttggagaattcgagtgcctaggatgccagaccagagttgagacaaaaagaaataagattattttctgctttgtagttctgtacttttcgagagaagggaatagggaagacagcaaagaaagattcagatttctaaccctgcaacttttgccaagctttattgccctgtgttcacagcaataaaaccacttcctgctgcattctaa

SEQ ID NO: 26476 - DNA, 3586 bp, Homo sapiens
  source 1..3586: mol_type = unassigned DNA
ttagccaacggggcaaggggggcgggaaggaggtggggtttctcccagccaatcgacgggcgcgccctcgttgccgctctatgccgctccgccccggctcgctggtcccagaaggcgccgggtttcccaagatggcggcggacgtgtccgttactcaccggcccccgctgagccctaagtctggggccgaagtcgaagccggcgatgccgcggagcgccgggcgccggaagaagagctgccgcctctagatccagaagagatccggaaacgcctggaacacaccgagcgccagttccgtaaccgccgcaagatactgatccggggcctcccgggggacgtgaccaaccaggaagtacatgacctgctcagtgactatgagctcaaatactgttttgtggacaaatacaaagggacagccttcgtgaccctgctgaatggggagcaggccgaggccgcaatcaatgctttccaccagagccgcctgcgggagcgtgaactgtcggtgcagctgcagcccacggatgccctgctgtgtgtggccaacctgccccccagcctcacacagcagcagttcgaggagctggtgcggcccttcggcagcctggagcgctgcttcctggtctacagtgagcgcactggccaatccaagggctatggctttgctgagtacatgaagaaggactcggctgcccgtgccaagtcggacctgctgggcaagccgctgggaccacgcaccctctacgtgcactggacggatgccgggcaactgacgcctgcccttctccactcccgctgcctctgtgtggaccgcctgccacctggcttcaacgatgtggacgctctgtgccgggcgctgtcagctgtccacagccccaccttctgccagctggcgtgcggccaggatgggcagctgaagggcttcgcggtgctggagtatgagacggctgagatggcggaggaggcacagcagcaggcggacggcctgtccctggggggcagccacctgcgagtctccttctgcgcccctgggccccccggccgcagtatgctggccgctctcatcgctgcccaggccacggccctcaatcgggggaagggactcctccccgagcccaacatcctgcagctgctcaacaacctgggcccatccgcgtccctccagctgctgctcaaccccctgctccatggcagtgcgggggggaagcagggcctcctgggtgcccccccagccatgccgctgctcaatgggccagccctgtccacggcgctgttgcagctcgccctgcagacccagggccagaagaagcccggcatcctgggagactcacccctgggcgccctccagcctggggcccagccagccaaccccctcctcggggagctgcctgcaggagggggcctgcccccggagctgccgccccggcgagggaagccaccacccctgctgccatccgtgcttggccctgctgggggtgaccgggaggccctgggcttgggtcccccagcggcccagctcactcctccccccgcccctgtggggctccgaggctctggcctcagaggcctccagaaagacagtgggcctctgccgacgccccctggggtctcactgctgggggagccccccaaggactaccggattcccctgaatccctacctgaacctacacagcctgctcccggccagcaacctggcgggtaaggaggcccggggctggggaggcgccgggagaagccgccgcccagctgagggccccccaactaaccccccagcccctggaggtggcagcagcagcagcaaagccttccagctcaagtcccgcctgctcagccccctcagcagcgcccgcctgccccccgaaccaggactgtctgacagctacagcttcgactacccctcggacatgggacctcggcggctcttctcccacccacgggaaccagcccttgggcctcacggacccagccgacacaagatgtcccccccgcccagtggcttcggcgaacggagcagcggtgggagtggcgggggccccctgtctcacttctattcaggctcgcccacttcctacttcaccagcggcctgcaggctggcctcaagcagagccacctcagtaaggcaatcggctcttccccgctggggtccggagaagggctcctgggcctcagccccgggcctaatggtcacagccacctgctgaagaccccactgggcggccagaaacgcagctttgcccacctgctgccctcgcccgagcccagcccagaaggcagctatgtgggccagcactcccagggcctcggcggccactacgcggactcctacctgaagcggaagaggattttctaagtggctggcaccagagataactcaagggcctgcaccaaatcgcttttgggttttctgatgttttgttttgtgttttttttaaaccattttctctctttcggtaatagaaaaatctctgaaagactttactgaccaatcagccggagccccaggagcccaaggggtgtgggggagtctggaggcctcattatgtctctggcttgctccccacgctgaaaccctgcagccttaagagagaggggccccggcctgctctccctccctccccccatctcctcctccgctgtgcccgtctctccggagccctcctgcctcattgctcctgtaattttggcctttcgagtgccttggaggtttccctgacctcccgtgaagatacagagactgtctcctttttttttaactttgacaactgacttctgtttccttttctaagttttatttttcaaaccaccccggacagcccccagctctgattccttcaaggcccggcctgtccgggccaccattccacaccttgcggtttgaaacagctgtttttcccacatttgctgcaggcatggctgtctcctgcccctgcctgcccatctggcctataccccagccgtggggcccggggtccctgccgcagccccctccccttctgatgccttaaaagctgggccccaggccctgctggccagagccacagatgccaagctctgggagcttgactatggaccaaacagctctggcctagggattgggccaccctacccaggatctccaccctggggacagtagaaggggaaagccttcatcttggcgaaccggccccaccaccccctcctacccgggcctccgtgcagagatgggctttctctgccagtcccctgctgtctgtctgtgggagtcggacattgtgcccatctcccggagcctctgctgtcactcgcttgttgaagatgaattcttgaattctgcctgcccacccccggccagatccctggagctggcctccttccagcccagtgccagaaaccagcactccatgaagataaactctgggcccgcccaccagcaggacctgtcgacctgaggtgaccctgggccttgcccccagccaactgggccaccagcttccctcccttgactctgggggtccacatccactccaaggggactattcccccgaccccaccccagtctccccacacggacctttgctgaattaaagtttgtaagtaaatggtttt

SEQ ID NO: 26477 - DNA, 1952 bp, Homo sapiens
  source 1..1952: mol_type = unassigned DNA
ttagccaacggggcaaggggggcgggaaggaggtggggtttctcccagccaatcgacgggcgcgccctcgttgccgctctatgccgctccgccccggctcgctggtcccagaaggcgccgggtttcccaagatggcggcggacgtgtccgttactcaccggcccccgctgagccctaagtctggggccgaagtcgaagccggcgatgccgcggagcgccgggcgccggaagaagagctgccgcctctagatccagaagagatccggaaacgcctggaacacaccgagcgccagttccgtaaccgccgcaagatactgatccggggcctcccgggggacgtgaccaaccaggaagtacatgacctgctcagtgactatgagctcaaatactgttttgtggacaaatacaaagggacagccttcgtgaccctgctgaatggggagcaggccgaggccgcaatcaatgctttccaccagagccgcctgcgggagcgtgaactgtcggtgcagctgcagcccacggatgccctgctgtgtgtggccaacctgccccccagcctcacacagcagcagttcgaggagctggtgcggcccttcggcagcctggagcgctgcttcctggtctacagtgagcgcactggccaatccaagggctatggctttgctgagtacatgaagaaggactcggctgcccgtgccaagtcggacctgctgggcaagccgctgggaccacgcaccctctacgtgcactggacggatgccgggcaactgacgcctgcccttctccactcccgctgcctctgtgtggaccgcctgccacctggcttcaacgatgtggacgctctgtgccgggcgctgtcagctgtccacagccccaccttctgccagctggcgtgcggccaggatgggcagctgaagggcttcgcggtgctggagtatgagacggctgagatggcggaggaggcacagcagcaggcggacggcctgtccctggggggcagccacctgcgagtctccttctgcgcccctgggccccccggccgcagtatgctggccgctctcatcgctgcccaggccacggccctcaatcgggggaagggactcctccccgagcccaacatcctgcagctgctcaacaacctgggcccatccgcgtccctccagctgctgctcaaccccctgctccatggcagtgcgggggggaagcagggcctcctgggtgcccccccagccatgccgctgctcaatgggccagccctgtccacggcgctgttgcagctcgccctgcagacccagggccagaagaagcccggcatcctgggagactcacccctgggcgccctccagcctggggcccagccagccaaccccctcctcggggagctgcctgcaggagggggcctgcccccggagctgccgccccggcgagggaagccaccacccctgctgccatccgtgcttggccctgctgggggtgaccgggaggccctgggcttgggtcccccagcggcccagctcactcctccccccgcccctgtggggctccgaggctctggcctcagaggccccctgtctcacttctattcaggctcgcccacttcctacttcaccagcggcctgcaggctggcctcaagcagagccacctcagtaaggcaatcggctcttccccgctggggtccggagaagggctcctgggcctcagccccgggcctaatggtcacagccacctgctgaaggtacgggcagggggtggggacatgcagggctgggaagccccggccccccagcggcccctgacccgccccgccctgccctctgtctccagaccccactgggcggccagaaacgcagctttgcccacctgctgccctcgcccgagcccagcccagaaggcagctatgtgggccagcactcccagggcctcggcggccactacgcggactcctacctga

SEQ ID NO: 26478 - DNA, 4398 bp, Homo sapiens
  source 1..4398: mol_type = unassigned DNA
cccgggcctcctcccgctttctctctccgcttcccctggagcctccgaggagtccgcagccgctgggcgcccgggaagatggcggcggcggcgggagacggcggcggcgaggggggcgcgggcctgggcagcgcggcggggctggggccggggccggggctgcgcgggcagggcccctcagccgaagcgcacgagggcgccccggacccgatgcccgccgcgctgcaccctgaggaggtcgccgcgcgactgcagcggatgcagcgggagctgagcaaccgcaggaaaatcctggtgaaaaacctgccccaggacagcaactgccaggaagttcatgatttgttaaaagactatgacttaaaatattgttatgtggacagaaataaacgaacagcttttgttaccttattgaatggggaacaagcccagaacgcaattcagatgtttcatcaatattcttttagaggaaaagacttaatagtccagcttcagccaacagatgctttgttgtgtattaccaacgtgcccatttcttttacatcagaagagtttgaagaacttgttcgtgcttatggaaatattgagagatgttttctggtctatagtgaagttactggccattccaaaggctatggatttgtggaatacatgaaaaaggactttgctgcaaaggctagactggagctattgggtagacagttgggagcatcagcactctttgcacaatggatggatgttaatctattggcttcagagctcattcattctaagtgcctttgtattgataaactccccagtgactacagggattcagaagagctgttgcaaattttttccagtgtccataaacctgtgttttgccagcttgcacaggatgaaggtagttacgttggtggctttgcagtggttgaatatagcactgcggagcaggctgaagaggtccagcaggcagcagacggtatgaccatcaagggcagcaaagtccaggtttccttctgtgctcctggagcgccagggcgaagtacattagcagcattgatagcggctcaacgtgtgatgcacagtaatcaaaagggcttacttccagagccaaatccagtacaaattatgaaaagtttaaacaaccctgccatgttgcaagttcttctacagccccagttatgtggacgagctgttaaaccagccgttcttggaacacctcacagcttgccacatctgatgaatccatccatctctcctgcatttttacatttgaataaagcacatcagagctcagttatgggtaatacttctaatttattccttcagaatctttctcatataccactggcacaacaacaattaatgaagtttgagaatattcatactaataataaacccggcttacttggagagcccccagctgtggtacttcagactgcactagggatagggtcagtgcttccattgaaaaaggagttgggacatcatcatggagaagcacataaaacatctagcctgattccaactcaaacaacgataacagctggaatgggcatgttaccattctttccaaatcagcacattgctggacaggctgggccagggcacagtaatactcaggagaaacagccagccacggtgggaatggcagaaggaaatttctcagggtcgcagccttatcttcagagctttccaaaccttgctgctggaagcttgctggtgggacaccataagcagcagcaaagccagccaaaaggcacagagataagttcaggggctgcctctaagaatcaaacttcactcttgggagaaccaccaaaagaaattcggctcagtaaaaatccatacttgaatttggcaagtgtgttgcccagtgtgtgcttatcatcccctgcaagtaaaaccactcttcataagactggaattgcaagcagcattctggatgcaatctctcagggaagtgaatcacaacacgcattggaaaagtgcattgcttattctccaccttttggtgattatgcacaggtgtcatctttaagaaatgaaaagcgaggctcatcatatctcatctctgccccagaaggtggttcagtggaatgtgttgaccagcattctcagggcacaggagcatattacatggaaacttacttaaaaaagaagcgagtatactgagttaagctctctcctaataaccccctaaggttctctgcagtatctctgctgttcatcgctgccttaacttcattcaaactagccatatcctttaaatacgggtttatagtttcccagaaggaactgtgttgtgcagcaggcagaaatgccaaataaaaaatagcaataagaagagacatcaattgaggacattttccactagagtcagatgcatcttaatcagtgtgctaacttacaatccattggagaaactaacaatgttccaatattccttgatttaggactgggaataattctgacaccatatataaaagaagtttgaagcaataaatgggaaacagtgttgtttcctgagccttagaagaatgagtttcttataagccaatgtgcatttcaatttactttccctagaagtaattgcatttatagatttttaggacttttcctagaactacaagggtgcaagtaccaaatgtgctgatggtaatattataaagatgctctacatgcacactcaattacgcccacaccagccatgcaaaattaaacccggtaagagagtgacagtgatatccaaggtatccactactaccgatgctttaagatgttgtttaccatttataccttctgtgaaaaatagaaggtattttaagaaaagtaactttggtgatctaataaaagggtttggcaaactacaccctgggtccacatttggtctaccacccgcttttgtgctgcctgcaagctaagactaatgtttacatttttaaatggttggaggaaaaaagaaaacttatgacatgaaatttatatgaaattcagatttcagtgtccataaataaacttttattgggacgttgccatgctcattcatttacgtgttgtctgtggcactcttacgctacaagggcagaactgattagcttcaacagagactgtatggcctacaaagaccatatggcctaaaatttcaagtatctggccatttatatatagtttgctgatccctgatctaatagcactaattctaatagcaactattcctttcaattcacctaaagacagacctttagcctttagacagacttgtaagtggaaaggaacatgggtttctgtgctcatttcatagcgtagactagtaatgatctaatgactagaatggggcctattttgatcactaaatgccctattatttccacaatatagtatagtaaagcagtcaatactgcactttctgatggagtcttaaggagtcacagtatttataaccattttgagctaataagctatacctcactctctgctttctctctcactctttttgatagtgtgttagggtgaaaaatcagttatttaacccaatttacttgtgaaagaagttttatctttatggactatgatgacttttgacatcaccatttcttgaagaccttggtattaaatgcatgagaaaccttttgccatctagaaatttctaagtttgtttatgttataagactgtaattaattgatagggaatttgggatctcaatccggggctttttgaaatcagatcattaaatatctcgtcactttggggacttgttatttttaactatgatgtggatatcctgttttaattatgaagtctagaattggtacatatgttgtatgctttgtaaagaatttcacttggtctaatttattgcatatactagcttctgttggaaaatgactgacagctagaaagtttaaggtaatttctaagtatactacctataagtaactgataagaattaggcatcattcagtgatatagcagatgactaatgggtttttcaggccctgcacttctctttcccattttcctgttgcattcagcctcttcaatgcttagtcacacctccactatagtacaaacaaacaaacaaacagaagaaaggaaagatggtgaattttgcaacagagctgcaaaaagtcagtcagtcaaagcaggaagaggttgaaggaactaaaacaaacaaacaaaggtgtctggactacagcacagtggacatgccatccatactggcctgtgccccgttatcaatcactgggcacaacagtgaagaagtgcaaatcaagtggtgtttgtttgtttgttagtagtaaggaccgtaacccaccccttcctccccccaaaactatactgttatttttctatgtaagcaaattgtttgaaatgctttgaaaatgaaatcttaatattaaaaggcatatgcatgt

SEQ ID NO: 26479 - DNA, 4362 bp, Homo sapiens
  source 1..4362: mol_type = unassigned DNA
cccgggcctcctcccgctttctctctccgcttcccctggagcctccgaggagtccgcagccgctgggcgcccgggaagatggcggcggcggcgggagacggcggcggcgaggggggcgcgggcctgggcagcgcggcggggctggggccggggccggggctgcgcgggcagggcccctcagccgaagcgcacgagggcgccccggacccgatgcccgccgcgctgcaccctgaggaggtcgccgcgcgactgcagcggatgcagcgggagctgagcaaccgcaggaaaatcctggtgaaaaacctgccccaggacagcaactgccaggaagttcatgatttgttaaaagactatgacttaaaatattgttatgtggacagaaataaacgaacagcttttgttaccttattgaatggggaacaagcccagaacgcaattcagatgtttcatcaatattcttttagaggaaaagacttaatagtccagcttcagccaacagatgctttgttgtgtattaccaacgtgcccatttcttttacatcagaagagtttgaagaacttgttcgtgcttatggaaatattgagagatgttttctggtctatagtgaagttactggccattccaaaggctatggatttgtggaatacatgaaaaaggactttgctgcaaaggctagactggagctattgggtagacagttgggagcatcagcactctttgcacaatggatggatgttaatctattggcttcagagctcattcattctaagtgcctttgtattgataaactccccagtgactacagggattcagaagagctgttgcaaattttttccagtgtccataaacctgtgttttgccagcttgcacaggatgaaggtagttacgttggtggctttgcagtggttgaatatagcactgcggagcaggctgaagaggtccagcaggcagcagacggtatgaccatcaagggcagcaaagtccaggtttccttctgtgctcctggagcgccagggcgaagtacattagcagcattgatagcggctcaacgtgtgatgcacagtaatcaaaagggcttacttccagagccaaatccagtacaaattatgaaaagtttaaacaaccctgccatgttgcaagttcttctacagccccagttatgtggacgagctgttaaaccagccgttcttggaacacctcacagcttgccacatctgatgaatccatccatctctcctgcatttttacatttgaataaagcacatcagaatctttctcatataccactggcacaacaacaattaatgaagtttgagaatattcatactaataataaacccggcttacttggagagcccccagctgtggtacttcagactgcactagggatagggtcagtgcttccattgaaaaaggagttgggacatcatcatggagaagcacataaaacatctagcctgattccaactcaaacaacgataacagctggaatgggcatgttaccattctttccaaatcagcacattgctggacaggctgggccagggcacagtaatactcaggagaaacagccagccacggtgggaatggcagaaggaaatttctcagggtcgcagccttatcttcagagctttccaaaccttgctgctggaagcttgctggtgggacaccataagcagcagcaaagccagccaaaaggcacagagataagttcaggggctgcctctaagaatcaaacttcactcttgggagaaccaccaaaagaaattcggctcagtaaaaatccatacttgaatttggcaagtgtgttgcccagtgtgtgcttatcatcccctgcaagtaaaaccactcttcataagactggaattgcaagcagcattctggatgcaatctctcagggaagtgaatcacaacacgcattggaaaagtgcattgcttattctccaccttttggtgattatgcacaggtgtcatctttaagaaatgaaaagcgaggctcatcatatctcatctctgccccagaaggtggttcagtggaatgtgttgaccagcattctcagggcacaggagcatattacatggaaacttacttaaaaaagaagcgagtatactgagttaagctctctcctaataaccccctaaggttctctgcagtatctctgctgttcatcgctgccttaacttcattcaaactagccatatcctttaaatacgggtttatagtttcccagaaggaactgtgttgtgcagcaggcagaaatgccaaataaaaaatagcaataagaagagacatcaattgaggacattttccactagagtcagatgcatcttaatcagtgtgctaacttacaatccattggagaaactaacaatgttccaatattccttgatttaggactgggaataattctgacaccatatataaaagaagtttgaagcaataaatgggaaacagtgttgtttcctgagccttagaagaatgagtttcttataagccaatgtgcatttcaatttactttccctagaagtaattgcatttatagatttttaggacttttcctagaactacaagggtgcaagtaccaaatgtgctgatggtaatattataaagatgctctacatgcacactcaattacgcccacaccagccatgcaaaattaaacccggtaagagagtgacagtgatatccaaggtatccactactaccgatgctttaagatgttgtttaccatttataccttctgtgaaaaatagaaggtattttaagaaaagtaactttggtgatctaataaaagggtttggcaaactacaccctgggtccacatttggtctaccacccgcttttgtgctgcctgcaagctaagactaatgtttacatttttaaatggttggaggaaaaaagaaaacttatgacatgaaatttatatgaaattcagatttcagtgtccataaataaacttttattgggacgttgccatgctcattcatttacgtgttgtctgtggcactcttacgctacaagggcagaactgattagcttcaacagagactgtatggcctacaaagaccatatggcctaaaatttcaagtatctggccatttatatatagtttgctgatccctgatctaatagcactaattctaatagcaactattcctttcaattcacctaaagacagacctttagcctttagacagacttgtaagtggaaaggaacatgggtttctgtgctcatttcatagcgtagactagtaatgatctaatgactagaatggggcctattttgatcactaaatgccctattatttccacaatatagtatagtaaagcagtcaatactgcactttctgatggagtcttaaggagtcacagtatttataaccattttgagctaataagctatacctcactctctgctttctctctcactctttttgatagtgtgttagggtgaaaaatcagttatttaacccaatttacttgtgaaagaagttttatctttatggactatgatgacttttgacatcaccatttcttgaagaccttggtattaaatgcatgagaaaccttttgccatctagaaatttctaagtttgtttatgttataagactgtaattaattgatagggaatttgggatctcaatccggggctttttgaaatcagatcattaaatatctcgtcactttggggacttgttatttttaactatgatgtggatatcctgttttaattatgaagtctagaattggtacatatgttgtatgctttgtaaagaatttcacttggtctaatttattgcatatactagcttctgttggaaaatgactgacagctagaaagtttaaggtaatttctaagtatactacctataagtaactgataagaattaggcatcattcagtgatatagcagatgactaatgggtttttcaggccctgcacttctctttcccattttcctgttgcattcagcctcttcaatgcttagtcacacctccactatagtacaaacaaacaaacaaacagaagaaaggaaagatggtgaattttgcaacagagctgcaaaaagtcagtcagtcaaagcaggaagaggttgaaggaactaaaacaaacaaacaaaggtgtctggactacagcacagtggacatgccatccatactggcctgtgccccgttatcaatcactgggcacaacagtgaagaagtgcaaatcaagtggtgtttgtttgtttgttagtagtaaggaccgtaacccaccccttcctccccccaaaactatactgttatttttctatgtaagcaaattgtttgaaatgctttgaaaatgaaatcttaatattaaaaggcatatgcatgtaaa

SEQ ID NO: 26480 - DNA, 893 bp, Homo sapiens
  source 1..893: mol_type = unassigned DNA
ccagtgtccataaacctgtgttttgccagcttgcacaggatgaaggtagttacgttggtggctttgcagtggttgaatatagcactgcggagcaggctgaagaggtccagcaggcagcagacggtatgaccatcaagggcagcaaagtccaggtttccttctgtgctcctggagcgccagggcgaagtacattagcagcattgatagcggctcaacgtgtgatgcacagtaatcaaaagggcttacttccagagccaaatccagtacaaattatgaaaagtttaaacaaccctgccatgttgcaagttcttctacagccccagttatgtggacgagctgttaaaccagccgttcttggaacacctcacagcttgccacatctgatgaatccatccatctctcctgcatttttacatttgaataaagcacatcagaatcaaacttcactcttgggagaaccaccaaaagaaattcggctcagtaaaaatccatacttgaatttggcaagtgtgttgcccagtgtgtgcttatcatcccctgcaagtaaaaccactcttcataagactggaattgcaagcagcattctggatgcaatctctcagggaagtgaatcacaacacgcattggaaaagtgcattgcttattctccaccttttggtgattatgcacaggtgtcatctttaagaaatgaaaagcgaggctcatcatatctcatctctgccccagaaggtggttcagtggaatgtgttgaccagcattctcagggcacaggagcatattacatggaaacttacttaaaaaagaagcgagtatactgagttaagctctctcctaataaccccctaaggttctctgcagtatctctgctgttcatcgctgccttaacttcattc

SEQ ID NO: 26481 - DNA, 3076 bp, Homo sapiens
  source 1..3076: mol_type = unassigned DNA
gtcacgggtggcgggcgcgggaaggggatttggattgttgcgcctctgctctgaagaaagtgctgtctggctccaactccagttctttcccctgagcagcgcctggaacctaacccttcccactctgtcaccttctcgatcccgccggcgctttagagccgcagtccagtcttggatccttcagagcctcagccactagctgcgatgcatgtgatcaagcgagatggccgccaagaacgagtcatgtttgacaaaattacatctcgaatccagaagctttgttatggactcaatatggattttgttgatcctgctcagatcaccatgaaagtaatccaaggcttgtacagtggggtcaccacagtggaactagatactttggctgctgaaacagctgcaaccttgactactaagcaccctgactatgctatcctggcagccaggatcgctgtctctaacttgcacaaagaaacaaagaaagtgttcagtgatgtgatggaagacctctataactacataaatccacataatggcaaacactctcccatggtggccaagtcaacattggatattgttctggccaataaagatcgcctgaattctgctattatctatgaccgagatttctcttacaattacttcggctttaagacgctagagcggtcttatttgttgaagatcaatggaaaagtggctgaaagaccacaacatatgttgatgagagtatctgttgggatccacaaagaagacattgatgcagcaattgaaacatataatcttctttctgagaggtggtttactcatgcttcgcccactctcttcaatgctggtaccaaccgcccacaactttctagctgttttcttctgagtatgaaagatgacagcattgaaggcatttatgacactctaaagcaatgtgcattgatttctaagtctgctggaggaattggtgttgctgtgagttgtattcgggctactggcagctacattgctgggactaatggcaattccaatggccttgtaccgatgctgagagtatataacaacacagctcgatatgtggatcaaggtgggaacaagcgtcctggggcatttgctatttacctggagccttggcatttagacatctttgaattccttgatttaaagaagaacacaggaaaggaagagcagcgtgccagagatcttttctttgctctttggattccggatctcttcatgaaacgagtggagactaatcaggactggtctttgatgtgtccaaatgagtgtcctggtctggatgaggtttggggagaggaatttgagaaactatatgcaagttatgagaaacaaggtcgtgtccgcaaagttgtaaaagctcagcagctttggtatgccatcattgagtctcagacggaaacaggcaccccgtatatgctctacaaagattcctgtaatcgaaagagcaaccagcagaacctgggaaccatcaaatgcagcaacctgtgcacagaaatagtggagtacaccagcaaagatgaggttgctgtttgtaatttggcttccctggccctgaatatgtatgtcacatcagaacacacatacgactttaagaagttggctgaagtcactaaagtcgttgtccgaaacttgaataaaattattgatataaactactatcctgtaccagaggcatgcctatcaaataaacgccatcgccccattggaattggggtacaaggtctggcagatgcttttatcctgatgagatacccttttgagagtgcagaagcccagttactgaataagcagatctttgaaactatttattatggtgctctggaagccagctgtgaccttgccaaggagcagggcccatacgaaacctatgagggctctccagttagcaaaggaattcttcagtatgatatgtggaatgttactcctacagacctatgggactggaaggttctcaaggagaagattgcaaagtatggtataagaaacagtttacttattgccccgatgcctacagcttccactgctcagatcctggggaataatgagtccattgaaccttacaccagcaacatctatactcgcagagtcttgtcaggagaatttcagattgtaaatcctcacttattgaaagatcttaccgagcggggcctatggcatgaagagatgaaaaaccagattattgcatgcaatggctctattcagagcataccagaaattcctgatgacctgaagcaactttataaaactgtgtgggaaatctctcagaaaactgttctcaagatggcagctgagagaggtgctttcattgatcaaagccaatctttgaacatccacattgctgagcctaactatggcaaactcactagtatgcacttctacggctggaagcagggtttgaagactgggatgtattatttaaggacaagaccagcggctaatccaatccagttcactctaaataaggagaagctaaaagataaagaaaaggtatcaaaagaggaagaagagaaggagaggaacacagcagccatggtgtgctctttggagaatagagatgaatgtctgatgtgtggatcctgaggaaagacttggaagagaccagcatgtcttcagtagccaaactacttcttgagcatagataggtatagtgggtttgcttgaggtggtaaggctttgctggaccctgttgcaggcaaaaggagtaattgatttaaagtactgttaatgatgataatgattttttttttaaactcatatattgggattttcaccaaaataatgcttttgaaaaaaagaaaaaaaaaacggatatattgagaatcaaagtagaagttttaggaatgcaaaataagtcatcttgcatacagggagtggttaagtaaggtttcatcacccctttagcactgcttttctgaagacttcagttttgttaaggagatttagttttactgctttgactggtgggtctctagaagcaaaactgagtgataactcatgagaagtactgataggacctttatctggatatggtcctataggttattctgaaataaagataaacatttctaagtga

SEQ ID NO: 26482 - DNA, 2863 bp, Homo sapiens
  source 1..2863: mol_type = unassigned DNA
ttgttgcgcctctgctctgaagaaagtgctgtctggctccaactccagttctttcccctgagcagcgcctggaacctaacccttcccactctgtcaccttctcgatcccgccggcgctttagagccgcagtccagtcttggatccttcagagcctcagccactagctgcgatgcatgtgatcaagcgagatggccgccaagaacgagtcatgtttgacaaaattacatctcgaatccagaagctttgttatggactcaatatggattttgttgatcctatgtgatggaagacctctataactacataaatccacataatggcaaacactctcccatggtggccaagtcaacattggatattgttctggccaataaagatcgcctgaattctgctattatctatgaccgagatttctcttacaattacttcggctttaagacgctagagcggtcttatttgttgaagatcaatggaaaagtggctgaaagaccacaacatatgttgatgagagtatctgttgggatccacaaagaagacattgatgcagcaattgaaacatataatcttctttctgagaggtggtttactcatgcttcgcccactctcttcaatgctggtaccaaccgcccacaactttctagctgttttcttctgagtatgaaagatgacagcattgaaggcatttatgacactctaaagcaatgtgcattgatttctaagtctgctggaggaattggtgttgctgtgagttgtattcgggctactggcagctacattgctgggactaatggcaattccaatggccttgtaccgatgctgagagtatataacaacacagctcgatatgtggatcaaggtgggaacaagcgtcctggggcatttgctatttacctggagccttggcatttagacatctttgaattccttgatttaaagaagaacacaggaaaggaagagcagcgtgccagagatcttttctttgctctttggattccggatctcttcatgaaacgagtggagactaatcaggactggtctttgatgtgtccaaatgagtgtcctggtctggatgaggtttggggagaggaatttgagaaactatatgcaagttatgagaaacaaggtcgtgtccgcaaagttgtaaaagctcagcagctttggtatgccatcattgagtctcagacggaaacaggcaccccgtatatgctctacaaagattcctgtaatcgaaagagcaaccagcagaacctgggaaccatcaaatgcagcaacctgtgcacagaaatagtggagtacaccagcaaagatgaggttgctgtttgtaatttggcttccctggccctgaatatgtatgtcacatcagaacacacatacgactttaagaagttggctgaagtcactaaagtcgttgtccgaaacttgaataaaattattgatataaactactatcctgtaccagaggcatgcctatcaaataaacgccatcgccccattggaattggggtacaaggtctggcagatgcttttatcctgatgagatacccttttgagagtgcagaagcccagttactgaataagcagatctttgaaactatttattatggtgctctggaagccagctgtgaccttgccaaggagcagggcccatacgaaacctatgagggctctccagttagcaaaggaattcttcagtatgatatgtggaatgttactcctacagacctatgggactggaaggttctcaaggagaagattgcaaagtatggtataagaaacagtttacttattgccccgatgcctacagcttccactgctcagatcctggggaataatgagtccattgaaccttacaccagcaacatctatactcgcagagtcttgtcaggagaatttcagattgtaaatcctcacttattgaaagatcttaccgagcggggcctatggcatgaagagatgaaaaaccagattattgcatgcaatggctctattcagagcataccagaaattcctgatgacctgaagcaactttataaaactgtgtgggaaatctctcagaaaactgttctcaagatggcagctgagagaggtgctttcattgatcaaagccaatctttgaacatccacattgctgagcctaactatggcaaactcactagtatgcacttctacggctggaagcagggtttgaagactgggatgtattatttaaggacaagaccagcggctaatccaatccagttcactctaaataaggagaagctaaaagataaagaaaaggtatcaaaagaggaagaagagaaggagaggaacacagcagccatggtgtgctctttggagaatagagatgaatgtctgatgtgtggatcctgaggaaagacttggaagagaccagcatgtcttcagtagccaaactacttcttgagcatagataggtatagtgggtttgcttgaggtggtaaggctttgctggaccctgttgcaggcaaaaggagtaattgatttaaagtactgttaatgatgataatgattttttttttaaactcatatattgggattttcaccaaaataatgcttttgaaaaaaagaaaaaaaaaacggatatattgagaatcaaagtagaagttttaggaatgcaaaataagtcatcttgcatacagggagtggttaagtaaggtttcatcacccctttagcactgcttttctgaagacttcagttttgttaaggagatttagttttactgctttgactggtgggtctctagaagcaaaactgagtgataactcatgagaagtactgataggacctttatctggatatggtcctataggttattctgaaataaagataaacatttctaagtg

SEQ ID NO: 26483 - DNA, 2325 bp, Homo sapiens
  source 1..2325: mol_type = unassigned DNA
gatggccgccaagaacgagtcatgtttgacaaaattacatctcgaatccagaagctttgttatggactcaatatggattttgttgatcctgctcagatcaccatgaaagtaatccaaggcttgtacagtggggtcaccacagtggaactagatactttggctgctgaaacagctgcaaccttaaaaacgctagagcggtcttatttgttgaagatcaatggaaaagtggctgaaagaccacaacatatgttgatgagagtatctgttgggatccacaaagaagacattgatgcagcaattgaaacatataatcttctttctgagaggtggtttactcatgcttcgcccactctcttcaatgctggtaccaaccgcccacaactttctagctgttttcttctgagtatgaaagatgacagcattgaaggcatttatgacactctaaagcaatgtgcattgatttctaagtctgctggaggaattggtgttgctgtgagttgtattcgggctactggcagctacattgctgggactaatggcaattccaatggccttgtaccgatgctgagagtatataacaacacagctcgatatgtggatcaaggtgggaacaagcgtcctggggcatttgctatttacctggagccttggcatttagacatctttgaattccttgatttaaagaagaacacaggaaaggaagagcagcgtgccagagatcttttctttgctctttggattccggatctcttcatgaaacgagtggagactaatcaggactggtctttgatgtgtccaaatgagtgtcctggtctggatgaggtttggggagaggaatttgagaaactatatgcaagttatgagaaacaaggtcgtgtccgcaaagttgtaaaagctcagcagctttggtatgccatcattgagtctcagacggaaacaggcaccccgtatatgctctacaaagattcctgtaatcgaaagagcaaccagcagaacctgggaaccatcaaatgcagcaacctgtgcacagaaatagtggagtacaccagcaaagatgaggttgctgtttgtaatttggcttccctggccctgaatatgtatgtcacatcagaacacacatacgactttaagaagttggctgaagtcactaaagtcgttgtccgaaacttgaataaaattattgatataaactactatcctgtaccagaggcatgcctatcaaataaacgccatcgccccattggaattggggtacaaggtctggcagatgcttttatcctgatgagatacccttttgagagtgcagaagcccagttactgaataagcagatctttgaaactatttattatggtgctctggaagccagctgtgaccttgccaaggagcagggcccatacgaaacctatgagggctctccagttagcaaaggaattcttcagtatgatatgtggaatgttactcctacagacctatgggactggaaggttctcaaggagaagattgcaaagtatggtataagaaacagtttacttattgccccgatgcctacagcttccactgctcagatcctggggaataatgagtccattgaaccttacaccagcaacatctatactcgcagagtcttgtcaggagaatttcagattgtaaatcctcacttattgaaagatcttaccgagcggggcctatggcatgaagagatgaaaaaccagattattgcatgcaatggctctattcagagcataccagaaattcctgatgacctgaagcaactttataaaactgtgtgggaaatctctcagaaaactgttctcaagatggcagctgagagaggtgctttcattgatcaaagccaatctttgaacatccacattgctgagcctaactatggcaaactcactagtatgcacttctacggctggaagcagggtttgaagactgggatgtattatttaaggacaagaccagcggctaatccaatccagttcactctaaataaggagaagctaaaagataaagaaaaggtatcaaaagaggaagaagagaaggagaggaacacagcagccatggtgtgctctttggagaatagagatgaatgtctgatgtgtggatcctgaggaaagacttggaagagaccagcatgtcttcagtagccaaactacttcttgagcatagataggtatagtgggtttgcttgaggtggtaaggctttgctggaccctgttgcaggcaaaaggagtaattgatttaaagtactgttaatgatgataatgattttttttttaaactcatatattgggattttcaccaaaataatgcttttg

SEQ ID NO: 26484 - DNA, 2381 bp, Homo sapiens
  source 1..2381: mol_type = unassigned DNA
aaatgctgagtcagggtgtccgaggtggcgatcgccatcttggagtcttcaccggagtccaatcactgtgaaccaaaaacgaagtcaaataacaagtttcacactttgggaggccaagctgttttcttctgagtatgaaagatgacagcattgaaggcatttatgacactctaaagcaatgtgcattgatttctaagtctgctggaggaattggtgttgctgtgagttgtattcgggctactggcagctacattgctgggactaatggcaattccaatggccttgtaccgatgctgagagtatataacaacacagctcgatatgtggatcaaggtgggaacaaggtatgctccatgaattgaaagtactggaaatcagaactaaagcgtcctggggcatttgctatttacctggagccttggcatttagacatctttgaattccttgatttaaagaagaacacaggaaaggaagagcagcgtgccagagatcttttctttgctctttggattccggatctcttcatgaaacgagtggagactaatcaggactggtctttgatgtgtccaaatgagtgtcctggtctggatgaggtttggggagaggaatttgagaaactatatgcaagttatgagaaacaaggtcgtgtccgcaaagttgtaaaagctcagcagctttggtatgccatcattgagtctcagacggaaacaggcaccccgtatatgctctacaaagattcctgtaatcgaaagagcaaccagcagaacctgggaaccatcaaatgcagcaacctgtgcacagaaatagtggagtacaccagcaaagatgaggttgctgtttgtaatttggcttccctggccctgaatatgtatgtcacatcagaacacacatacgactttaagaagttggctgaagtcactaaagtcgttgtccgaaacttgaataaaattattgatataaactactatcctgtaccagaggcatgcctatcaaataaacgccatcgccccattggaattggggtacaaggtctggcagatgcttttatcctgatgagatacccttttgagagtgcagaagcccagttactgaataagcagatctttgaaactatttattatggtgctctggaagccagctgtgaccttgccaaggagcagggcccatacgaaacctatgagggctctccagttagcaaaggaattcttcagtatgatatgtggaatgttactcctacagacctatgggactggaaggttctcaaggagaagattgcaaagtatggtataagaaacagtttacttattgccccgatgcctacagcttccactgctcagatcctggggaataatgagtccattgaaccttacaccagcaacatctatactcgcagagtcttgtcaggagaatttcagattgtaaatcctcacttattgaaagatcttaccgagcggggcctatggcatgaagagatgaaaaaccagattattgcatgcaatggctctattcagagcataccagaaattcctgatgacctgaagcaactttataaaactgtgtgggaaatctctcagaaaactgttctcaagatggcagctgagagaggtgctttcattgatcaaagccaatctttgaacatccacattgctgagcctaactatggcaaactcactagtatgcacttctacggctggaagcagggtttgaagactgggatgtattatttaaggacaagaccagcggctaatccaatccagttcactctaaataaggagaagctaaaagataaagaaaaggtatcaaaagaggaagaagagaaggagaggaacacagcagccatggtgtgctctttggagaatagagatgaatgtctgatgtgtggatcctgaggaaagacttggaagagaccagcatgtcttcagtagccaaactacttcttgagcatagataggtatagtgggtttgcttgaggtggtaaggctttgctggaccctgttgcaggcaaaaggagtaattgatttaaagtactgttaatgatgataatgattttttttttaaactcatatattgggattttcaccaaaataatgcttttgaaaaaaagaaaaaaaaaacggatatattgagaatcaaagtagaagttttaggaatgcaaaataagtcatcttgcatacagggagtggttaagtaaggtttcatcacccctttagcactgcttttctgaagacttcagttttgttaaggagatttagttttactgctttgactggtgggtctctagaagcaaaactgagtgataactcatgagaagtactgataggacctttatctggatatggtcctataggttattctgaaataaagataaacatttctaagtg

SEQ ID NO: 26485 - DNA, 3673 bp, Homo sapiens
  source 1..3673: mol_type = unassigned DNA
gctcctcacgcaatcctaaacggttcccgggcgaaccggggcccgcgcgcgccaaggccgccgagaccctcaggggctgcggccctggtcccgcgggacctgtgggggcctgggcggcggcgcccccgacccagccagcggacgggccggggggggaaccgggaggtcccggggggcgtccacgggggtgtccccgggggtctccggaaggcgccggcggaggctcccgcgctgcgcttgaaaatcgcgcgcggccccgcggccagcctgggtaggggcaaggcgcagccaatgggaagggtcggaggcatggcacagccaatgggaagggccggggcaccaaagccaatgggaagggccgggagcgcgcggcgcgggagatttaaaggctgctggagtgaggggtcgcccgtgcaccctgtcccagccgtcctgtcctggctgctcgctctgcttcgctgcgcctccactatgctctccctccgtgtcccgctcgcgcccatcacggacccgcagcagctgcagctctcgccgctgaaggggctcagcttggtcgacaaggagaacacgccgccggccctgagcgggacccgcgtcctggccagcaagaccgcgaggaggatcttccaggagcccacggagccgaaaactaaagcagctgcccccggcgtggaggatgagccgctgctgagagaaaacccccgccgctttgtcatcttccccatcgagtaccatgatatctggcagatgtataagaaggcagaggcttccttttggaccgccgaggaggtggacctctccaaggacattcagcactgggaatccctgaaacccgaggagagatattttatatcccatgttctggctttctttgcagcaagcgatggcatagtaaatgaaaacttggtggagcgatttagccaagaagttcagattacagaagcccgctgtttctatggcttccaaattgccatggaaaacatacattctgaaatgtatagtcttcttattgacacttacataaaagatcccaaagaaagggaatttctcttcaatgccattgaaacgatgccttgtgtcaagaagaaggcagactgggccttgcgctggattggggacaaagaggctacctatggtgaacgtgttgtagcctttgctgcagtggaaggcattttcttttccggttcttttgcgtcgatattctggctcaagaaacgaggactgatgcctggcctcacattttctaatgaacttattagcagagatgagggtttacactgtgattttgcttgcctgatgttcaaacacctggtacacaaaccatcggaggagagagtaagagaaataattatcaatgctgttcggatagaacaggagttcctcactgaggccttgcctgtgaagctcattgggatgaattgcactctaatgaagcaatacattgagtttgtggcagacagacttatgctggaactgggttttagcaaggttttcagagtagagaacccatttgactttatggagaatatttcactggaaggaaagactaacttctttgagaagagagtaggcgagtatcagaggatgggagtgatgtcaagtccaacagagaattcttttaccttggatgctgacttctaaatgaactgaagatgtgcccttacttggctgattttttttttccatctcataagaaaaatcagctgaagtgttaccaactagccacaccatgaattgtccgtaatgttcattaacagcatctttaaaactgtgtagctacctcacaaccagtcctgtctgtttatagtgctggtagtatcaccttttgccagaaggcctggctggctgtgacttaccatagcagtgacaatggcagtcttggctttaaagtgaggggtgaccctttagtgagcttagcacagcgggattaaacagtcctttaaccagcacagccagttaaaagatgcagcctcactgcttcaacgcagattttaatgtttacttaaatataaacctggcactttacaaacaaataaacattgtttgtactcacaaggcgataatagcttgatttatttggtttctacaccaaatacattctcctgaccactaatgggagccaattcacaattcactaagtgactaaagtaagttaaacttgtgtagactaagcatgtaatttttaagttttattttaatgaattaaaatatttgttaaccaactttaaagtcagtcctgtgtatacctagatattagtcagttggtgccagatagaagacaggttgtgtttttatcctgtggcttgtgtagtgtcctgggattctctgccccctctgagtagagtgttgtgggataaaggaatctctcagggcaaggagcttcttaagttaaatcactagaaatttaggggtgatctgggccttcatatgtgtgagaagccgtttcattttatttctcactgtattttcctcaacgtctggttgatgagaaaaaattcttgaagagttttcatatgtgggagctaaggtagtattgtaaaatttcaagtcatccttaaacaaaatgatccacctaagatcttgcccctgttaagtggtgaaatcaactagaggtggttcctacaagttgttcattctagttttgtttggtgtaagtaggttgtgtgagttaattcatttatatttactatgtctgttaaatcagaaattttttattatctatgttcttctagattttacctgtagttcatacttcagtcacccagtgtcttattctggcattgtctaaatctgagcattgtctagggggatcttaaactttagtaggaaaccatgagctgttaatacagtttccattcaaatattaatttcagaatgaaacataatttttttttttttttttgagatggagtctcgctctgttgcccaggctggagtgcagtggcgcgattttggctcactgtaacctccatctcctgggttcaagcaattctcctgtctcagcctccctagtagctgggactgcaggtatgtgctaccacacctggctaatttttgtatttttagtagagatggagtttcaccatattggtcaggctggtcttgaactcctgacctcaggtgatccacccacctcggcctcccaaagtgctgggattgcaggcgtgataaacaaatattcttaatagggctactttgaattaatctgcctttatgtttgggagaagaaagctgagacattgcatgaaagatgatgagagataaatgttgatcttttggccccatttgttaattgtattcagtatttgaacgtcgtcctgtttattgttagttttcttcatcatttattgtatagacaatttttaaatctctgtaatatgatacattttcctatcttttaagttattgttacctaaagttaatccagattatatggtccttatatgtgtacaacattaaaatgaaaggctttgtcttgcattgtgaggtacaggcggaagttggaatcaggttttaggattctgtctctcattagctgaataatgtgaggattaacttctgccagctcagaccatttcctaatcagttgaaagggaaacaagtatttcagtctcaaaattgaataatgcacaagtcttaagtgattaaaataaaactgttcttatgtcagttt

SEQ ID NO: 26486 - DNA, 3673 bp, Homo sapiens; identical to SEQ ID NO: 26485
  source 1..3673: mol_type = unassigned DNA

SEQ ID NO: 26487 - DNA, 4931 bp, Homo sapiens
  source 1..4931: mol_type = unassigned DNA
ggctggccgaagttaggcggagccccgaggcgggggaggcggggccgggccggcgcagggagagtcactcaatggacaggcgagaaagcaggaccggcgcggcggggcggggccggccgagtccctagagctgggggcggggcggacccagcggaccagcggaccacctgggtgctgtcgtagttggaggtggcctgaggagctcagttccctcagcgcccgtagcttcggcggagtctgcgcgatgggcgacccggaaaggccggaagcggccgggctggatcaggatgagagatcatcttcagacaccaacgaaagtgaaataaagtcaaatgaagagccactcctaagaaagagttctcgccggtttgtcatctttccaatccagtaccctgatatttggaaaatgtataaacaggcacaggcttccttctggacagcagaagaggtcgacttatcaaaggatctccctcactggaacaagcttaaagcagatgagaagtacttcatctctcacatcttagccttttttgcagccagtgatggaattgtaaatgaaaatttggtggagcgctttagtcaggaggtgcaggttccagaggctcgctgtttctatggctttcaaattctcatcgagaatgttcactcagagatgtacagtttgctgatagacacttacatcagagatcccaagaaaagggaatttttatttaatgcaattgaaaccatgccctatgttaagaaaaaagcagattgggccttgcgatggatagcagatagaaaatctacttttggggaaagagtggtggcctttgctgctgtagaaggagttttcttctcaggatcttttgctgctatattctggctaaagaagagaggtcttatgccaggactcactttttccaatgaactcatcagcagagatgaaggacttcactgtgactttgcttgcctgatgttccaatacttagtaaataagccttcagaagaaagggtcagggagatcattgttgatgctgtcaaaattgagcaggagtttttaacagaagccttgccagttggcctcattggaatgaattgcattttgatgaaacagtacattgagtttgtagctgacagattacttgtggaacttggattctcaaaggtttttcaggcagaaaatccttttgattttatggaaaacatttctttagaaggaaaaacaaatttctttgagaaacgagtttcagagtatcagcgttttgcagttatggcagaaaccacagataacgtcttcaccttggatgcagatttttaaaaaacctcttgttttaaaactctataaacttgtcattggtaaatagtagtctattttcctctgcttaaaaaaaattttaagtatatcctttaaaggactgggggtttgctcaaaaggaaatccaaaacctattctaaacaatttgcatttatataattttcctgtttaacaacaagagtgtgacctaaatgcttttgtcttgtcactgaaataaaagatggcattatgtggttaagagcatggggcgaggggtcagacatgagtctaaggttctgcccttactccagtgtgtgacccttggcaagtcagttaatcttggtaaacctcggtgtacttatctttaaaatgggagtaatagtaggtcctaaattcatagagtggatattaggattaggatgcaaaaataaatgcttaaccaacactactactgttagcaccactactaattatcattcattgataatattaattgcaatgatgttgtaataaaatactctcatttccttaaaataattgtgattctaggtcctaggatctagaattagatctttgtatttttaatgcttaggggaagaatataagtatctccttaaaaagaacataattctcattcacgcaagaataagttctttgaattccttagtatgtagtgaagaaaatttagttgttagttgctttgggaagcctacttatggagtggaaaccaggaggttatcatggtagttgaccttataagaaaaatgattcttcttcagaaattaaaaacataactattgccagatttagctctggaatgtttagaatcaggctagaatagcattttccaaagaatattctaagagctattagctcctctagatatttttttgggggaaaaaggggattctgtggtcagatgagtttgggaaatgctgaacacttcattcttctttagcaagtacagtcagtacatcaaagactgagcagttcagtggtacataaatttatctcgccctgcatattcccaacatacttaacacagatgttttttacctgttaacatctcacccagctagtgttcctcagaacaaagattggaaaaagctggccgagaaccatttatacatagaggaagggcttatggactgagaaagggagaacatggtagggattattgaatcatttcaaatttataccagcctgaatagtgtaccagcaattgacttaggctgtgtttctttatggttttaaaactcttgagctgttataagagatagttcttttaatgtgactatgcaacatgatagccaatggtgagggaaaaggaggtttctctagaagagtctgatgaaaggccgggaaccaaggtttttgagaagtctgcccctatttatttttagtaagtatcaagaggtagcctgagcctagttagagttagacctgtctttggatgaagaagtcttaatactgaaatactgaatttttaatacattattatttggtattctgtataccccttcaagcagttgtttcccattcccaacaaactgtactttatacaattctggatgctaaaacttagagattttctctttgcataaattttggctccattctttccataacaatctaatcaaaactgggagttctcaagtgaatgcaaaaggagcaggccataactttatttgttagatacactgtcagaaacttgagatcttttggcctatgataataccattaatttttgcattgcttcagtttgccaagtgtttttacatcatctcatttgatctcaaaacagcttgacagagcaactgttattgaaatattacagatggaaagaatgaggctcagggaagttaaatgacttggccaagatctgctcatcgtcactgtctgtacagtatttttttttagaggttgtaatgtctcagatttagtcctttaccatctatgttgatttgcttttgtctatttcctcattaattgaatatactttaaatatatatattaaagtatcaaaatatagagagacatttgaactgtattcaggtaatatgtttaaagatatttatatattgccatacaaaaacttaacatttaaaactgataatatctgtaatgacatcagaatgaaagaaaaaaaattgtacagtgtatattcctttgttttgaatccaaatctttttcataggtaatgacagatgccttaatgtgaagcttatttataatagcaataaacctaactggatttggatgaagaagtcttaatactgacatactggatttttaatgcactggtttgttatttggtattctatctctttttccaggcctccaggttgcacatttatttattatgttcaatactttggttcttagttcttaaagaatcaagaagttgtgtaatcttttaaaaatattatcttgcagataaagaaaaaaattaagagtgtgtttacaactgttttctcttttttacagtacatgtatttaaatcattgctataataaagttaagttcattaggaatataaaaacttgcagttctatgatagattgcatttattaaaaatgtttcattgtatcacatagaaatatggccaggaaggacttgagaagacagtttgatccattgcttttagacaggactgggttttgctgtccaattatatacaataatagtttttcttacaactaagctggccccagccttgtcttgatattaatacatgaaatttttataattgtctcattgtctcatttagaaacatccatatttttctgctttttctattgccattttttatttgtgcatgaattgattattgagaaaatgtagcagtttgcatatttaaaaattaatcattttgcattttacatttaaatatgctaacatcactgtcatagaattcccaaatttcatttgtagatactgaactaagggctaatgtcaggagctgatttttaatgataaagctgcagatgggctaaataaaagccaaattaatcctacaatcaggtattatgtttttaaaccaagttgagtgaattggtagtggacttgggaaatcttccccagcagaatctggatgaatggcacagaattgaaatctctttgtttcccaccatttccctttaagtgctctgctcctttgtaaaaagttaaagatttgaaagagaatctcatattcccgaggcattaggaagaaaggatttaatcccttcaatttggggcttaatcttgtttaaaaaaatgtaagtgaagatggaaggctggagagaatgattgctttttgtacagttaaataaggtcacaatattcttacatactttgttttacaactgtgttttcattttttcaaatgtctggccatttagcaaagttatttactatttactgtgtacatagaaagctttattatgtgtggtgtatctaaattttttttgctgaaatacattatggtcaatcaagccaagcctgcatgtacagaatttgtttttttttcaaataaattagttgttttcttatttttttggcttagtatgttgaaataaactatggtatcttcatcattttgtacatttcctttttgaggaaggtttctttataagtgcaagggctaccctaataaaggaatgtatatacttac

SEQ ID NO: 26488 - DNA, 900 bp, Homo sapiens
  source 1..900: mol_type = unassigned DNA
atgggcgacccggaaaggccggaagcggccgggctggatcaggatgaggtcgacttatcaaaggatctccctcactggaacaagcttaaagcagatgagaagtacttcatctctcacatcttagccttttttgcagccagtgatggaattgtaaatgaaaatttggtggagcgctttagtcaggaggtgcaggttccagaggctcgctgtttctatggctttcaaattctcatcgagaatgttcactcagagatgtacagtttgctgatagacacttacatcagagatcccaagaaaagggaatttttatttaatgcaattgaaaccatgccctatgttaagaaaaaagcagattgggccttgcgatggatagcagatagaaaatctacttttggggaaagagtggtggcctttgctgctgtagaaggagttttcttctcaggatcttttgctgctatattctggctaaagaagagaggtcttatgccaggactcactttttccaatgaactcatcagcagagatgaaggacttcactgtgactttgcttgcctgatgttccaatacttagtaaataagccttcagaagaaagggtcagggagatcattgttgatgctgtcaaaattgagcaggagtttttaacagaagccttgccagttggcctcattggaatgaattgcattttgatgaaacagtacattgagtttgtagctgacagattacttgtggaacttggattctcaaaggtttttcaggcagaaaatccttttgattttatggaaaacatttctttagaaggaaaaacaaatttctttgagaaacgagtttcagagtatcagcgttttgcagttatggcagaaaccacagataacgtcttcaccttggatgcagatttttaa

SEQ ID NO: 26489 - DNA, 420 bp, Homo sapiens
  source 1..420: mol_type = unassigned DNA
atgggcgacccggaaaggccggaagcggccgggctggatcaggatgagggacttcactgtgactttgcttgcctgatgttccaatacttagtaaataagccttcagaagaaagggtcagggagatcattgttgatgctgtcaaaattgagcaggagtttttaacagaagccttgccagttggcctcattggaatgaattgcattttgatgaaacagtacattgagtttgtagctgacagattacttgtggaacttggattctcaaaggtttttcaggcagaaaatccttttgattttatggaaaacatttctttagaaggaaaaacaaatttctttgagaaacgagtttcagagtatcagcgttttgcagttatggcagaaaccacagataacgtcttcaccttggatgcagatttttaa

SEQ ID NO: 26490 - DNA, 201 bp, Homo sapiens
  source 1..201: mol_type = unassigned DNA
atgggcgacccggaaaggccggaagcggccgggctggatcaggatgaggtttttcaggcagaaaatccttttgattttatggaaaacatttctttagaaggaaaaacaaatttctttgagaaacgagtttcagagtatcagcgttttgcagttatggcagaaaccacagataacgtcttcaccttggatgcagatttttaa

SEQ ID NO: 26491 - DNA, 389 bp, Homo sapiens
  source 1..389: mol_type = unassigned DNA
atgggcgacccggaaaggccggaagcggccgggctggatcaggatgagagatcatcttcagacaccaacgaaagtgaaataaagtcaaatgaagagccactcctaagaaagagttctcgccggagtttttaacagaagccttgccagttggcctcattggaatgaattgcattttgatgaaacagtacattgagtttgtagctgacagattacttgtggaacttggattctcaaaggtttttcaggcagaaaatccttttgattttatggaaaacatttctttagaaggaaaaacaaatttctttgagaaacgagtttcagagtatcagcgttttgcagttatggcagaaaccacagataacgtcttcaccttggatgcagatttttaa

SEQ ID NO: 26492 - DNA, 3483 bp, Homo sapiens
  source 1..3483: mol_type = unassigned DNA
agattgcaagttgcaggaccgctgtaggaaatgttattcgccgcggtcaggacaggcctgtccgcccgccctcgccgcagcctggcttcgtcgttgcgagcgccggggaggccgtccccggggagggcggaggaaggagctgactttgggtttgcgtcccgctcgctgctctgccccggggccagccaaggacgacgcttggaggcctcaggccgggagatcatcttcagacaccaacgaaagtgaaataaagtcaaatgaagagccactcctaagaaagagttctcgccggtttgtcatctttccaatccagtaccctgatatttggaaaatgtataaacaggcacaggcttccttctggacagcagaagaggtcgacttatcaaaggatctccctcactggaacaagcttaaagcagatgagaagtacttcatctctcacatcttagccttttttgcagccagtgatggaattgtaaatgaaaatttggtggagcgctttagtcaggaggtgcaggttccagaggctcgctgtttctatggctttcaaattctcatcgagaatgttcactcagagatgtacagtttgctgatagacacttacatcagagatcccaagaaaagggaatttttatttaatgcaattgaaaccatgccctatgttaagaaaaaagcagattgggccttgcgatggatagcagatagaaaatctacttttggggaaagagtggtggcctttgctgctgtagaaggagttttcttctcaggatcttttgctgctatattctggctaaagaagagaggtcttatgccaggactcactttttccaatgaactcatcagcagagatgaaggacttcactgtgactttgcttgcctgatgttccaatacttagtaaataagccttcagaagaaagggtcagggagatcattgttgatgctgtcaaaattgagcaggagtttttaacagaagccttgccagttggcctcattggaatgaattgcattttgatgaaacagtacattgagtttgtagctgacagattacttgtggaacttggattctcaaaggtttttcaggcagaaaatccttttgattttatggaaaacatttctttagaaggaaaaacaaatttctttgagaaacgagtttcagagtatcagcgttttgcagttatggcagaaaccacagataacgtcttcaccttggatgcagatttttaaaaaacctcttgttttaaaactctataaacttgtcattggtaaatagtagtctattttcctctgcttaaaaaaaattttaagtatatcctttaaaggactgggggtttgctcaaaaggaaatccaaaacctattctaaacaatttgcatttatataattttcctgtttaacaacaagagtgtgacctaaatgcttttgtcttgtcactgaaataaaagatggcattatgtggttaagagcatggggcgaggggtcagacatgagtctaaggttctgcccttactccagtgtgtgacccttggcaagtcagttaatcttggtaaacctcggtgtacttatctttaaaatgggagtaatagtaggtcctaaattcatagagtggatattaggattaggatgcaaaaataaatgcttaaccaacactactactgttagcaccactactaattatcattcattgataatattaattgcaatgatgttgtaataaaatactctcatttccttaaaataattgtgattctaggtcctaggatctagaattagatctttgtatttttaatgcttaggggaagaatataagtatctccttaaaaagaacataattctcattcacgcaagaataagttctttgaattccttagtatgtagtgaagaaaatttagttgttagttgctttgggaagcctacttatggagtggaaaccaggaggttatcatggtagttgaccttataagaaaaatgattcttcttcagaaattaaaaacataactattgccagatttagctctggaatgtttagaatcagtacatcaaagactgagcagttcagtggtacataaatttatctcgccctgcatattcccaacatacttaacacagatgttttttacctgttaacatctcacccagctagtgttcctcagaacaaagattggaaaaagctggccgagaaccatttatacatagaggaagggcttatggactgagaaagggagaacatggtagggattattgaatcatttcaaatttataccagcctgaatagtgtaccagcaattgacttaggctgtgtttctttatggttttaaaactcttgagctgttataagagatagttcttttaatgtgactatgcaacatgatagccaatggtgagggaaaaggaggtttctctagaagagtctgatgaaaggccgggaaccaaggtttttgagaagtctgcccctatttatttttagtaagtatcaagaggtagcctgagcctagttagagttagacctgtctttggatgaagaagtcttaatactgaaatactgaatttttaatacattattatttggtattctgtataccccttcaagcagttgtttcccattcccaacaaactgtactttatacaattctggatgctaaaacttagagattttctctttgcataaattttggctccattctttccataacaatctaatcaaaactgggagttctcaagtgaatgcaaaaggagcaggccataactttatttgttagatacactgtcagaaacttgagatcttttggcctatgataataccattaatttttgcattgcttcagtttgccaagatctgctcatcgtcactgtctgtacagtatttttttttagaggttgtaatgtctcagatttagtcctttaccatctatgttgatttgcttttgtctatttcctcattaattgaatatactttaaatatatatattaaagtatcaaaatatagagagacatttgaactgtattcaggtaatatgtttaaagatatttatatattgccatacaaaaacttaacatttaaaactgataatatctgtaatgacatcagaatgaaagaaaaaaaattgtacagtgtatattcctttgttttgaatccaaatctttttcataggtaatgacagatgccttaatgtgaagcttatttataatagcaataaacctaactggatttggatgaagaagtcttaatactgacatactggatttttaatgcactggtttgttatttggtattctatctctttttccaggcctccaggttgcacatttatttattatgttcaatactttggttcttagttcttaaagaatcaagaagttgtgtaatcttttaaaaatattatcttgcagataaagaaaaaaattaagagtgtgtttacaactgttttctcttttttacagtacatgtatttaaatcattgctataataaagttaagttcattagg

SEQ ID NO: 26493 - DNA, 2310 bp, Homo sapiens
  source 1..2310: mol_type = unassigned DNA
gctaccgcgcccgggccctacccgccctggcgcactgctcttcccggtcatggaggcgccagccgccggcttgtttctgctcctgttgcttgggacttgggccccggcgccgggcagcgcctcctccgaggcaccgccgctgatcaatgaggacgtgaagcgcacagtggacctaagcagccacctggctaaggtgacggccgaggtggtcctggcgcacctgggcggcggctccacgtcccgagctacctctttcctgctggctttggagcctgagctcgaggcccggctggcgcacctgggcgtgcaggtaaagggagaagatgaggaagagaacaatttggaagtacgtgaaaccaaaattaagggtaaaagtgggagattcttcacagtcaagctcccagttgctcttgatcctggggccaagatttcagtcattgtggaaacagtctacacccatgtgcttcatccgtatccaacccagatcacccagtcagagaaacagtttgtggtgtttgaggggaaccattatttctactctccctatccaacgaagacacaaaccatgcgtgtgaagcttgcctctcgaaatgtggagagctacaccaagctggggaaccccacgcgctctgaggacctactggattatgggcctttcagagatgtgcctgcctatagtcaggatacttttaaagtacattatgagaacaacagccctttcctgaccatcaccagcatgacccgagtcattgaagtctctcactggggtaatattgctgtggaagaaaatgtggacttaaagcacacaggagctgtgcttaaggggcctttctcacgctatgattaccagagacagccagatagtggaatatcctccatccgttcttttaagaccatccttcctgctgctgcccaggatgtttattaccgggatgagattggcaatgtttctaccagccacctccttattttggatgactctgtagagatggaaatccggcctcgcttccctctctttggcgggtggaagacccattacatcgttggctacaacctcccaagctatgagtacctctataatttgggtgaccagtatgcactgaagatgaggtttgtggaccatgtgtttgatgaacaagtgatagattctctgactgtgaagatcatcctgcctgaaggagccaagaacattgaaattgatagtccctatgaaatcagccgtgccccagatgagctgcactacacctatctggacacatttggccgccctgtgattgttgcctacaagaaaaatctggtagaacagcacattcaggacattgtggtccactacacgttcaacaaggtgctcatgctgcaggagcccctgctggtggtggcggccttctacatcctgttcttcaccgttatcatctatgttcggctggacttctccatcaccaaggatccagccgcagaagccaggatgaaggtagcctgcatcacagagcaggtcttgaccctggtcaacaagagaataggcctttaccgtcactttgacgagaccgtcaataggtacaagcaatcccgggacatctccaccctcaacagtggcaagaagagcctggagactgaacacaaggccttgaccagtgagattgcactgctgcagtccaggctgaagacagagggctctgatctgtgcgacagagtgagcgaaatgcagaagctggatgcacaggtcaaggagctggtgctgaagtcggcggtggaggctgagcgcctggtggctggcaagctcaagaaagacacgtacattgagaatgagaagctcatctcaggaaagcgccaggagctggtcaccaagatcgaccacatcctggatgccctgtagcccctgcccgcatcctccagggggcccagggtgcctgcactttgctgtggcaggcagattgggtggtagtgggaggttgtgcatggaggccagtgaaagctgacatctgtaaaaggccttcaaggaagagaaaccaggccctgcgtcaggcagtgtgagtttgccgtttgtccttaactttctttttttttttttttaaaaaaagaaaactttaaaaaaactcccattaaaaacaaaacatctttgtgttttgaacaaaggaattttcaatatttgattggtattctgttctgaagtctaagatatttttcagcctataaagccccctgttttatgcccttctaattctgatgtttgggtattgtgtgagtgcatgtgtttttttttttttttttaaagcgtgtgtgaacaaatggaaataaagcagggactgtgaa

SEQ ID NO: 26494 - DNA, 2137 bp, Homo sapiens
  source 1..2137: mol_type = unassigned DNA
catcttttacaagaaaccttcgctgcaaccgctgcgtcacatcaccgcgtctcccagggacaggaaagcctctccgtgtttggtgaagcttcaggggaagcagtcatcctgtcgtcgcatacggcaaaatcctccattgccgtagccgttcggctgacgtgacaagggaggtgcaggccaacacggcgactccgcgccctctggcggcagtgccggagcagcggcgctgtctttgacctatccggcattcggcttccgggaccgcttggcggctgtgaatgcagagctggggcgacgtggggctcgcttcctgggactgggtgtaaagggagaagatgaggaagagaacaatttggaagtacgtgaaaccaaaattaagggtaaaagtgggagattcttcacagtcaagctcccagttgctcttgatcctggggccaagatttcagtcattgtggaaacagtctacacccatgtgcttcatccgtatccaacccagatcacccagtcagagaaacagtttgtggtgtttgaggggaaccattatttctactctccctatccaacgaagacacaaaccatgcgtgtgaagcttgcctctcgaaatgtggagagctacaccaagctggggaaccccacgcgctctgaggacctactggattatgggcctttcagagatgtgcctgcctatagtcaggatacttttaaagtacattatgagaacaacagccctttcctgaccatcaccagcatgacccgagtcattgaagtctctcactggggtaatattgctgtggaagaaaatgtggacttaaagcacacaggagctgtgcttaaggggcctttctcacgctatgattaccagagacagccagatagtggaatatcctccatccgttcttttaagaccatccttcctgctgctgcccaggatgtttattaccgggatgagattggcaatgtttctaccagccacctccttattttggatgactctgtagagatggaaatccggcctcgcttccctctctttggcgggtggaagacccattacatcgttggctacaacctcccaagctatgagtacctctataatttgggtgaccagtatgcactgaagatgaggtttgtggaccatgtgtttgatgaacaagtgatagattctctgactgtgaagatcatcctgcctgaaggagccaagaacattgaaattgatagtccctatgaaatcagccgtgccccagatgagctgcactacacctatctggacacatttggccgccctgtgattgttgcctacaagaaaaatctggtagaacagcacattcaggacattgtggtccactacacgttcaacaaggtgctcatgctgcaggagcccctgctggtggtggcggccttctacatcctgttcttcaccgttatcatctatgttcggctggacttctccatcaccaaggatccagccgcagaagccaggatgaaggtagcctgcatcacagagcaggtcttgaccctggtcaacaagagaataggcctttaccgtcactttgacgagaccgtcaataggtacaagcaatcccgggacatctccaccctcaacagtggcaagaagagcctggagactgaacacaaggccttgaccagtgagattgcactgctgcagtccaggctgaagacagagggctctgatctgtgcgacagagtgagcgaaatgcagaagctggatgcacaggtcaaggagctggtgctgaagtcggcggtggaggctgagcgcctggtggctggcaagctcaagaaagacacgtacattgagaatgagaagctcatctcaggaaagcgccaggagctggtcaccaagatcgaccacatcctggatgccctgtagcccctgcccgcatcctccagggggcccagggtgcctgcactttgctgtggcaggcagattgggtggtagtgggaggttgtgcatggaggccagtgaaagctgacatctgtaaaaggccttcaaggaagagaaaccaggccctgcgtcaggcagtgtgagtttgccgtttgtccttaactttctttttttttttttttaaaaaaagaaaactttaaaaaaactcccattaaaaacaaaacatctttgtgtttt

SEQ ID NO: 26495 - DNA, 1824 bp, Homo sapiens
  source 1..1824: mol_type = unassigned DNA
gcactgctcttcccggtcatggaggcgccagccgccggcttgtttctgctcctgttgcttgggacttgggccccggcgccgggcagcgcctcctccgaggcaccgccgctgatcaatgaggacgtgaagcgcacagtggacctaagcagccacctggctaaggtgacggccgaggtggtcctggcgcacctgggcggcggctccacgtcccgagctacctctttcctgctggctttggagcctgagctcgaggcccggctggcgcacctgggcgtgcaggtaaagggagaagatgaggaagagaacaatttggaagtacgtgaaaccaaaattaagggtaaaagtgggagattcttcacagtcaagctcccagttgctcttgatcctggggccaagatttcagtcattgtggaaacagtctacacccatgtgcttcatccgtatccaacccagatcacccagtcagagaaacagtttgtggtgtttgaggggaaccattatttctactctccctatccaagcgctctgaggacctactggattatgggcctttcagagatgtgcctgcctatagtcaggatacttttaaagtacattatgagaacaacagccctttcctgaccatcaccagcatgacccgagtcattgaagtctctcactggggtaatattgctgtggaagaaaatgtggacttaaagcacacaggagctgtgcttaaggggcctttctcacgctatgattaccagagacagccagatagtggaatatcctccatccgttcttttaagaccatccttcctgctgctgcccaggatgtttattaccgggatgagattggcaatgtttctaccagccacctccttattttggatgactctgtagagatggaaatccggcctcgcttccctctctttggcgggtggaagacccattacatcgttggctacaacctcccaagctatgagtacctctataatttgggtgaccagtatgcactgaagatgaggtttgtggaccatgtgtttgatgaacaagtgatagattctctgactgtgaagatcatcctgcctgaaggagccaagaacattgaaattgatagtccctatgaaatcagccgtgccccagatgagctgcactacacctatctggacacatttggccgccctgtgattgttgcctacaagaaaaatctggtagaacagcacattcaggacattgtggtccactacacgttcaacaaggtgctcatgctgcaggagcccctgctggtggtggcggccttctacatcctgttcttcaccgttatcatctatgttcggctggacttctccatcaccaaggatccagccgcagaagccaggatgaaggtagcctgcatcacagagcaggtcttgaccctggtcaacaagagaataggcctttaccgtcactttgacgagaccgtcaataggtacaagcaatcccgggacatctccaccctcaacagtggcaagaagagcctggagactgaacacaaggccttgaccagtgagattgcactgctgcagtccaggctgaagacagagggctctgatctgtgcgacagagtgagcgaaatgcagaagctggatgcacaggtcaaggagctggtgctgaagtcggcggtggaggctgagcgcctggtggctggcaagctcaagaaagacacgtacattgagaatgagaagctcatctcaggaaagcgccaggagctggtcaccaagatcgaccacatcctggatgccctgtagcccctgcccgcatcctccagggggcccagggtgcctgcactttgctgtggcaggc

SEQ ID NO: 26496 - DNA, 1828 bp, Homo sapiens
  source 1..1828: mol_type = unassigned DNA
acccgccctggcgcactgctcttcccggtcatggaggcgccagccgccggcttgtttctgctcctgttgcttgggacttgggccccggcgccgggcagcgcctcctccgaggcaccgccgctgatcaatgaggacgtgaagcgcacagtggacctaagcagccacctggctaaggtgacggccgaggtggtcctggcgcacctgggcgtgcaggtaaagggagaagatgaggaagagaacaatttggaagtacgtgaaaccaaaattaagggtaaaagtgggagattcttcacagtcaagctcccagttgctcttgatcctggggccaagatttcagtcattgtggaaacagtctacacccatgtgcttcatccgtatccaacccagatcacccagtcagagaaacagtttgtggtgtttgaggggaaccattatttctactctccctatccaacgaagacacaaaccatgcgtgtgaagcttgcctctcgaaatgtggagagctacaccaagctggggaaccccacgcgctctgaggacctactggattatgggcctttcagagatgtgcctgcctatagtcaggatacttttaaagtacattatgagaacaacagccctttcctgaccatcaccagcatgacccgagtcattgaagtctctcactggggtaatattgctgtggaagaaaatgtggacttaaagcacacaggagctgtgcttaaggggcctttctcacgctatgattaccagagacagccagatagtggaatatcctccatccgttcttttaagaccatccttcctgctgctgcccaggatgtttattaccgggatgagattggcaatgtttctaccagccacctccttattttggatgactctgtagagatggaaatccggcctcgcttccctctctttggcgggtggaagacccattacatcgttggctacaacctcccaagctatgagtacctctataatttgggtgaccagtatgcactgaagatgaggtttgtggaccatgtgtttgatgaacaagtgatagattctctgactgtgaagatcatcctgcctgaaggagccaagaacattgaaattgatagtccctatgaaatcagccgtgccccagatgagctgcactacacctatctggacacatttggccgccctgtgattgttgcctacaagaaaaatctggtagaacagcacattcaggacattgtggtccactacacgttcaacaaggtgctcatgctgcaggagcccctgctggtggtggcggccttctacatcctgttcttcaccgttatcatctatgttcggctggacttctccatcaccaaggatccagccgcagaagccaggatgaaggtagcctgcatcacagagcaggtcttgaccctggtcaacaagagaataggcctttaccgtcactttgacgagaccgtcaataggtacaagcaatcccgggacatctccaccctcaacagtggcaagaagagcctggagactgaacacaaggccttgaccagtgagattgcactgctgcagtccaggctgaagacagagggctctgatctgtgcgacagagtgagcgaaatgcagaagctggatgcacaggtcaaggagctggtgctgaagtcggcggtggaggctgagcgcctggtggctggcaagctcaagaaagacacgtacattgagaatgagaagctcatctcaggaaagcgccaggagctggtcaccaagatcgaccacatcctggatgccctgtagcccctgcccgcatcctccagggggcccagggtgcctgcactttgctgtggca

SEQ ID NO: 26497 - DNA, 2511 bp, Homo sapiens
  source 1..2511: mol_type = unassigned DNA
gcgtcccggtagctcccggaataggagcgttgcgagacggtcggttccaagtgggcctgggcgcgggggagaggcgggtctgtcctcgggaactgcaaggccctgtgagcgggaggactgggatcccggccgcggctgctggaagcgtcgaagctcagcggggccgcggacactgacctgtgcttagaactcatcctggcccgcagagcctgccgcgagtccctggcgtcccctgtggcgggctcttggagccactttcccgagcggaagtcagcccgcggctcggactccggcgggacctgctcggaggaatggcgccgccgggttcaagcactgtcttcctgttggccctgacaatcatagccagcacctgggctctgacgcccactcactacctcaccaagcatgacgtggagagactaaaagcctcgctggatcgccctttcacaaatttggaatctgccttctactccatcgtgggactcagcagccttggtgctcaggtgccagatgcaaagaaagcatgtacctacatcagatctaaccttgatcccagcaatgtggattccctcttctacgctgcccaggccagccaggccctctcaggatgtgagatctctatttcaaatgagaccaaagatctgcttctggcagctgtcagtgaggactcatctgttacccagatctaccatgcagttgcagctctaagtggctttggccttcccttggcatcccaagaagcactcagtgcccttactgctcgtctcagcaaggaggagactgtgctggcaacagtccaggctctgcagacagcatcccacctgtcccagcaggctgacctgaggagcatcgtggaggagattgaggaccttgttgctcgcctggatgaactcgggggcgtgtatctccagtttgaagaaggactggaaacaacagcgttatttgtggctgccacctacaagctcatggatcatgtggggactgagccatccattaaggaggatcaggtcatccagctgatgaacgcgatcttcagcaagaagaactttgagtccctctccgaagccttcagcgtggcctctgcagctgctgtgctctcgcataatcgctaccacgtgccagttgtggttgtgcctgagggctctgcttccgacactcatgaacaggctatcttgcggttgcaagtcaccaatgttctgtctcagcctctgactcaggccactgttaaactagaacatgctaaatctgttgcttccagagccactgtcctccagaagacatccttcacccctgtaggggatgtttttgaactaaatttcatgaacgtcaaattttccagtggttattatgacttccttgtcgaagttgaaggtgacaaccggtatattgcaaataccgtagagctcagagtcaagatctccactgaagttggcatcacaaatgttgatctttccaccgtggataaggatcagagcattgcacccaaaactacccgggtgacatacccagccaaagccaagggcacattcatcgcagacagccaccagaacttcgccttgttcttccagctggtagatgtgaacactggtgctgaactcactcctcaccagacatttgtccgactccataaccagaagactggccaggaagtggtgtttgttgccgagccagacaacaagaacgtgtacaagtttgaactggatacctctgaaagaaagattgaatttgactctgcctctggcacctacactctctacttaatcattggagatgccactttgaagaacccaatcctctggaatgtggctgatgtggtcatcaagttccctgaggaagaagctccctcgactgtcttgtcccagaaccttttcactccaaaacaggaaattcagcacctgttccgcgagcctgagaagaggccccccaccgtggtgtccaatacattcactgccctgatcctctcgccgttgcttctgctcttcgctctgtggatccggattggtgccaatgtctccaacttcacttttgctcctagcacgattatatttcacctgggacatgctgctatgctgggactcatgtatgtctactggactcagctcaacatgttccagaccttgaagtacctggccatcctgggcagtgtgacgtttctggctggcaatcggatgctggcccagcaggcagtcaagagaacagcacattagttccagaagaaagatggaaattctgaaaactgaatgtcaagaaaaggagtcaagaacaattcacagtatgagaagaaaaatggaaaaaaaaaactttatttaaaaaagaaaaaagtccagattgtagttatacttttgcttgtttttcagtttccccaacacacagcagatacctggtgagctcagatagtctctttctctgacactgtgtaagaagctgtgaatattcctaacttacccagatgttgcttttgaaaagttgaaatgtgtaattgttttggaataaagagggtaacaataggaa

SEQ ID NO: 26498 - DNA, 1038 bp, Homo sapiens
  source 1..1038: mol_type = unassigned DNA
gtttccccccaaggttcaagcactgtcttcctgttggccctgacaatcatagccagcacctgggctctgacgcccactcactacctcaccaagcatgacgtggagagactaaaagcctcgctggatcgccctttcacaaatttggaatctgccttctactccatcgtgggactcagcagccttggtgctcaggtgccagatgcaaagaaagcatgtacctacatcagatctaaccttgatcccagcaatgtggattccctcttctacgctgcccaggccagccaggccctctcaggatgtgagatctctatttcaaatgagaccaaagatctgcttctggcagctgtcagtgaggactcatctgttacccagatctaccatgcagttgcagctctaagtggctttggccttcccttggcatcccaagaagcactcagtgcccttactgctcgtctcagcaaggaggagactgtgctggcgagggtgtggagcaccgttctggaatcccgttcgttgtttagcaagagaacagtccaggctctgcagacagcatcccacctgtcccagcaggctgacctgaggagcatcgtggaggagattgaggaccttgttgctcgcctggatgaactcgggggcgtgtatctccagtttgaagaaggactggaaacaacagcgttatttgtggctgccacctacaagctcatggatcatgtggggactgagccatccattaaggaggatcaggtcatccagctgatgaacgcgatcttcagcaagaagaactttgagtccctctccgaagccttcagcgtggcctctgcagctgctgtgctctcgcataatcgctaccacgtgccagttgtggttgtgcctgagggctctgcttccgacactcatgaacaggctatcttgcggttgcaagtcaccaatgttctgtctcagcctctgactcaggccactgttaaactagaacatgctaaatctgttgcttccagagccactgtcctccagaagacatccttcacccctgtagggtaa

SEQ ID NO: 26499 - DNA, 2348 bp, Homo sapiens
  source 1..2348: mol_type = unassigned DNA
gactgggatcccggccgcggctgctggaagcgtcgaagctcagcggggccgcggacactgacctgtgcttagaactcatcctggcccgcagagcctgccgcgagtccctggcgtcccctgtggcgggctcttggagccactttcccgagcggaagtcagcccgcggctcggactccggcgggacctgctcggaggaatggcgccgccgggttcaagcactgtcttcctgttggccctgacaatcatagccagcacctgggctctgacgcccactcactacctcaccaagcatgacgtggagagactaaaagcctcgctggatcgccctttcacaaatttggaatctgccttctactccatcgtgggactcagcagccttggtgctcaggtgccagatgcaaagatctctatttcaaatgagaccaaagatctgcttctggcagctgtcagtgaggactcatctgttacccagatctaccatgcagttgcagctctaagtggctttggccttcccttggcatcccaagaagcactcagtgcccttactgctcgtctcagcaaggaggagactgtgctggcaacagtccaggctctgcagacagcatcccacctgtcccagcaggctgacctgaggagcatcgtggaggagattgaggaccttgttgctcgcctggatgaactcgggggcgtgtatctccagtttgaagaaggactggaaacaacagcgttatttgtggctgccacctacaagctcatggatcatgtggggactgagccatccattaaggaggatcaggtcatccagctgatgaacgcgatcttcagcaagaagaactttgagtccctctccgaagccttcagcgtggcctctgcagctgctgtgctctcgcataatcgctaccacgtgccagttgtggttgtgcctgagggctctgcttccgacactcatgaacaggctatcttgcggttgcaagtcaccaatgttctgtctcagcctctgactcaggccactgttaaactagaacatgctaaatctgttgcttccagagccactgtcctccagaagacatccttcacccctgtaggggatgtttttgaactaaatttcatgaacgtcaaattttccagtggttattatgacttccttgtcgaagttgaaggtgacaaccggtatattgcaaataccgtagagctcagagtcaagatctccactgaagttggcatcacaaatgttgatctttccaccgtggataaggatcagagcattgcacccaaaactacccgggtgacatacccagccaaagccaagggcacattcatcgcagacagccaccagaacttcgccttgttcttccagctggtagatgtgaacactggtgctgaactcactcctcaccagacatttgtccgactccataaccagaagactggccaggaagtggtgtttgttgccgagccagacaacaagaacgtgtacaagtttgaactggatacctctgaaagaaagattgaatttgactctgcctctggcacctacactctctacttaatcattggagatgccactttgaagaacccaatcctctggaatgtggctgatgtggtcatcaagttccctgaggaagaagctccctcgactgtcttgtcccagaaccttttcactccaaaacaggaaattcagcacctgttccgcgagcctgagaagaggccccccaccgtggtgtccaatacattcactgccctgatcctctcgccgttgcttctgctcttcgctctgtggatccggattggtgccaatgtctccaacttcacttttgctcctagcacgattatatttcacctgggacatgctgctatgctgggactcatgtatgtctactggactcagctcaacatgttccagaccttgaagtacctggccatcctgggcagtgtgacgtttctggctggcaatcggatgctggcccagcaggcagtcaagaggatcgctgcagagcagagcagtagattggcaaaatataggacactacgaacagcacattagttccagaagaaagatggaaattctgaaaactgaatgtcaagaaaaggagtcaagaacaattcacagtatgagaagaaaaatggaaaaaaaaaactttatttaaaaaagaaaaaagtccagattgtagttatacttttgcttgtttttcagtttccccaacacacagcagatacctggtgagctcagatagtctctttctctgacactgtgtaagaagctgtgaatattcctaacttacccagatgttgcttttgaaaagttgaaatgtgtaattgttttggaataaagagggtaacaataggaa

SEQ ID NO: 26500 - DNA, 1019 bp, Homo sapiens
  source 1..1019: mol_type = unassigned DNA
cgaagttgaaggtgacaaccggtatattgcaaataccgtagagctcagagtcaagatctccactgaagttggcatcacaaatgttgatctttccaccgtggataaggatcagagcattgcacccaaaactacccgggtgacatacccagccaaagccaagggcacattcatcgcagacagccaccagaacttcgccttgttcttccagctggtagatgtgaacactggtgctgaactcactcctcaccagacatttgtccgactccataaccagaagactggccaggaagtggtgtttgttgccgagccagacaacaagaacgtgtacaagtttgaactggatacctctgaaagaaagattgaatttgactctgcctctggcacctacactctctacttaatcattggagatgccactttgaagaacccaatcctctggaatgtggctgatgtggtcatcaagttccctgaggaagaagctccctcgactgtcttgtcccagaaccttttcactccaaaacaggaaattcagcacctgttccgcgagcctgagaagaggccccccaccgtggtgtccaatacattcactgccctgatcctctcgccgttgcttctgctcttcgctctgtggatccggattggtgccaatgtctccaacttcacttttgctcctagcacgattatatttcacctgggacatgctgaacagcacattagttccagaagaaagatggaaattctgaaaactgaatgtcaagaaaaggagtcaagaacaattcacagtatgagaagaaaaatggaaaaaaaaaactttatttaaaaaagaaaaaagtccagattgtagttatacttttgcttgtttttcagtttccccaacacacagcagatacctggtgagctcagatagtctctttctctgacactgtgtaagaagctgtgaatattcctaacttacccagatgttgcttttgaaaagttgaaatgtgtaattgttttggaataaagagggtaacaatagg

SEQ ID NO: 26501 - DNA, 1073 bp, Homo sapiens
  source 1..1073: mol_type = unassigned DNA
agcccgcggctcggactccggcgggacctgctcggaggaatggcgccgccgggttcaagcactgtcttcctgttggccctgacaatcatagccagcacctgggctctgacgcccactcactacctcaccaagcatgacgtggagagactaaaagcctcgctggatcgccctttcacaaatttggaatctgccttctactccatcgtgggactcagcagccttggtgctcaggtgccagatgcaaagaaagcatgtacctacatcagatctaaccttgatcccagcaatgtggattccctcttctacgctgcccaggccagccaggccctctcaggatgtgagatctctatttcaaatgagaccaaagatctgcttctggcagctgtcagtgaggactcatctgttacccagatctaccatgcagttgcagctctaagtggctttggccttcccttggcatcccaagaagcactcagtgcccttactgctcgtctcagcaaggaggagactgtgctggcgagggtgtggagcaccgttctggaatcccgttcgttgtttagcaagagaacagtccaggctctgcagacagcatcccacctgtcccagcaggctgacctgaggagcatcgtggaggagattgaggaccttgttgctcgcctggatgaactcgggggcgtgtatctccagtttgaagaaggactggaaacaacagcgttatttgtggctgccacctacaagctcatggatcatgtggggactgagccatccattaaggaggatcaggtcatccagctgatgaacgcgatcttcagcaagaagaactttgagtccctctccgaagccttcagcgtggcctctgcagctgctgtgctctcgcataatcgctaccacgtgccagttgtggttgtgcctgagggctctgcttccgacactcatgaacaggctatcttgcggttgcaagtcaccaatgttctgtctcagcctctgactcaggccactgttaaactagaacatgctaaatctgttgcttccagagccactgtcctccagaagacatccttcacccctgtagg

SEQ ID NO: 26502 - DNA, 748 bp, Homo sapiens
  source 1..748: mol_type = unassigned DNA
cgaagttgaaggtgacaaccggtatattgcaaataccgtagagctcagagtcaagatctccactgaagttggcatcacaaatgttgatctttccaccgtggataaggatcagagcattgcacccaaaactacccgggtgacatacccagccaaagccaagggcacattcatcgcagacagccaccagaacttcgccttgttcttccagctggtagatgtgaacactggtgctgaactcactcctcaccagacatttgtccgactccataaccagaagactggccaggaagtggtgtttgttgccgagccagacaacaagaacgtgtacaagtttgaactggatacctctgaaagaaagattgaatttgactctgcctctggcacctacactctctacttaatcattggagatgccactttgaagaacccaatcctctggaatgtggctgatgtggtcatcaagttccctgaggaagaagctccctcgactgtcttgtcccagaaccttttcactccaaaacaggaaattcagtggatccggattggtgccaatgtctccaacttcacttttgctcctagcacgattatatttcacctgggacatgctgctatgctgggactcatgtatgtctactggactcagctcaacatgttccagaccttgaagtacctggccatcctgggcagtgtgacgtttctggctggcaatcggatgctggcccagcaggcagtcaagaggacagctgag

SEQ ID NO: 26503 - DNA, 520 bp, Homo sapiens
  source 1..520: mol_type = unassigned DNA
gaactggatacctctgaaagaaagattgaatttgactctgcctctggcacctacactctctacttaatcattggagatgccactttgaagaacccaatcctctggaatgtggctgatgtggtcatcaagttccctgaggaagaagctccctcgactgtcttgtcccagaaccttttcactccaaaacaggaaattcagtggatccggattggtgccaatgtctccaacttcacttttgctcctagcacgattatatttcacctgggacatgctgctatgctgggactcatgtatgtctactggactcagctcaacatgttccagaccttgaagtacctggccatcctgggcagtgtgacgtttctggctggcaatcggatgctggcccagcaggcagtcaagagaacagcacattagttccagaagaaagatggaaattctgaaaactgaatgtcaagaaaaggagtcaagaacaattcacagtatgagaagaaaaatggaaaaaaaaaactttatttaa

SEQ ID NO: 26504 - DNA, 791 bp, Homo sapiens
  source 1..791: mol_type = unassigned DNA
tgttcctggatgagccacctccatgttgagcctgtaaaactggcctaatatgttctctatgagtcactgcattgctctgcaaatcagataaaacgtcactcgtaggttcaagcactgtcttcctgttggccctgacaatcatagccagcacctgggctctgacgcccactcactacctcaccaagcatgacgtggagagactaaaagcctcgctggatcgccctttcacaaatttggaatctgccttctactccatcgtgggactcagcagccttggtgctcaggtgccagatgcaaagaacagtccaggctctgcagacagcatcccacctgtcccagcaggctgacctgaggagcatcgtggaggagattgaggaccttgttgctcgcctggatgaactcgggggcgtgtatctccagtttgaagaaggactggaaacaacagcgttatttgtggctgccacctacaagctcatggatcatgtggggactgagccatccattaaggaggatcaggtcatccagctgatgaacgcgatcttcagcaagaagaactttgagtccctctccgaagccttcagcgtggcctctgcagctgctgtgctctcgcataatcgctaccacgtgccagttgtggttgtgcctgagggctctgcttccgacactcatgaacaggctatcttgcggttgcaagtcaccaatgttctgtctcagcctctgactcaggccactgttaaactagaacatgctaaatctgttgcttccagagccactgtcctccagaagacatc

SEQ ID NO: 26505 - DNA, 453 bp, Homo sapiens
  source 1..453: mol_type = unassigned DNA
tggcacctacactctctacttaatcattggagatgccactttgaagaacccaatcctctggaatgtggctgatgtggtcatcaagttccctgaggaagaagctccctcgactgtcttgtcccagaaccttttcactccaaaacaggaaattcagcacctgttccgcgagcctgagaagaggccccccaccgtggtgtccaatacattcactgccctgatcctctcgccgttgcttctgctcttcgctctgtggatccggattggtgccaatgtctccaacttcacttttgctcctagcacgattatatttcacctgggacatgctgaacagcacattagttccagaagaaagatggaaattctgaaaactgaatgtcaagaaaaggagtcaagaacaattcacagtatgagaagaaaaatggaaaaaaaaaactttatttaaaaaagaaaaaa

SEQ ID NO: 26506 - DNA, 1823 bp, Homo sapiens
  source 1..1823: mol_type = unassigned DNA
atttccgggggagccgggggcgggacttcagcggaggccggagcgaggcgtcgggatgcagcgccccgggcccttcagcaccctctacgggcgggtcttggccccgctgcccgggagggccgggggcgcggcctccggcggaggagggaacagctgggacctcccgggttcccacgtgcggctgccggggcgtgcacagtctgggacccgtggcggtgctggcaacacaagcaccagctgcggggactccaacagcatctgcccggccccctccacgatgtccaaggccgaggaggccaagaagctggcgggccgcgcggctgtggagaaccacgtgaggaataaccaagtgctgggaattggaagtggttctacaattgtccatgctgtgcagcgaatagctgaaagggtgaagcaagagaatctgaacctcgtctgtattcccacttccttccaggcccgccagctcatcctgcagtatggcttgaccctcagtgatctggatcgacacccagagatcgaccttgccatcgatggtgctgatgaagtagatgctgatctcaatctcatcaagggtggcggaggctgcctgacccaggagaagattgtggctggctatgctagtcgcttcatcgtgatcgctgatttcaggaaagattcgaagaatctcggggatcagtggcacaagggaatccccatcgaggtcatcccaatggcctatgtcccagtgagccgagctgtgagccagaagtttgggggcgtggttgaacttcgaatggctgtcaacaaggctggtcctgtggtgacagataatgggaattttatcttggactggaagtttgaccgggtacacaaatggagtgaagtgaatacagctatcaaaatgatcccaggtgtggtggacacaggcctattcatcaacatggctgagagagtctactttgggatgcaggatggctcagtgaacatgagggagaagcctttctgttgaccctgcaaggagcagagtgtgttcaccttgagtctccagcccacagccaaggtggacgtacctctccaggagcctttgccttaatgtatctctgcctggacaacttgtggtggggggtggggggaagagtgggagggggagttaaatccagtcttatgaagtattgttattaaatgtctttttaaaaagagaaatataaacatatatttttactattaaaatattcagttttttaaatgaagtagaacttgagttcatgttttatatgaaatatttaccaaaaaaaaaaaatgaggtaaactgtatttaaaacctttgacttgagtctgctggtaaagcttctgaatattgagtttgctgagaaataaaaatcaaaacttctttaagctggtaaagtgaggggcccaccagcagtgatctcctgatgccttactggaaactttgtttacttgtctgctaccctctgatttgtttttagttagtttttattgtgagcacacatagtacctagttacatcttaagatcaggtttataaaactgtggagtggagcggtatggtatggaatgacttggaatgtaagctgtcagggagaaaatgttgttacacttttgctaagatctgggggtttcttcatattcctgctgttggaagcagttgaccagaaatgcttgccagtactgccaaagcactgctgtgaaatgtgaagtactttgtttttttatttttaatgattttctttttgttattaatatttttctctgttcctttgttattacttgcatggtttggcgtcagaagtccttacctctttatattgtttgcaggtttaa

SEQ ID NO: 26507 - DNA, 1281 bp, Homo sapiens
  source 1..1281: mol_type = unassigned DNA
gcccgccagctcatcctgcagtatggcttgaccctcagtgatctggatcgacacccagagatcgaccttgccatcgatggtgctgatgaagtagatgctgatctcaatctcatcaagggtggcggaggctgcctgacccaggagaagattgtggctggctatgctagtcgcttcatcgtgatcgctgatttcaggaaagattcgaagaatctcggggatcagtggcacaagggaatccccatcgaggtcatcccaatggcctatgtcccagtgagccgagctgtgagccagaagtttgggggcgtggttgaacttcgaatggctgtcaacaaggctggtcctgtggtgacagataatgggaattttatcttggactggaagtttgaccgggtacacaaatggagtgaagtgaatacagctatcaaaatgatcccaggtgtggtggacacaggcctattcatcaacatggctgagagagtctactttgggatgcaggatggctcagtgaacatgagggagaagcctttctgttgaccctgcaaggagcagagtgtgttcaccttgagtctccagcccacagccaaggtggacgtacctctccaggagcctttgccttaatgtatctctgcctggacaacttgtggtggggggtggggggaagagtgggagggggagttaaatccagtcttatgaagtattgttattaaatgtctttttaaaaagagaaatataaacatatatttttactattaaaatattcagttttttaaatgaagtagaacttgagttcatgttttatatgaaatatttaccaaaaaaaaaaaatgaggtaaactgtatttaaaacctttgacttgagtctgctggtaaagctttttacttgtctgctaccctctgatttgtttttagttagtttttattgtgagcacacatagtacctagttacatcttaagatcaggtttataaaactgtggagtggagcggtatggtatggaatgacttggaatgtaagctgtcagggagaaaatgttgttacacttttgctaagatctgggggtttcttcatattcctgctgttggaagcagttgaccagaaatgcttgccagtactgccaaagcactgctgtgaaatgtgaagtactttgtttttttatttttaatgattttctttttgttattaatatttttctctgttcctttgttattacttgcatggtttggcgtcagaagtccttacctctttatattgtttgcaggtttaaataaaacagtgtggtgcc

SEQ ID NO: 26508 - DNA, 2015 bp, Homo sapiens
  source 1..2015: mol_type = unassigned DNA
cacacggccgccggaggcacagtcgtgttcgcatctggtctaacagacccgcgagaacgaaggacgcttgcctttttccggtcggggaagggggaagaaggtaacttccggtgacggggttgcatcacttcctctcaagcttggcgtttgtttggtggggttacacgcgggttcaacatgcgtatcgaaaagtgttatttctgttcggggcccatctatcctggacacggcatgatgttcgtccgcaacgattgcaaggtgttcagattttgcaaatctaaatgtcataaaaactttaaaaagaagcgcaatcctcgcaaagttaggtggaccaaagcattccggaaagcagctggtaaagagcttacagtggataattcatttgaatttgaaaaacgtagaaatgaacctatcaaataccagcgagagctatggaataaaactattgatgcgatgaagagagttgaagaaatcaaacagaagcgccaagctaaatttataatgaacagattgaagaaaaataaagagctacagaaagttcaggatatcaaagaagtcaagcaaaacatccatcttatccgagcccctcttgcaggcaaagggaaacagttggaagagaaaatggtacagcagttacaagaggatgtggacatggaagatgctccttaaaaatctctgtaaccatttcttttatgtacatttgaaaatgccctttggatacttggaactgctaaattattttattttttacataaggtcacttaaatgaaaagcgattaaaagacatctttcctgcattgccatctacataatatcagatattacggatgttagattgcatctcagtgttaaatctttactgatagatgtacttaagtaaatcatgaaaattctacttgtaactatagaagtgaattgtggacgtaaaatggttgtgctatttggataatggcactaggcagcatttgtatagtaactaatggcaaaaattcatggctagtgatgtataaaataaaatattctttgcagtaaaatattccctttgttaatgttatagaaggggggatacaaaaaggaactaacaatttgtatggcagtgtcagatatttttattttagtatttcctgttttggtttatttgcatcttagaagagcataatgacattgtttgatgaagcctaattatgctggactgttttgacctggtttaacccttctgataggtagttgtggatgctggggatgagaactgaataatctttgcctggagtgacactacactctagaatttccactttggagaatactcagttccaacttgtgattcctgatagaacagactttacttttctagcccagcattgatctagaagcagaggaatcccagcgccttttaaaagttgttatgtggttttcttttaaaaagctcctgtttttggaaagtagaatttatgggtacaacgtatgttcattatttgtacataaaataaaaccatttaaaaagtaatgctgatatttattctttaaaggcactaaacaaagatatgaaatattgatgacctggaagaagaaatcttcctccacacatcccatttaagtaggagatacatttaattaaagagaaatagatacttaatacttaatgttttgtgtttttacattgtttacagttttaagtatgttaaatacattaagtaacgatcagtttgcataatggtttttttagggtagagtttaaaatcagtaattcttagccttacataattataaagtaatggctcattttttgtttcagtattagatagtaaaactaaggctgtagaccagtccctggaccaagtgttaggagacctgagttccaatgtggttttgcctgggtattcttatttgtaaataatattattgattgaagattaggggaaatgatacatgtgaggaaagacatttgtaaaatttcttgggtttttactacataccgtattcattttttaaagaaataaacattttgaaagtta

SEQ ID NO: 26509 - DNA, 5830 bp, Homo sapiens
  source 1..5830: mol_type = unassigned DNA
ggtctgagggagcggggcggtctccgccggcgtcgcgcgcgctgtgtgtgagcggggtcgcgcgcgcgcgcggcaggcgagtgagggaacgaggagcggccgggtgtgagtgtgtgggagtgagagtgtgtgggagtggggtgagggagaagctgacgggacgcgaggctgtgagaaactgggcgagtgtgcgaggacgcccggccagcctgcgggagccgcagtcggcggaggagaaaggaggcggctcccggtatcccgaccccctccccctcctctccttcccccacttccagccgcccggcggcccgcgcttcctcgaaggccccagcccggctcagtcggccgagagcgagggaggagccccccgacccaggtgctggagtctgcttgtcagggaggggggcagtctgtgattctgagaacagagccaagaaggggaacagcaaattcagtcacagacaatcctccactcggtcaagagccacttttctcttcctgccttgcccccccgcagggggtaaggaactgagcgtttaatctttagccggttggctaccagctaaaattctacttatcttagtttctagtggatagctttcttattttgcccatgttttcttagaatccctgtttaatatacttttgtcagtagtagtatctaggagtagcagggagagtgacaataaattagccccttcttttttcccttgtcattcaggccccttttcctctccagagggaaattaccagtaaactcttctaaatcttccaccccttctcagtcatactgtgaagaaacacactaaagtggacattatttgaccagtgaacacgaacccagcttcaggcattggtttgttgtggcacatggagaaacatctcttttaaaatatctcccaattacccttttcacaatttgtatccacctaggatttgctgctggggtaagtcactagatttatttctcaaagctcccctctctatgagctgaaagactgaccaaccatgaacactagtaggggatggggaaaggggacagagcagagccagttgttccacactttgggaagcaggagtagcttttatcatcttcctctggggagcaggcatagagacataaactgagtgaaaatgggtggaggaagaacttctatacccacgaacaacatgtgaagagagagaaccaaacataaagtaaggagggtagacgttacatccaagaggaaataatccaggcaaggaagcacaagctgatcaagatgtgtagttctgtggctgccaagttgtggtttttgacagatcgtcgcatcagggaagactatcctcaaaaagagattttacgagcattgaaggccaaatgttgtgaggaggaactggactttagggctgtggtgatggatgaggtggtgctgacaatcgagcaaggaaacctgggtctgcggatcaatggagagctaatcactgcctacccacaagtggtggtagtcagagtaccaaccccttgggtgcaaagtgatagtgacatcactgttttgcgccatctagagaagatgggatgtcggttaatgaaccgacctcaagccatcctgaactgcgttaataagttctggacatttcaagagttggctggccatggtgttcctctgccggatactttctcttatggtggccacgaaaattttgctaaaatgattgatgaggctgaagttctggagttcccaatggtagtaaagaatacgcggggtcacagaggtaaagctgttttcttggctcgagataagcaccatttggctgatctaagccatcttattcgccatgaagcgccatacctgttccagaagtatgttaaagagtctcatggacgggatgtacgtgtcattgtcgtgggaggccgtgtggttggcaccatgttacgttgttcaacagatgggagaatgcaaagcaactgctcattaggtggtgtggggatgatgtgctcattgagtgaacaagggaagcagctagctatccaggtgtctaatatcctggggatggatgtgtgtggcattgatctgctgatgaaagatgacggctccttctgcgtctgtgaggccaatgcaaatgtaggtttcatcgcctttgataaggcttgtaatctagatgtagctggtatcatagcagactatgccgcctcccttctaccctctggccggctcacccggcgtatgtccctgctctccgtggtgtccactgccagtgagactagtgagccggagctgggtcccccagccagcactgctgttgacaacatgagtgcaagttccagctctgttgacagcgaccctgaaagcacggagcgagagctgctcaccaagctcccagggggcctgttcaacatgaaccagctgctagccaatgaaatcaaactactggtggactgactccactggtaattaaccaacaaaacccttgtaaaactttctttcttcttttctatttttaaaaccaacttgcaatgctgttcatggaggatgctcaggaagatgagagaaaattagtaggattagttggagagagtgggagatagatgagacctctgctagtaagatgttactttcatttacaaatcctacaaatagagaggcagaataggtggggtatagaaaaatgtcaggctctcatagttacccttttaaattgctaaaaaatgtgtatgctcataggccatgaggaacaaatactttttttttttcatggtcccttgcttttgtttttgtacaaaaaaaaatggttttgctacaaatatccaagtagcataacttcacattgtgttggaagatttgtcatcagtgaggaaaacatctgcataaattacaggaatttttgtattatacagctctgaaaattctgccatttccttattaactagcagctttagtttgtagtttatgaaatcttgaggggctcttttactgggatttcttatttttttgttttttcccgcttaatttggtgggaggtcaaattgaatataacccaataaaggcttcttaatgacaaaattggcatgtttgcatgatgaaatggaaatgaacagtattgcaatgtccggtatacaaaataacattaattcaatgtagataaaattacactagtttaaaatatgtgcattcacttgtatttgttagtgttttagtcttttttgaaagatgtgctctgttaatgttgcttttttttttttttttaatacatgctagtctaacatttcctgctctatgcctgcatctttaacaatggccaaagtgaagaaaatgctaccttttttgttaacaagacactgacttgaaacatgtacatttaaagccttttattttttccctttttgttttggtagttgggcatttaaataaggacaaggaaaaatatttttgggggcaaatcaagagcctatgagttctaagtataaagctgaagtgatttcgaatgccagcgttatatatttgcatttttcacattttacgagggagtatatgtgtatgtgtgtgcacgcatgcatgtgtatgtgttttgctttttgtttccatcaactaatcaaaaaggataatttagaaaatggagcatgatgggaaacagagtttttgactttaaaaaacagatgagttgttttcataagtagactccactggggtagaggtattcaccttaaaacatagggtgagtagatgcttttttaggcctttttgtgtatatgtacgttgtttgtttttttccttttgtttctagcctgttcagtgtacagtttattcaaggctacatgcttttctttaatgcttctggctatgcattttctctttttacatataggatttgggattgggggtgggttggatgtttttgtttggggacttatttagtagtattgagtctcttatagccctactcttaagccttcaatactgtccactctttatattcctttacttgcagaatttataaaagcccccaaactgcatataatatgagcctttaaaacatgggtaaaactaatcccattgatgggtttggatggtatgttaagaaatggagatgctgcagagcccaacgtaattttttaaacagcaagttttccatctccctacgaatcctctgaagcttttacccaagccctttcttgcctctccagtgctattttccttcagatggaccttaaacataatttcttggacactactagagagacttcgaggcaataataaaagatcagtattaaccagctataacagaggtttgatcatgcttacttgtacagtttttcccccgttttaaaaaggaatgtaataaaatttgttttttccatagaattaaataatattaaaattgagtgaaaggttgattgttgatgaatagaatagtacctctcatctgtgcagtgtctcatttcacctcagagaaaaggatacataagaggagtttgtaatttatcttaggatattctaattgcatttaaaagaacttatcttgcgcagggtaaatgggggactcacatacatatattaatacctctgactcattaacagaaagaaatacttggtacttctttcgctgaatgaccatactgtggaggatgcatactatttggtatagagaaataaatgaggaagaaagaactgcttaattaaattatcattcatatgttcatatagagaccatctggttgccatgtgtattatgacacatacactttgaatagttacatatcacaagtatgtagttcatgtttgtgttggtggggtaaggcatcaggaaaaatgtagttagtcttttcttaacttataccaaattaaccaactatattataggaaatatgtgaaattagttcattagctttattcactattatgcattcacatgatattaaaacgtacactcacatgttagaatgaaaagagcagtagttatcttagattttaaaaacatggatatcttcttgaattccttcaagattgaggtagagaataagagcaaatcattctggaagtaccttaaggaaacaaacagcagcagatatttaggttaaacttattttcataattgtttaataacttttgtataatcttcattgctattatgagagagaatgtatatatcaaatatgtgtaatgataaaatctgaattgtaaaatttttgtatattgttaaaattgtaattctaaattgtatttcaaaaatgattatttctgatattgtttttatgtcacccatgatgaaaactggactttatatatctaaacatacaagtatgaactattctatttaaaatttttaatagtttttttcttttttggtgcctataattgattggtcatttctgctggcttttctccaatgaacattgaaatcttcctgtatatgttaccaataagaaaactaccctggaacagtagaaaaacccaacaagagacttggcattcatcaagcacattatcagactttgagaacatattgaaggcattgactttgaaaatcatctctttttctcaagaagaaagcaatggagaagcaaatttgtttcattcagtgaatccccagtttggggcttgtggggcttagagacattgtgaaatcaaatcttgtgttatacttttctcctggctcactttttttgagaaggtttatgggctatttggctggtgagacacgatcccctcctaagaaaatgtaggtgctcagacaggtaaccactgctgctactgtttttatttgtttgtttgttcaattttatttaagatttgtttttgttgtactaggattttaaaaaatgtaatatattgcaggatttataaccagg

SEQ ID NO: 26510 - DNA, 2236 bp, Homo sapiens
  source 1..2236: mol_type = unassigned DNA
agcaagcgggcgggcggcgttcggtctgagggagcggggcggtctccgccggcgtcgcgcgcgctgtgtgtgagcggggtcgcgcgcgcgcgcggcaggcgagtgagggaacgaggagcggccgggtgtgagtgtgtgggagtgagagtgtgtgggagtggggtgagggagaagctgacgggacgcgaggctgtgagaaactgggcgagtgtgcgaggacgcccggccagcctgcgggagccgcagtcggcggaggagaaaggaggcggctcccggtatcccgaccccctccccctcctctccttcccccacttccagccgcccggcggcccgcgcttcctcgaaggccccagcccggctcagtcggccgagagcgagggaggagccccccgacccaggtagacgttacatccaagaggaaataatccaggcaaggaagcacaagctgatcaagatgtgtagttctgtggctgccaagttgtggtttttgacagatcgtcgcatcagggaagactatcctcaaaaagagattttacgagcattgaaggccaaatgttgtgaggaggaactggactttagggctgtggtgatggatgaggtggtgctgacaatcgagcaaggaaacctgggtctgcggatcaatggagagctaatcactgcctacccacaagtggtggtagtcagagtaccaaccccttgggtgcaaagtgatagtgacatcactgttttgcgccatctagagaagatgggatgtcggttaatgaaccgacctcaagccatcctgaactgcgttaataagttctggacatttcaagagttggctggccatggtgttcctctgccggatactttctcttatggtggccacgaaaattttgctaaaatgattgatgaggctgaagttctggagttcccaatggtagtaaagaatacgcggggtcacagaggtaaagctgttttcttggctcgagataagcaccatttggctgatctaagccatcttattcgccatgaagcgccatacctgttccagaagtatgttaaagagtctcatggacgggatgtacgtgtcattgtcgtgggaggccgtgtggttggcaccatgttacgttgttcaacagatgggagaatgcaaagcaactgctcattaggtggtgtggggatgatgtgctcattgagtgaacaagggaagcagctagctatccaggtgtctaatatcctggggatggatgtgtgtggcattgatctgctgatgaaagatgacggctccttctgcgtctgtgaggccaatgcaaatgtaggtttcatcgcctttgataaggcttgtaatctagatgtagctggtatcatagcagactatgccgcctcccttctaccctctggccggctcacccggcgtatgtccctgctctccgtggtgtccactgccagtgagactagtgagccggagctgggtcccccagccagcactgctgttgacaacatgagtgcaagttccagctctgttgacagcgaccctgaaagcacggagcgagagctgctcaccaagctcccagggggcctgttcaacatgaaccagctgctagccaatgaaatcaaactactggtggactgactccactggtaattaaccaacaaaacccttgtaaaactttctttcttcttttctatttttaaaaccaacttgcaatgctgttcatggaggatgctcaggaagatgagagaaaattagtaggattagttggagagagtgggagatagatgagacctctgctagtaagatgttactttcatttacaaatcctacaaatagagaggcagaataggtggggtatagaaaaatgtcaggctctcatagttacccttttaaattgctaaaaaatgtgtatgctcataggccatgaggaacaaatactttttttttttcatggtcccttgcttttgtttttgtacaaaaaaaaatggttttgctacaaatatccaagtagcataacttcacattgtgttggaagatttgtcatcagtgaggaaaacatctgcataaattacaggaatttttgtattatacagctctgaaaattctgccatttccttattaactagcagctttagtttgtagtttatgaaatcttgaggggctcttttactgggatttcttatttttttgttttttcccgcttaatttggtgggaggtcaaattgaatataacccaataaaggcttcttaatgacaaaa

SEQ ID NO: 26511 - DNA, 5392 bp, Homo sapiens
  source 1..5392: mol_type = unassigned DNA
ggggaacagcaaattcagtcacagacaatcctccactcggtcaagagccacttttctcttcctgccttgcccccccgcagggggtaaggaactgagcgtttaatctttagccggttggctaccagctaaaattctacttatcttagtttctagtggatagctttcttattttgcccatgttttcttagaatccctgtttaatatacttttgtcagtagtagtatctaggagtagcagggagagtgacaataaattagccccttcttttttcccttgtcattcaggccccttttcctctccagagggaaattaccagtaaactcttctaaatcttccaccccttctcagtcatactgtgaagaaacacactaaagtggacattatttgaccagtgaacacgaacccagcttcaggcattggtttgttgtggcacatggagaaacatctcttttaaaatatctcccaattacccttttcacaatttgtatccacctaggatttgctgctggggtaagtcactagatttatttctcaaagctcccctctctatgagctgaaagactgaccaaccatgaacactagtaggggatggggaaaggggacagagcagagccagttgttccacactttgggaagcaggagtagcttttatcatcttcctctggggagcaggcatagagacataaactgagtgaaaatgggtggaggaagaacttctatacccacgaacaacatgtgaagagagagaaccaaacataaagtaaggagggtagacgttacatccaagaggaaataatccaggcaaggaagcacaagctgatcaagatgtgtagttctgtggctgccaagttgtggtttttgacagatcgtcgcatcagggaagactatcctcaaaaagagattttacgagcattgaaggccaaatgttgtgaggaggaactggactttagggctgtggtgatggatgaggtggtgctgacaatcgagcaaggaaacctgggtctgcggatcaatggagagctaatcactgcctacccacaagtggtggtagtcagagtaccaaccccttgggtgcaaagtgatagtgacatcactgttttgcgccatctagagaagatgggatgtcggttaatgaaccgacctcaagccatcctgaactgcgttaataagttctggacatttcaagagttggctggccatggtgttcctctgccggatactttctcttatggtggccacgaaaattttgctaaaatgattgatgaggctgaagttctggagttcccaatggtagtaaagaatacgcggggtcacagaggtaaagctgttttcttggctcgagataagcaccatttggctgatctaagccatcttattcgccatgaagcgccatacctgttccagaagtatgttaaagagtctcatggacgggatgtacgtgtcattgtcgtgggaggccgtgtggttggcaccatgttacgttgttcaacagatgggagaatgcaaagcaactgctcattaggtggtgtggggatgatgtgctcattgagtgaacaagggaagcagctagctatccaggtgtctaatatcctggggatggatgtgtgtggcattgatctgctgatgaaagatgacggctccttctgcgtctgtgaggccaatgcaaatgtaggtttcatcgcctttgataaggcttgtaatctagatgtagctggtatcatagcagactatgccgcctcccttctaccctctggccggctcacccggcgtatgtccctgctctccgtggtgtccactgccagtgagactagtgagccggagctgggtcccccagccagcactgctgttgacaacatgagtgcaagttccagctctgttgacagcgaccctgaaagcacggagcgagagctgctcaccaagctcccagggggcctgttcaacatgaaccagctgctagccaatgaaatcaaactactggtggactgactccactggtaattaaccaacaaaacccttgtaaaactttctttcttcttttctatttttaaaaccaacttgcaatgctgttcatggaggatgctcaggaagatgagagaaaattagtaggattagttggagagagtgggagatagatgagacctctgctagtaagatgttactttcatttacaaatcctacaaatagagaggcagaataggtggggtatagaaaaatgtcaggctctcatagttacccttttaaattgctaaaaaatgtgtatgctcataggccatgaggaacaaatactttttttttttcatggtcccttgcttttgtttttgtacaaaaaaaaatggttttgctacaaatatccaagtagcataacttcacattgtgttggaagatttgtcatcagtgaggaaaacatctgcataaattacaggaatttttgtattatacagctctgaaaattctgccatttccttattaactagcagctttagtttgtagtttatgaaatcttgaggggctcttttactgggatttcttatttttttgttttttcccgcttaatttggtgggaggtcaaattgaatataacccaataaaggcttcttaatgacaaaattggcatgtttgcatgatgaaatggaaatgaacagtattgcaatgtccggtatacaaaataacattaattcaatgtagataaaattacactagtttaaaatatgtgcattcacttgtatttgttagtgttttagtcttttttgaaagatgtgctctgttaatgttgcttttttttttttttttaatacatgctagtctaacatttcctgctctatgcctgcatctttaacaatggccaaagtgaagaaaatgctaccttttttgttaacaagacactgacttgaaacatgtacatttaaagccttttattttttccctttttgttttggtagttgggcatttaaataaggacaaggaaaaatatttttgggggcaaatcaagagcctatgagttctaagtataaagctgaagtgatttcgaatgccagcgttatatatttgcatttttcacattttacgagggagtatatgtgtatgtgtgtgcacgcatgcatgtgtatgtgttttgctttttgtttccatcaactaatcaaaaaggataatttagaaaatggagcatgatgggaaacagagtttttgactttaaaaaacagatgagttgttttcataagtagactccactggggtagaggtattcaccttaaaacatagggtgagtagatgcttttttaggcctttttgtgtatatgtacgttgtttgtttttttccttttgtttctagcctgttcagtgtacagtttattcaaggctacatgcttttctttaatgcttctggctatgcattttctctttttacatataggatttgggattgggggtgggttggatgtttttgtttggggacttatttagtagtattgagtctcttatagccctactcttaagccttcaatactgtccactctttatattcctttacttgcagaatttataaaagcccccaaactgcatataatatgagcctttaaaacatgggtaaaactaatcccattgatgggtttggatggtatgttaagaaatggagatgctgcagagcccaacgtaattttttaaacagcaagttttccatctccctacgaatcctctgaagcttttacccaagccctttcttgcctctccagtgctattttccttcagatggaccttaaacataatttcttggacactactagagagacttcgaggcaataataaaagatcagtattaaccagctataacagaggtttgatcatgcttacttgtacagtttttcccccgttttaaaaaggaatgtaataaaatttgttttttccatagaattaaataatattaaaattgagtgaaaggttgattgttgatgaatagaatagtacctctcatctgtgcagtgtctcatttcacctcagagaaaaggatacataagaggagtttgtaatttatcttaggatattctaattgcatttaaaagaacttatcttgcgcagggtaaatgggggactcacatacatatattaatacctctgactcattaacagaaagaaatacttggtacttctttcgctgaatgaccatactgtggaggatgcatactatttggtatagagaaataaatgaggaagaaagaactgcttaattaaattatcattcatatgttcatatagagaccatctggttgccatgtgtattatgacacatacactttgaatagttacatatcacaagtatgtagttcatgtttgtgttggtggggtaaggcatcaggaaaaatgtagttagtcttttcttaacttataccaaattaaccaactatattataggaaatatgtgaaattagttcattagctttattcactattatgcattcacatgatattaaaacgtacactcacatgttagaatgaaaagagcagtagttatcttagattttaaaaacatggatatcttcttgaattccttcaagattgaggtagagaataagagcaaatcattctggaagtaccttaaggaaacaaacagcagcagatatttaggttaaacttattttcataattgtttaataacttttgtataatcttcattgctattatgagagagaatgtatatatcaaatatgtgtaatgataaaatctgaattgtaaaatttttgtatattgttaaaattgtaattctaaattgtatttcaaaaatgattatttctgatattgtttttatgtcacccatgatgaaaactggactttatatatctaaacatacaagtatgaactattctatttaaaatttttaatagtttttttcttttttggtgcctataattgattggtcatttctgctggcttttctccaatgaacattgaaatcttcctgtatatgttaccaataagaaaactaccctggaacagtagaaaaacccaacaagagacttggcattcatcaagcacattatcagactttgagaacatattgaaggcattgactttgaaaatcatctctttttctcaagaagaaagcaatggagaagcaaatttgtttcattcagtgaatccccagtttggggcttgtggggcttagagacattgtgaaatcaaatcttgtgttatacttttctcctggctcactttttttgagaaggtttatgggctatttggctggtgagacacgatcccctcctaagaaaatgtaggtgctcagacaggtaaccactgctgctactgtttttatttgtttgtttgttcaattttatttaagatttgtttttgttgtactaggattttaaaaaatgtaatatattgcaggatttataaccag

SEQ ID NO: 26512 - DNA, 481 bp, Homo sapiens
  source 1..481: mol_type = unassigned DNA
cttttcgctccccgcgcgcgatccatcgcctctcttcccccgaggccagcgatggctcggccgcccggcggcccgcgcttcctcgaaggccccagcccggctcagtcggccgagagcgagggaggagccccccgacccaggtagacgttacatccaagaggaaataatccaggcaaggaagcacaagctgatcaagatgtgtagttctgtggctgccaagttgtggtttttgacagatcgtcgcatcagggaagactatcctcaaaaagagattttacgagcattgaaggccaaatgttgtgaggaggaactggactttagggctgtggtgatggatgaggtggtgctgacaatcgagcaaggaaacctgggtctgcggatcaatggagagctaatcactgcctacccacaagtggtggtagtcagagtaccaaccccttgggtgcaaagtgatagtgacatcactgttttgcgccatcta

SEQ ID NO: 26513 - DNA, 555 bp, Homo sapiens
  source 1..555: mol_type = unassigned DNA
gtttacgccggtttctagggggcagagctggcgctatccaccccgcctgtatctccaaacccgcttcagccaggaaatttatcatgtggttttaaatttgcctctcaatatacagaggtactgtctttactccagtcccggataaagaccttctaggtagacgttacatccaagaggaaataatccaggcaaggaagcacaagctgatcaagatgtgtagttctgtggctgccaagttgtggtttttgacagatcgtcgcatcagggaagactatcctcaaaaagagattttacgagcattgaaggccaaatgttgtgaggaggaactggactttagggctgtggtgatggatgaggtggtgctgacaatcgagcaaggaaacctgggtctgcggatcaatggagagctaatcactgcctacccacaagtggtggtagtcagagtaccaaccccttgggtgcaaagtgatagtgacatcactgttttgcgccatctagagaagatgggatgtcggttaatgaaccgacctcaagccatcctgaactgcgttaata

SEQ ID NO: 26514 - DNA, 2278 bp, Homo sapiens
  source 1..2278: mol_type = unassigned DNA
agcgcctctttcccttcggtgtggtgagtaagcgcagttgtcgtctcttgcggtgccgttgctggttctcacaccttttaggtctgttctcgtcttccgttccgactctctctttttcgttgcagccactgaagatcctggtgtcgccatgggccgccgccccgcccgttgttaccggtattgtaagaacaagccgtacccaaagtctcgcttctgccgaggtgtccctgatgccaagattcgcatttttgacctggggcggaaaaaggcaaaagtggatgagtttccgctttgtggccacatggtgtcagatgaatatgagcagctgtcctctgaagccctggaggctgcccgaatttgtgccaataagtacatggtaaaaagttgtggcaaagatggcttccatatccgggtgcggctccaccccttccacgtcatccgcatcaacaagatgttgtcctgtgctggggctgacaggctccaaacaggcatgcgaggtgcctttggaaagccccagggcactgtggccagggttcacattggccaagttatcatgtccatccgcaccaagctgcagaacaaggagcatgtgattgaggccctgcgcagggccaagttcaagtttcctggccgccagaagatccacatctcaaagaagtggggcttcaccaagttcaatgctgatgaatttgaagacatggtggctgaaaagcggctcatcccagatggctgtggggtcaagtacatccccaatcgtggccctctggacaagtggcgggccctgcactcatgagggcttccaatgtgctgcccccctcttaatactcaccaataaattctacttcctgtccacctatgtctttgtatctacattcttgacggggaaggaacttcctctgggaacctttgggtcattgccctttcacttcagaaacaggttgacaactcagccctgctcatgaggcagcaaaccctgcaaagggctgggactggtggccttatgtcagttgtctactctggagcttgacttggacctccccaggtcctaggcagtaggttgaaaaacactgaagtgcttttcatgaagcacagctgcagcaaagccttgcaatcccaggctggggtcagcctacagttgtgttgcttattacaacacatgcggaccaagaggggcttgtgggctagaggctgaccagcagcgtttatttagcaagggtaggtgtgcatcacattgggcttgttctcacccatctggtttggccattcctccttggtgggaatcatccaggtactgctgaggtcacctgcgatttgccccatttcctatctctagcaacctcctgggccccatgcccccaccccttctagaacctgcattcccagggccttcaccacctgaccaaaggtctaggctaacctttggtcatttgtaacaagacctcggaacagacacgtgtgtggcatggtttggcctggggatcttagatgtctgacctgaactattgtagaacagcgctggcttttgggggagcagcaaaaatgagaggagtgctaggtgggtggcctgagcatctgtatccagggacaggactccaaaggcttttggtcccagagctggggtatgttggccccagcccccagcctgtggctcccaaaaggcctctggttttttgtaatctcagtttacagccatttcttaggtttttaattacctttattttattttgccaaacatacctgggaataccttttattttttttttaccttggggtgatggttccaaaccataaatgtgattatagttaacacatgacccttctagcgtcccagccagtgtttttcctgacctctgttctttggagaggaggatggaagggaggggtccggcacgctgctggcattttgctgtgtcctgcagcccctttccgggacacctgggttcacacagctttttagcttacataactggtgcagattttctgtgtggagatgttgccttgaccagccttggctggactttaccaggcatgcagaagcctgtaccaacacagactacagcacccaggaggtgcgagtgtggctgctcagcggttataacaggcctgactgcattgttcaccggattataatgagccaaaatgtttcccggtgtttgctggtttcagggaaggagtttgatatagcagattaaccaccctccttgtagctattggggcttaatggtttcctggtgattcttaccaatccacaataaacatggcccattggcatatctgc

SEQ ID NO: 26515 - DNA, 1284 bp, Homo sapiens
  source 1..1284: mol_type = unassigned DNA
gcaattcctgacttgtactgccccagtggtgttacagcctcgaacccagtttccagacctaagtcaccgccggcatccagagtcccatgatggaaagggaggctaggttcccctgggaaggaccttgcaccactgctgcaagtgcaccccagaaatcgtcccaagcttttctcaaagggacctgcagccatttataaaagcgacatatcatcctggaaaacagaaatatacgtctgtcacagttaacggcaaagcctagggcaagagttctacgcccaagatggccagccggaagcgggcttctcgcgaccatgtggcgaagccccattcgtcagctggccgcccgcggccctggtacccggtcacctctctgatctgcgcatgtgctgggctacgcccgggcgcaagcgccaagagcggctgcgtctatggtcatgacgtctgacagagcgtccacccgtcttcgacaggactctatggttcttacgcgcgcagacagaccgcctatataagccatgcgcaggcggaggagcgcctctttcccttcggtgtgccactgaagatcctggtgtcgccatgggccgccgccccgcccgttgttaccggtattgtaagaacaagccgtacccaaagtctcgcttctgccgaggtgtccctgatgccaagattcgcatttttgacctggggcggaaaaaggcaaaagtggatgagtttccgctttgtggccacatggtgtcagatgaatatgagcagctgtcctctgaagccctggaggctgcccgaatttgtgccaataagtacatggtaaaaagttgtggcaaagatggcttccatatccgggtgcggctccaccccttccacgtcatccgcatcaacaagatgttgtcctgtgctggggctgacaggctccaaacaggcatgcgaggtgcctttggaaagccccagggcactgtggccagggttcacattggccaagttatcatgtccatccgcaccaagctgcagaacaaggagcatgtgattgaggccctgcgcagggccaagttcaagtttcctggccgccagaagatccacatctcaaagaagtggggcttcaccaagttcaatgctgatgaatttgaagacatggtggctgaaaagcggctcatcccagatggctgtggggtcaagtacatccccaatcgtggccctctggacaagtggcgggccctgcactcatgagggcttccaatgtgctgcccccctcttaatactcaccaataaattctacttcctgtccaccta

SEQ ID NO: 26516 - DNA, 2318 bp, Homo sapiens
  source 1..2318: mol_type = unassigned DNA
gggctacgcccgggcgcaagcgccaagagcggctgcgtctatggtcatgacgtctgacagagcgtccacccgtcttcgacaggactctatggttcttacgcgcgcagacagaccgcctatataagccatgcgcaggcggaggagcgcctctttcccttcggtgtgccactgaagatcctggtgtcgccatgggccgccgccccgcccgttgttaccggtattgtaagaacaagccgtacccaaagtctcgcttctgccgaggtgtccctgatgccaagattcgcatttttgacctggggcggaaaaaggcaaaagtggatgagtttccgctttgtggccacatggtgtcagatgaatatgagcagctgtcctctgaagccctggaggctgcccgaatttgtgccaataagtacatggtaaaaagttgtggcaaagatggcttccatatccgggtgcggctccaccccttccacgtcatccgcatcaacaagatgttgtcctgtgctggggctgacaggctccaaacaggcatgcgaggtgcctttggaaagccccagggcactgtggccagggttcacattggccaagttatcatgtccatccgcaccaagctgcagaacaaggagcatgtgattgaggccctgcgcagggccaagttcaagtttcctggccgccagaagatccacatctcaaagaagtggggcttcaccaagttcaatgctgatgaatttgaagacatggtggctgaaaagcggctcatcccagatggctgtggggtcaagtacatccccaatcgtggccctctggacaagtggcgggccctgcactcatgagggcttccaatgtgctgcccccctcttaatactcaccaataaattctacttcctgtccacctatgtctttgtatctacattcttgacggggaaggaacttcctctgggaacctttgggtcattgccctttcacttcagaaacaggttgacaactcagccctgctcatgaggcagcaaaccctgcaaagggctgggactggtggccttatgtcagttgtctactctggagcttgacttggacctccccaggtcctaggcagtaggttgaaaaacactgaagtgcttttcatgaagcacagctgcagcaaagccttgcaatcccaggctggggtcagcctacagttgtgttgcttattacaacacatgcggaccaagaggggcttgtgggctagaggctgaccagcagcgtttatttagcaagggtaggtgtgcatcacattgggcttgttctcacccatctggtttggccattcctccttggtgggaatcatccaggtactgctgaggtcacctgcgatttgccccatttcctatctctagcaacctcctgggccccatgcccccaccccttctagaacctgcattcccagggccttcaccacctgaccaaaggtctaggctaacctttggtcatttgtaacaagacctcggaacagacacgtgtgtggcatggtttggcctggggatcttagatgtctgacctgaactattgtagaacagcgctggcttttgggggagcagcaaaaatgagaggagtgctaggtgggtggcctgagcatctgtatccagggacaggactccaaaggcttttggtcccagagctggggtatgttggccccagcccccagcctgtggctcccaaaaggcctctggttttttgtaatctcagtttacagccatttcttaggtttttaattacctttattttattttgccaaacatacctgggaataccttttattttttttttaccttggggtgatggttccaaaccataaatgtgattatagttaacacatgacccttctagcgtcccagccagtgtttttcctgacctctgttctttggagaggaggatggaagggaggggtccggcacgctgctggcattttgctgtgtcctgcagcccctttccgggacacctgggttcacacagctttttagcttacataactggtgcagattttctgtgtggagatgttgccttgaccagccttggctggactttaccaggcatgcagaagcctgtaccaacacagactacagcacccaggaggtgcgagtgtggctgctcagcggttataacaggcctgactgcattgttcaccggattataatgagccaaaatgtttcccggtgtttgctggtttcagggaaggagtttgatatagcagattaaccaccctccttgtagctattggggcttaatggtttcctggtgattcttaccaatccacaataaacatggcccattggcatatctgc

SEQ ID NO: 26517 - DNA, 657 bp, Homo sapiens
  source 1..657: mol_type = unassigned DNA
ggaggagcgcctctttcccttcggtgtggtgaccactgaagatcctggtgtcgccatgggccgccgccccgcccgttgttaccggtattgtaagaacaagccgtacccaaagtctcgcttctgccgaggtgtccctgatgccaagattcgcatttttgacctggggcggaaaaaggcaaaagtggatgagtttccgctttgtggccacatggtgtcagatgaatatgagcagctgtcctctgaagccctggaggctgcccgaatttgtgccaataagtacatggtaaaaagttgtggcaaagatggcttccatatccgggtgcggctccaccccttccacgtcatccgcatcaacaagatgttgtcctgtgctggggctgacaggctccaaacaggcatgcgaggtgcctttggaaagccccagggcactgtggccagggttcacattggccaagttatcatgtccatccgcaccaagctgcagaacaaggagcatgtgattgaggccctgcgcagggccaagttcaagtttcctggccgccagaagatccacatctcaaagaagtggggcttcaccaagttcaatgctgatgaatttgaagacatggtggctgaaaagcggctcatcccagatggctgtggggtcaagtacatccc

SEQ ID NO: 26518 - DNA, 713 bp, Homo sapiens
  source 1..713: mol_type = unassigned DNA
ccaaagtctcgcttctgccgaggtgtccctgatgccaagattcgcatttttgacctggggcggaaaaaggcaaaagtggatgagtttccgctttgtggccacatggtgtcagatgaatatgagcagctgtcctctgaagccctggaggctgcccgaatttgtgccaataagtacatggtaaaaagttgtggcaaagatggcttccatatccgggtgcggctccaccccttccacgtcatccgcatcaacaagatgttgtcctgtgctggggctgacaggcctaccttgctctgccagtgctgggagacctccagaaacacatcgtagagggcgttcagctccttctctacggccttaggagtggtgtgcagcgggaccaacaccaggctgggaaggactgcaaggcccagggaccgagggctgccatccactcctggaccttctccccctagcccgtctgggtgaggaagcccccagtggagccagccagaactccccttctgctcccacataccaagcccacccttcccttcctaccattgctgggcaaagagaactgggccacaaatggctcccgggcaaagacgtcatcctcatcgttgtacacgtaggaactcaggacctgtgttttgtgtgacctgggaggacaaagggatgggcagcagtggccccacgtctttgattttggcttgcaagtgccaaacggcgctcag

SEQ ID NO: 26519 - DNA, 585 bp, Homo sapiens
  source 1..585: mol_type = unassigned DNA
tctttcccttcggtgtgccactgaagatcctggtgtcgccatgggccgccgccccgcccgttgttaccggtattgtaagaacaagccgtacccaaagtctcgcttctgccgaggtgtccctgatgccaagattcgcatttttgacctggggcggaaaaaggcaaaagtggatgagtttccgctttgtggccacatggtgtcagatgaatatgagcagctgtcctctgaagccctggaggctgcccgaatttgtgccaataagtacatggtaaaaagttgtggcaaagatggcttccatatccgggtgcggctccaccccttccacgtcatccgcatcaacaagatgttgtcctgtgctggggctgacagatccacatctcaaagaagtggggcttcaccaagttcaatgctgatgaatttgaagacatggtggctgaaaagcggctcatcccagatggctgtggggtcaagtacatccccaatcgtggccctctggacaagtggcgggccctgcactcatgagggcttccaatgtgctgcccccctcttaatactcaccaataaattctacttcctgtccaccta

SEQ ID NO: 26520 - DNA, 634 bp, Homo sapiens
  source 1..634: mol_type = unassigned DNA
aaggccctcggccggaagctccgctttctcttcctgctctccatcatggcgcaggatcaaggtgaaaaggagaaccccatgcgggaacttcgcatccgcaaactctgtctcaacatctgtgttggggagagtggagacagactgacgcgagcagccaaggtgttggagcagctcacagggcagacccctgtgttttccaaagctagatacactgtcagatcctttggcatccggagaaatgaaaagattgctgtccactgcacagttcgaggggccaaggcagaagaaatcttggagaagggtctaaaggtgcgggagtatgagttaagaaaaaacaacttctcagatactggaaactttggttttgggatccaggaacacatcgatctgggtatcaaatatgacccaagcattggtatctacggcctggacttctatgtggtgctgggtaggccaggtttcagcatcgcagacaagaagcgcaggacaggctgcattggggccaaacacagaatcagcaaagaggaggccatgcgctggttccagcagaagtatgatgggatcatccttcctggcaaataaattcccgtttctatccaaaagagcaataaaaagttttcagtgaaatgtgcaa

SEQ ID NO: 26521 - DNA, 994 bp, Homo sapiens
  source 1..994: mol_type = unassigned DNA
caggatcaaggtgaaaaggagaaccccatgcgggaacttcgcatccgcaaactctgtctcaacatctgtgttggggagagtggagacagactgacgcgagcagccaaggtgttggagcagctcacagggcagacccctgtgttttccaaagctagatacactgtcagatcctttggcatccggagaaatgaaaagattgctgtccactgcacagttcgaggggccaaggcagaagaaatcttggagaagggtctaaaggtgcgggagtatgagttaagaaaaaacaacttctcagatactggaaactttggttttgggatccaggaacacatcgatctgggtatcaaatatgacccaagcattggtatctacggcctggacttctatgtggtatgaatatttaatcttttcccgctcctggtctgtgaggagaggggaatctttatttcatatgtggtatgttggtgttcacatgttgagttgcagctttgaatattgtctgcctttgtgttctcctcccccttggggaaatgtgcctcatttgtggcaaatgtaggggtgcagctctgaacaaggtggacaagatccctgctgttggggaacttgcagtcgaggatctgtaaagcacccacatggcttaaaggtggatgaaggaaactgttccctccagccagtgatttgaaactttggagagaggcagtattggtgccacatttggcctatgggttggttggctgcactgaggctgttctccccctggttcttcctatagaaacagctttgggtgatgcagtggtttgctcaggaagggggttttaacatagaaatgaccttttgtgttactgccgtgttttggtccaacaataaaactgaatagcctaaatcagaagtcctgactagtgtggaacctgaaagatggtggcaccctcattagacagacaagtaataagacttggatactcacaggatgttggaggaacagcacacctttggg

SEQ ID NO: 26522 - DNA, 721 bp, Homo sapiens
  source 1..721: mol_type = unassigned DNA
caggatcaaggtgaaaaggagaaccccatgcgggaacttcgcatccgcaaactctgtctcaacatctgtgttggggagagtggagacagactgacgcgagcagccaaggtgttggagcagctcacagggcagacccctgtgttttccaaagctagatacactgtcagatcctttggcatccggagaaatgaaaagattgctgtccactgcacagttcgaggggccaaggcagaagaaatcttggagaagggtctaaaggtgcgggagtatgagttaagaaaaaacaacttctcagatactggaaactttggttttgggatccaggaacacatcgatctgggtatcaaatatgacccaagcattggtatctacggcctggacttctatgtggtgctgggtaggccaggtttcagcatcgcagacaagaagcgcaggacaggctgcattggggccaaacacagaatcagcaaagaggaggccatgcgctggttccagcagaaggtaaagctgatttatctcaagtgaagtggtggaatgtgatgttggtgaatggagttgggatttggggatgcaaaatatagtactatttgctgggtatcttctttaaagttagaatattgggcatcttgacaaatcaggggcttccagggatgatggtttaaaagaacatccagaactaggccttctccctgtcaccatgaatgggggtagatggaagggg

SEQ ID NO: 26523 - DNA, 633 bp, Homo sapiens
  source 1..633: mol_type = unassigned DNA
ctctcggctttcggctcggaggaggccaaggtgcaacttccttcggtcgtcccgaatccgggttcatccgacaccagccgcctccaccatgccgccgaagttcgaccccaacgagatcaaagtcgtatacctgaggtgcaccggaggtgaagtcggtgccacttctgccctggcccccaagatcggccccctgggtctgtctccaaaaaaagttggtgatgacattgccaaggcaacgggtgactggaagggcctgaggattacagtgaaactgaccattcagaacagacaggcccagattgaggtggtgccttctgcctctgccctgatcatcaaagccctcaaggaaccaccaagagacagaaagaaacagaaaaacattaaacacagtgggaatatcacttttgatgagattgtcaacattgctcgacagatgcggcaccgatccttagccagagaactctctggaaccattaaagagatcctggggactgcccagtcagtgggctgtaatgttgatggccgccatcctcatgacatcatcgatgacatcaacagtggtgctgtggaatgcccagccagttaagcacaaaggaaaacatttcaataaaggatcatttgacaactggtgga

SEQ ID NO: 26524 - DNA, 499 bp, Homo sapiens
  source 1..499: mol_type = unassigned DNA
gcaacttccttcggtcgtcccgaatccgggttcatccgacaccagccgcctccaccatgccgccgaagttcgaccccaacgagatcaaagtcgtatacctgaggtgcaccggaggtgaagtcggtgccacttctgccctggcccccaagatcggccccctgggtctgattgaggtggtgccttctgcctctgccctgatcatcaaagccctcaaggaaccaccaagagacagaaagaaacagaaaaacattaaacacagtgggaatatcacttttgatgagattgtcaacattgctcgacagatgcggcaccgatccttagccagagaactctctggaaccattaaagagatcctggggactgcccagtcagtgggctgtaatgttgatggccgccatcctcatgacatcatcgatgacatcaacagtggtgctgtggaatgcccagccagttaagcacaaaggaaaacatttcaataaaggatcatttgacaactggt

SEQ ID NO: 26525 - DNA, 2221 bp, Homo sapiens
  source 1..2221: mol_type = unassigned DNA
gctatcatcccagagtgcattgcggggccgcttcctttccgctcggctgttttcctgcgcaggagccgcagggccgtaggcagccatggcgcccagccggaatggcatggtcttgaagccccacttccacaaggactggcagcggcgcgtggccacgtggttcaaccagccggcccgtaagatccgcagacgtaaggcccggcaagccaaggcgcgccgcatcgccccgcgccccgcgtcgggtcccatccggcccatcgtgcgctgccccacggttcggtaccacacgaaggtgcgcgccggccgcggcttcagcctggaggagctcagggtggccggcattcacaagaaggtggcccggaccatcggcatttctgtggatccgaggaggcggaacaagtccacggagtccctgcaggccaacgtgcagcggctgaaggagtaccgctccaaactcatcctcttccccaggaagccctcggcccccaagaagggagacagttctgctgaagaactgaaactggccacccagctgaccggaccggtcatgcccgtccggaacgtctataagaaggagaaagctcgagtcatcactgaggaagagaagaatttcaaagccttcgctagtctccgtatggcccgtgccaacgcccggctcttcggcatacgggcaaaaagagccaaggaagccgcagaacaggatgttgaaaagaaaaaataaagccctcctggggacttggaatcagtcggcagtcatgctgggtctccacgtggtgtgtttcgtgggaacaactgggcctgggatggggcttcactgctgtgacttcctcctgccaggggatttggggctttcttgaaagacagtccaagccctggataatgctttactttctgtgttgaagcactgttggttgtttggttagtgactgatgtaaaacggttttcttgtggggaggttacagaggctgacttcagagtggacttgtgttttttctttttaaagaggcaaggttgggctggtgctcacagctgtaatcccagcactttgaggttggctgggagttcaagaccagcctggccaacatgtcagaactactaaaaataaagaaatcagccatgcttggtgctgcacacttgtagttgcagctcctgggaggcagaggtgagggatcacttaacccaggaggcagaggctgcactgagccaggatcacgccactgcactctagcctgggcaacagtgagactgtctcaaaaaaaaaaaaagagacagggtcttcggcacccaggctggagtacagtgccacaatcatggctcactgcagtcttgaactcatggcctcaagcagtcctccctcagcctcccaagtagaggggtttataggcacgagaccctgcacccaacctagagttgccttttttaagcaaagcagtttctagttaatgtagcatcttggactttggggcgtcattcttaagcttgttgtgcccggtaaccatggtcctcttgctctgattaacccttccttcaatgggcttcttcacccagacaccaaggtatgagatggccctgccaagtgtcggcctctcctgttaaacaaaaacattctaaagccattgttcttgcttcatggacaagaggcagccagagagagtgccagggtgccctggtctgagctggcatccccatgtcttctgtgtccgagggcagcatggtttctcgtgcagtgctcagacacagcctgccctagtcctaccagctcacagcagcacctgctctccttggcagctatggccatgacaaccccagagaagcagcttcagggaccgagtcagattctgttttgtctacatgcctctgccgggtgccggtattgaggcacccagggagctgttactggcgtggaaataggtgatgctgctacctctgctgctgcactcacagccacacttgatacacgatgacaccttgcttgtttggaaacatctaaacatctagtagatgacttgcaggctgttggctaccagtttcctgtctgaggtgtatatgttaacttcgtgatcagtttgtatgtttgggactcttgtcctatgtaaagttaaggtgggccgggtgcagtggctcacgcctgtaatcctaacactgggaggccgaggcgggtggatcacctgatggtgaaacctcatctctactgaaaatacaaaaattagctgagtggtga

SEQ ID NO: 26526 - DNA, 2385 bp, Homo sapiens
  source 1..2385: mol_type = unassigned DNA
aggtgagggagactgggtcctggcctttgggcatcatccagcgccatcggcctggcgcttcagccaacgcgggagtggatgggccccttcttcttcgcagacagcgttcggccgctgcccgggctctaggcgcggccggacggcccagtctggagggttcggggcggaggcccgggggggtgcgcgcgcccggggtccggcctctcactcgctcccctctcgtccgcagccgcagggccgtaggcagccatggcgcccagccggaatggcatggtcttgaagccccacttccacaaggactggcagcggcgcgtggccacgtggttcaaccagccggcccgtaagatccgcagacgtaaggcccggcaagccaaggcgcgccgcatcgccccgcgccccgcgtcgggtcccatccggcccatcgtgcgctgccccacggttcggtaccacacgaaggtgcgcgccggccgcggcttcagcctggaggagctcagggtggccggcattcacaagaaggtggcccggaccatcggcatttctgtggatccgaggaggcggaacaagtccacggagtccctgcaggccaacgtgcagcggctgaaggagtaccgctccaaactcatcctcttccccaggaagccctcggcccccaagaagggagacagttctgctgaagaactgaaactggccacccagctgaccggaccggtcatgcccgtccggaacgtctataagaaggagaaagctcgagtcatcactgaggaagagaagaatttcaaagccttcgctagtctccgtatggcccgtgccaacgcccggctcttcggcatacgggcaaaaagagccaaggaagccgcagaacaggatgttgaaaagaaaaaataaagccctcctggggacttggaatcagtcggcagtcatgctgggtctccacgtggtgtgtttcgtgggaacaactgggcctgggatggggcttcactgctgtgacttcctcctgccaggggatttggggctttcttgaaagacagtccaagccctggataatgctttactttctgtgttgaagcactgttggttgtttggttagtgactgatgtaaaacggttttcttgtggggaggttacagaggctgacttcagagtggacttgtgttttttctttttaaagaggcaaggttgggctggtgctcacagctgtaatcccagcactttgaggttggctgggagttcaagaccagcctggccaacatgtcagaactactaaaaataaagaaatcagccatgcttggtgctgcacacttgtagttgcagctcctgggaggcagaggtgagggatcacttaacccaggaggcagaggctgcactgagccaggatcacgccactgcactctagcctgggcaacagtgagactgtctcaaaaaaaaaaaaagagacagggtcttcggcacccaggctggagtacagtgccacaatcatggctcactgcagtcttgaactcatggcctcaagcagtcctccctcagcctcccaagtagaggggtttataggcacgagaccctgcacccaacctagagttgccttttttaagcaaagcagtttctagttaatgtagcatcttggactttggggcgtcattcttaagcttgttgtgcccggtaaccatggtcctcttgctctgattaacccttccttcaatgggcttcttcacccagacaccaaggtatgagatggccctgccaagtgtcggcctctcctgttaaacaaaaacattctaaagccattgttcttgcttcatggacaagaggcagccagagagagtgccagggtgccctggtctgagctggcatccccatgtcttctgtgtccgagggcagcatggtttctcgtgcagtgctcagacacagcctgccctagtcctaccagctcacagcagcacctgctctccttggcagctatggccatgacaaccccagagaagcagcttcagggaccgagtcagattctgttttgtctacatgcctctgccgggtgccggtattgaggcacccagggagctgttactggcgtggaaataggtgatgctgctacctctgctgctgcactcacagccacacttgatacacgatgacaccttgcttgtttggaaacatctaaacatctagtagatgacttgcaggctgttggctaccagtttcctgtctgaggtgtatatgttaacttcgtgatcagtttgtatgtttgggactcttgtcctatgtaaagttaaggtgggccgggtgcagtggctcacgcctgtaatcctaacactgggaggccgaggcgggtggatcacctgatggtgaaacctcatctctactgaaaatacaaaaattagctgagtggtga

SEQ ID NO: 26527 - DNA, 1457 bp, Homo sapiens
  source 1..1457: mol_type = unassigned DNA
cctttccgctcggctgttttcctgcgcaggagccgcagggccgtaggcagccatggcgcccagccggaatggcatggtcttgaagccccacttccacaaggactggcagcggcgcgtggccacgtggttcaaccagccggcccgtaagatccgcagacgtaaggcccggcaagccaaggcgcgccgcatcgccccgcgccccgcgtcgggtcccatccggcccatcgtgcgctgccccacggttcggtaccacacgaaggtgcgcgccggccgcggcttcagcctggaggagctcagggtggccggcattcacaagaagggagacagttctgctgaagaactgaaactggccacccagctgaccggaccggtcatgcccgtccggaacgtctataagaaggagaaagctcgagtcatcactgaggaagagaagaatttcaaagccttcgctagtctccgtatggcccgtgccaacgcccggctcttcggcatacgggcaaaaagagccaaggaagccgcagaacaggatgttgaaaagaaaaaataaagccctcctggggacttggaatcagtcggcagtcatgctgggtctccacgtggtgtgtttcgtgggaacaactgggcctgggatggggcttcactgctgtgacttcctcctgccaggggatttggggctttcttgaaagacagtccaagccctggataatgctttactttctgtgttgaagcactgttggttgtttggttagtgactgatgtaaaacggttttcttgtggggaggttacagaggctgacttcagagtggacttgtgttttttctttttaaagaggcaaggttgggctggtgctcacagctgtaatcccagcactttgaggttggctgggagttcaagaccagcctggccaacatgtcagaactactaaaaataaagaaatcagccatgcttggtgctgcacacttgtagttgcagctcctgggaggcagaggtgagggatcacttaacccaggaggcagaggctgcactgagccaggatcacgccactgcactctagcctgggcaacagtgagactgtctcaaaaaaaaaaaaagagacagggtcttcggcacccaggctggagtacagtgccacaatcatggctcactgcagtcttgaactcatggcctcaagcagtcctccctcagcctcccaagtagaggggtttataggcacgagaccctgcacccaacctagagttgccttttttaagcaaagcagtttctagttaatgtagcatcttggactttggggcgtcattcttaagcttgttgtgcccggtaaccatggtcctcttgctctgattaacccttccttcaatgggcttcttcacccagacaccaaggtatgagatggccctgccaagtgtcggcctctcctgttaaacaaaaacattctaaagccattgttcttgcttcat

SEQ ID NO: 26528 - DNA, 2600 bp, Homo sapiens
  source 1..2600: mol_type = unassigned DNA
tggaggagcttcacgcagtctggagctgaagggacacagcgagcgccccgacccgcgacgccccgactccgcgaaggcctccctgggaggctggggaagcgtcgggggatctctcagcgcagctctggggcccagatttctgcgcccgtcgtgcggtggccagagagggacagcgcagcgcggagacgcggagacgcagagactccgcagggggagagcccgcggtgcgtgaaacaaacctgttctctcctcagacctcaaagacagcggctccaccgcggtacgcggccaccggctttggagcctggaccccaacttgcctcctctcgcggagagacagtcgccgacgctcgcttagccgccgagacctcgccgccaactctctcacctctcgagacgcccaggccgctcaggctcgaatcttgcggagcagggggcgggacaatagcggccgcggcgccccactcggcagaactccgccaccaggcgcgatgccggaactacatgtcccatgacgctctgggaggccgcagctttccaccggaaagagggtggctgaggtgggggaggagcccaaaaggcattgtgggagtacagctctttcctttccgtctggcggcagccatcaggtaagccaagatgggtgcatacaagtacatccaggagctatggagaaagaagcagtctgatgtcatgcgctttcttctgagggtccgctgctggcagtaccgccagctctctgctctccacagggctccccgccccacccggcctgataaagcgcgccgactgggctacaaggccaagcaaggttacgttatatataggattcgtgttcgccgtggtggccgaaaacgcccagttcctaagggtgcaacttacggcaagcctgtccatcatggtgttaaccagctaaagtttgctcgaagccttcagtccgttgcagaggagcgagctggacgccactgtggggctctgagagtcctgaattcttactgggttggtgaagattccacatacaaattttttgaggttatcctcattgatccattccataaagctatcagaagaaatcctgacacccagtggatcaccaaaccagtccacaagcacagggagatgcgtgggctgacatctgcaggccgaaagagccgtggccttggaaagggccacaagttccaccacactattggtggctctcgccgggcagcttggagaaggcgcaatactctccagctccaccgttaccgctaatataagtaaagtttgtaaaattcatacttaataaacaatttaggacagtcatgtctgcttacaggtgttatttgtctgttaaaactagtctgcagatgtttcttgaatgctttgtcaaattaagaaagttaaagtgcaataatgtttgaagacaataagtggtggtgtatcttgtttctaataagataaacttttttgtctttgctttatcttattagggagttgtatgtcagtgtataaaacatactgtgtggtataacaggcttaataaattctttaaaaggagagaactgaaactagccctgtagatttgtctggtgcatgtgatgaaacctgcagctttatcggagtgatggcaatgctctgctggtttattttcaagtggctgcgttttttttagtttggcaggtgtagactttttaagttgggctttagaaaatctgggttagcctgaagaaaattgcctcagcctccacagtaccattttaaattcacataaaaggtgaaagctcctggttcagtgccatggcttcatggcattcagtgattagtggtaatggtaaacactggtgtgttttgaagttgaatgtgcgataaaattattagccttaagattggtaagctagcaatgaatgctagggtgggaagctggtgagccagtggccattagataaatacctttcaagtgtgagcttagacgtcaaccctaaaatacttaaccgtaatgctaattgtgatcattatgaatcccttcagtcacattagggggaaagtagttggctataagtacgtcattcttagtccagtcagtcttaaaaacatcttgggttacccactctgtccactcccataggctacagaaaaagtcacaagcgcatggtttccaaccatatgtgttttctgcagttatttctcttgttctggccaaacaaccctaaaaatccttaccattccacaaagttggaccatcacttgtgcacccactttgactatgagtataccaccacattgcatttctgtttgcaccatgtcttccaggagactagactactgttgtccagggtcaatttgagtgtaaagaaaatgtagacaaggaattgcccaattttaaattctgactttgctgacttaatttaaatgctcgttctgaaccaattttctcctatcttctctaggggtttcaaaagactcagttaattgatttccaggaagtactcatagcaagttcataaaagttcttgagacctaaatttcttcacaaaaaaagaaaagatcttaagtcatacattttaattgtgtagaggttgttcaactgaaggaataaatgtctattaaactaaaacaaa

SEQ ID NO: 26529 - DNA, 820 bp, Homo sapiens
  source 1..820: mol_type = unassigned DNA
gggctagctgtccccggcagttggtgcagagccattttcattcccggcggtttccttgtttttgttggggaactaagatggacggatacagtcgtcttattgtacttaaagcggatgatatttaatacacagtttgatttcacaggtaagccaagatgggtgcatacaagtacatccaggagctatggagaaagaagcagtctgatgtcatgcgctttcttctgagggtccgctgctggcagtaccgccagctctctgctctccacagggctccccgccccacccggcctgataaagcgcgccgactgggctacaaggccaagcaaggttacgttatatataggattcgtgttcgccgtggtggccgaaaacgcccagttcctaagggtgcaacttacggcaagcctgtccatcatggtgttaaccagctaaagtttgctcgaagccttcagtccgttgcagaggagcgagctggacgccactgtggggctctgagagtcctgaattcttactgggttggtgaagattccacatacaaattttttgaggttatcctcattgatccattccataaagctatcagaagaaatcctgacacccagtggatcaccaaaccagtccacaagcacagggagatgcgtgggctgacatctgcaggccgaaagagccgtggccttggaaagggccacaagttccaccacactattggtggctctcgccgggcagcttggagaaggcgcaatactctccagctccaccgttaccgctaatataagtaaagtttgtaaaattcatacttaataaacaatttaggacagtc

SEQ ID NO: 26530 - DNA, 562 bp, Homo sapiens
  source 1..562: mol_type = unassigned DNA
tcctttccgtctggcggcagccatcaggtaagccaagatgggtgcatacaagtacatccaggagctatggagaaagaagcagtctgatgtcatgcgctttcttctgagggtccgctgctggcagtaccgccagctctctgctctccacagggctccccgccccacccggcctgataaagcgcgccgactgggctacaaggccaagcaaggttacgttatatataggattcgtgttcgccgtggtggccgaaaacgcccagttcctaagggtgcaacttacggcaagcctgtccatcatggtgttaaccagctaaagtttgctcgaagccttcagtccgttgcagaggtaaatgctggacgccactgtggggctctgagagtcctgaattcttactgggttggtgaagattccacatacaaattttttgaggttatcctcattgatccattccataaagctatcagaagaaatcctgacacccagtggatcaccaaaccagtccacaagcacagggagatgcgtgggctgacatctgcaggccgaaagagccgtggccttgga

SEQ ID NO: 26531 - DNA, 2053 bp, Homo sapiens
  source 1..2053: mol_type = unassigned DNA
tgggagtacagctctttcctttccgtctggcggcagccatcaggtaggctgcgttgaggatctttgctcttccatccgcctttgatcgtcttcctcttcagccatccaggtaagccaagatgggtgcatacaagtacatccaggagctatggagaaagaagcagtctgatgtcatgcgctttcttctgagggtccgctgctggcagtaccgccagctctctgctctccacagggctccccgccccacccggcctgataaagcgcgccgactgggctacaaggccaagcaaggttacgttatatataggattcgtgttcgccgtggtggccgaaaacgcccagttcctaagggtgcaacttacggcaagcctgtccatcatggtgttaaccagctaaagtttgctcgaagccttcagtccgttgcagaggagcgagctggacgccactgtggggctctgagagtcctgaattcttactgggttggtgaagattccacatacaaattttttgaggttatcctcattgatccattccataaagctatcagaagaaatcctgacacccagtggatcaccaaaccagtccacaagcacagggagatgcgtgggctgacatctgcaggccgaaagagccgtggccttggaaagggccacaagttccaccacactattggtggctctcgccgggcagcttggagaaggcgcaatactctccagctccaccgttaccgctaatataagtaaagtttgtaaaattcatacttaataaacaatttaggacagtcatgtctgcttacaggtgttatttgtctgttaaaactagtctgcagatgtttcttgaatgctttgtcaaattaagaaagttaaagtgcaataatgtttgaagacaataagtggtggtgtatcttgtttctaataagataaacttttttgtctttgctttatcttattagggagttgtatgtcagtgtataaaacatactgtgtggtataacaggcttaataaattctttaaaaggagagaactgaaactagccctgtagatttgtctggtgcatgtgatgaaacctgcagctttatcggagtgatggcaatgctctgctggtttattttcaagtggctgcgttttttttagtttggcaggtgtagactttttaagttgggctttagaaaatctgggttagcctgaagaaaattgcctcagcctccacagtaccattttaaattcacataaaaggtgaaagctcctggttcagtgccatggcttcatggcattcagtgattagtggtaatggtaaacactggtgtgttttgaagttgaatgtgcgataaaattattagccttaagattggtaagctagcaatgaatgctagggtgggaagctggtgagccagtggccattagataaatacctttcaagtgtgagcttagacgtcaaccctaaaatacttaaccgtaatgctaattgtgatcattatgaatcccttcagtcacattagggggaaagtagttggctataagtacgtcattcttagtccagtcagtcttaaaaacatcttgggttacccactctgtccactcccataggctacagaaaaagtcacaagcgcatggtttccaaccatatgtgttttctgcagttatttctcttgttctggccaaacaaccctaaaaatccttaccattccacaaagttggaccatcacttgtgcacccactttgactatgagtataccaccacattgcatttctgtttgcaccatgtcttccaggagactagactactgttgtccagggtcaatttgagtgtaaagaaaatgtagacaaggaattgcccaattttaaattctgactttgctgacttaatttaaatgctcgttctgaaccaattttctcctatcttctctaggggtttcaaaagactcagttaattgatttccaggaagtactcatagcaagttcataaaagttcttgagacctaaatttcttcacaaaaaaagaaaagatcttaagtcatacattttaattgtgtagaggttgttcaactgaagg

SEQ ID NO: 26532 - DNA, 830 bp, Homo sapiens
  source 1..830: mol_type = unassigned DNA
cctttccgtctggcggcagccatcagcggcatctcctttcaggtcctccttggggacgccgcctgccgcagccacccgcccccttggtgctcagttctggttctgttaattcgccccaccaaaacgtgccgagcaccgctctgtgctggggttgcggaagtaagccaagatgggtgcatacaagtacatccaggagctatggagaaagaagcagtctgatgtcatgcgctttcttctgagggtccgctgctggcagtaccgccagctctctgctctccacagggctccccgccccacccggcctgataaagcgcgccgactgggctacaaggccaagcaaggttacgttatatataggattcgtgttcgccgtggtggccgaaaacgcccagttcctaagggtgcaacttacggcaagcctgtccatcatggtgttaaccagctaaagtttgctcgaagccttcagtccgttgcagaggagcgagctggacgccactgtggggctctgagagtcctgaattcttactgggttggtgaagattccacatacaaattttttgaggttatcctcattgatccattccataaagctatcagaagaaatcctgacacccagtggatcaccaaaccagtccacaagcacagggagatgcgtgggctgacatctgcaggccgaaagagccgtggccttggaaagggccacaagttccaccacactattggtggctctcgccgggcagcttggagaaggcgcaatactctccagctccaccgttaccgctaatataagtaaagtttgtaaaattcatacttaataaacaatttaggac

SEQ ID NO: 26533 - DNA, 588 bp, Homo sapiens
  source 1..588: mol_type = unassigned DNA
cccgacccgcgacgccccgactccgcgaaggcctccctgggaggctggggaagcgtcgggggatctctcagcgcagctctggggcccagatttctgcgcccgtcgtgcggtggccagagagggacagcgcagcgcggagacgcggagacgcagagactccgcagggggagagcccgcggtaagccaagatgggtgcatacaagtacatccaggagctatggagaaagaagcagtctgatgtcatgcgctttcttctgagggtccgctgctggcagtaccgccagctctctgctctccacagggctccccgccccacccggcctgataaagcgcgccgactgggctacaaggccaagcaaggttacgttatatataggattcgtgttcgccgtggtggccgaaaacgcccagttcctaagggtgcaacttacggcaagcctgtccatcatggtgttaaccagctaaagtttgctcgaagccttcagtccgttgcagaggagcgagctggacgccactgtggggctctgagagtcctgaattcttactgggttggtgaagattccacatacaaattttttgaggttatcc

SEQ ID NO: 26534 - DNA, 650 bp, Homo sapiens
  source 1..650: mol_type = unassigned DNA
gggcgggacaatagcggccgcggcgccccactcggcagaactccgccaccaggcgcgatgccggaactacatgtcccatgacgctctgggaggccgcagctttccaccggaaagagggtaagccaagatgggtgcatacaagtacatccaggagctatggagaaagaagcagtctgatgtcatgcgctttcttctgagggtccgctgctggcagtaccgccagctctctgctctccacagggctccccgccccacccggcctgataaagcgcgccgactgggctacaaggccaagcaaggttacgttatatataggattcgtgttcgccgtggtggccgaaaacgcccagttcctaagggtgcaacttacggcaagcctgtccatcatggtgttaaccagctaaagtttgctcgaagccttcagtccgttgcagaggagcgagctggacgccactgtggggctctgagagtcctgaattcttactgggttggtgaagattccacatacaaattttttgaggttatcctcattgatccattccataaagctatcagaagaaatcctgacacccagtggatcaccaaaccagtccacaagcacagggagatgcgtgggctgacatctgcaggccgaaagagccgtggccttg

SEQ ID NO: 26535 - DNA, 1063 bp, Homo sapiens
  source 1..1063: mol_type = unassigned DNA
cctttccgtctggcggcagccatcaggtaggctgcgttgaggatctttgctcttccatccgcctttgatcgtcttcctcttcagccatccaggtccggggaccctgcgtcctcggagataggtctccctcctgtgcggccagagtttggtaagccaagatgggtgcatacaagtacatccaggagctatggagaaagaagcagtctgatgtcatgcgctttcttctgagggtccgctgctggcagtaccgccagctctctgctctccacagggctccccgccccacccggcctgataaagcgcgccgactgggctacaaggccaagcaaggttacgttatatataggattcgtgttcgccgtggtggccgaaaacgcccagttcctaagggtgcaacttacggcaagcctgtccatcatggtgttaaccagctaaagtttgctcgaagccttcagtccgttgcagaggagcgagctggacgccactgtggggctctgagagtcctgaattcttactgggttggtgaagattccacatacaaattttttgaggttatcctcattgatccattccataaagctatcagaagaaatcctgacacccagtggatcaccaaaccagtccacaagcacagggagatgcgtgggctgacatctgcaggccgaaagagccgtggccttggaaagggccacaagttccaccacactattggtggctctcgccgggcagcttggagaaggcgcaatactctccagctccaccgttaccgctaatataagtaaagtttgtaaaattcatacttaataaacaatttaggacagtcatgtctgcttacaggtgttatttgtctgttaaaactagtctgcagatgtttcttgaatgctttgtcaaattaagaaagttaaagtgcaataatgtttgaagacaataagtggtggtgtatcttgtttctaataagataaacttttttgtctttgctttatcttattagggagttgtatgtcagtgtataaaacatactgtgtggtataacaggcttaataaattctttaaaaggagagaa

SEQ ID NO: 26536 - DNA, 1990 bp, Homo sapiens
  source 1..1990: mol_type = unassigned DNA
caggtaagccaagatgggtgcatacaagtacatccaggagctatggagaaagaagcagtctgatgtcatgcgctttcttctgagggtccgctgctggcagtaccgccagctctctgctctccacagggctccccgccccacccggcctgataaagcgcgccgactgggctacaaggccaagcaaggtacgtgatcgactgcgttacgttatatataggattcgtgttcgccgtggtggccgaaaacgcccagttcctaagggtgcaacttacggcaagcctgtccatcatggtgttaaccagctaaagtttgctcgaagccttcagtccgttgcagaggagcgagctggacgccactgtggggctctgagagtcctgaattcttactgggttggtgaagattccacatacaaattttttgaggttatcctcattgatccattccataaagctatcagaagaaatcctgacacccagtggatcaccaaaccagtccacaagcacagggagatgcgtgggctgacatctgcaggccgaaagagccgtggccttggaaagggccacaagttccaccacactattggtggctctcgccgggcagcttggagaaggcgcaatactctccagctccaccgttaccgctaatataagtaaagtttgtaaaattcatacttaataaacaatttaggacagtcatgtctgcttacaggtgttatttgtctgttaaaactagtctgcagatgtttcttgaatgctttgtcaaattaagaaagttaaagtgcaataatgtttgaagacaataagtggtggtgtatcttgtttctaataagataaacttttttgtctttgctttatcttattagggagttgtatgtcagtgtataaaacatactgtgtggtataacaggcttaataaattctttaaaaggagagaactgaaactagccctgtagatttgtctggtgcatgtgatgaaacctgcagctttatcggagtgatggcaatgctctgctggtttattttcaagtggctgcgttttttttagtttggcaggtgtagactttttaagttgggctttagaaaatctgggttagcctgaagaaaattgcctcagcctccacagtaccattttaaattcacataaaaggtgaaagctcctggttcagtgccatggcttcatggcattcagtgattagtggtaatggtaaacactggtgtgttttgaagttgaatgtgcgataaaattattagccttaagattggtaagctagcaatgaatgctagggtgggaagctggtgagccagtggccattagataaatacctttcaagtgtgagcttagacgtcaaccctaaaatacttaaccgtaatgctaattgtgatcattatgaatcccttcagtcacattagggggaaagtagttggctataagtacgtcattcttagtccagtcagtcttaaaaacatcttgggttacccactctgtccactcccataggctacagaaaaagtcacaagcgcatggtttccaaccatatgtgttttctgcagttatttctcttgttctggccaaacaaccctaaaaatccttaccattccacaaagttggaccatcacttgtgcacccactttgactatgagtataccaccacattgcatttctgtttgcaccatgtcttccaggagactagactactgttgtccagggtcaatttgagtgtaaagaaaatgtagacaaggaattgcccaattttaaattctgactttgctgacttaatttaaatgctcgttctgaaccaattttctcctatcttctctaggggtttcaaaagactcagttaattgatttccaggaagtactcatagcaagttcataaaagttcttgagacctaaatttcttcacaaaaaaagaaaagatcttaagtcatacattttaattgtgtagaggttgttcaactgaaggaataaatgtctattaaactaaaacaaa

SEQ ID NO: 26537 - DNA, 2500 bp, Homo sapiens
  source 1..2500: mol_type = unassigned DNA
cagctctttcctttccgtctggcggcagccatcaggtaagccaagatgggtgcatacaagtacatccaggagctatggagaaagaagcagtctgatgtcatgcgctttcttctgagggtccgctgctggcagtaccgccagctctctgctctccacagggctccccgccccacccggcctgataaagcgcgccgactgggctacaaggccaagcaaggttacgttatatataggattcgtgttcgccgtggtggccgaaaacgcccagttcctaagggtgcaacttacggcaagcctgtccatcatggtgttaaccagctaaagtttgctcgaagccttcagtccgttgcagaggagcgagctggacgccactgtggggctctgagagtcctgaattcttactggatggagtctcactctcactcaggtgggagtgcagtggggcaatcacggctcactgcaacctctgtctcccgggtttgagcaattcttctgcctcggcctcccaaatagccaggactacaggcgcacactgccatgcccagctaagttttgtatttttagtagagactgggtttcactatgttggccaggctggtctcgaactcctgacctcaagtgatccacctgccttggcctcccaaagtgctgggattacaggcgtgagccaccacccccagcccaatttttattttttgtacagacaggatctcactatgttgcccaggttggtctcaaactactggcctcaagcaatcctgccttggcctcccaaagtgctggaattataggaatgagccaccacaccgggcccaaatttactttagtaataacaacaattggctgggtgcggtggctcacgcctgcaatcccaacactttcggtaaccaaggtgggcttgagctcatgagttagagagcagcctgagcaacgtggtgagagcccatctcacaaaaaataacaaatcagctgggcatggtgttgcacgcctgtagtctccgaaatcacaccactgcactcccatcttgggtgatagagccagaacttgtctcaaaaataacaattggtttcttacaatcccaaaaggtgcagttactagtattaatccttttttgccaatgaggaaacacaaagatgaagcaacttgctcaaagtcatacagtgacagtctgaattcaaatcctatacacttaaagtttatttgttttgttttggttttttttgagatggagtctcactgtgtcgcaaggctggagtgcagtggcacgatctcagctcactgcaacccgggttcaagcgattctcctgcctcagcctcccgagtagctgggactacaggcacgcaccaccacacccagctaatttttgtatttttagtagagacggtttcaccatgttggccaggatggtctcgagctcctgacctcaggtgatcctcccgccttggcctcccaaagtgccgggattacaggtgtcagccactgcacgtggccaacttaaagtttttgatagataatacattaacgttaaaaattcaaaagataagtataggctctacagtacaaacccttctgcctcctagttcctctccctggaggcaaggtgatcagtttaacaatatttttttattttgagacagggtctcactgttgcccaggctggagtgtagtggcgcgttcacaacttactgtagcctcaacctcctggctcaagcaatcctcccacctcagcctgtcgagtagctggaaccacaggtgcacaccaccatgccaggctaatttttgtattttttgtagagacagggtttcaccatgttgttcaggctggtctcaaagtcctgggctcaagcaatcttcctgtctctgcttcccaaagtgctgggattacagatgtgggccacggtgcctggcctacatatgtattttttccttttcttccccaagtggtaggatatgatacacattgttgatttttttgtttagttatgtatctcagagcttattctttatcagctcatgaggaacttcatttttttttttttttttgagatgtagttttgctcttatagcccaggttggagtacagtaacacaatcttggctcgcagcaacttctgcctcccaggttcaagcgattctcctgcctcagcctccgagtagctaggattacaggtgcctgccactacatccagctatttttgtattttcagtagagacggggtttcaccattttggccaagctggtctcgaactcctgacctcaggtgatccgcccatctcagcctcccaaagtagtgggattacaggcatgagcaaccgtgcccggctggaacttcattcttttggtataactgcatggtatcccatcatgtggatgtaccatgattcattggatgtggaccctcctgatggacatttaaatttcttccaatctgttgctattacaaaaagaaaaatgtgtgcatacatctttattcatctgtagaataaattcttagaagt

SEQ ID NO: 26538 - DNA, 1345 bp, Homo sapiens
  source 1..1345: mol_type = unassigned DNA
cctttccgtctggcggcagccatcaggtaagccaagatgggtgcatacaagtacatccaggagctatggagaaagaagcagtctgatgtcatgcgctttcttctgagggtccgctgctggcagtaccgccagctctctgctctccacagggctccccgccccacccggcctgataaagcgcgccgactgggctacaaggccaagcaaggttacgttatatataggattcgtgttcgccgtggtggccgaaaacgcccagttcctaagggtgcaacttacggcaagcctgtccatcatggtgttaaccagctaaagtttgctcgaagccttcagtccgttgcagaggagcgagctggacgccactgtggggctctgagagtccacaagcacagggagatgcgtgggctgacatctgcaggccgaaagagccgtggccttggaaagggccacaagttccaccacactattggtggctctcgccgggcagcttggagaaggcgcaatactctccagctccaccgttaccgctaatataagtaaagtttgtaaaattcatacttaataaacaatttaggacagtcatgtctgcttacaggtgttatttgtctgttaaaactagtctgcagatgtttcttgaatgctttgtcaaattaagaaagttaaagtgcaataatgtttgaagacaataagtggtggtgtatcttgtttctaataagataaacttttttgtctttgctttatcttattagggagttgtatgtcagtgtataaaacatactgtgtggtataacaggcttaataaattctttaaaaggagagaactgaaactagccctgtagatttgtctggtgcatgtgatgaaacctgcagctttatcggagtgatggcaatgctctgctggtttattttcaagtggctgcgttttttttagtttggcaggtgtagactttttaagttgggctttagaaaatctgggttagcctgaagaaaattgcctcagcctccacagtaccattttaaattcacataaaaggtgaaagctcctggttcagtgccatggcttcatggcattcagtgattagtggtaatggtaaacactggtgtgttttgaagttgaatgtgcgataaaattattagccttaagattggtaagctagcaatgaatgctagggtgggaagctggtgagccagtggccattagataaatacctttcaagtgtgagcttagacgtcaaccctaaaatacttaaccgtaatgctaattgtgatcattatgaatcccttcagtcacattagggggaaagtagttggctataagtacgtcattcttagtccagtcagtctt

SEQ ID NO: 26539 - DNA, 580 bp, Homo sapiens
  source 1..580: mol_type = unassigned DNA
ctctttccctaagcagcctgaggtgatctgtgaaaatggttcgctattcacttgacccggagaaccccacgaaataacactcgtgaaactgctcaggccatcaagggtatgcatatacgaaaagccacgaagtatctgaaagatgtcactttacagaaacagtgtgtaccattccgacgttacaatggtggagttggcaggtgtgcgcaggccaagcaatggggctggacacaaggtcggtggcccaaaaagagtgctgaatttttgctgcacatgcttaaaaacgcagagagtaatgctgaacttaagggtttagatgtagattctctggtcattgagcatatccaagtgaacaaagcacctaagatgcgccgccggacctacagagctcatggtcggattaacccatacatgagctctccctgccacattgagatgatccttacggaaaaggaacagattgttcctaaaccagaagaggaggttgcccagaagaaaaagatatcccagaagaaactgaagaaacaaaaacttatggcacgggagtaaattcagcattaaaataaatgtaattaaaagg

SEQ ID NO: 26540 - DNA, 927 bp, Homo sapiens
  source 1..927: mol_type = unassigned DNA
tacgaatctcgcgagaagtcaagttctcatgagttctcccaaaatccaccgctcttcctctttccctaagcagcctgagggttgactggattggtgaggcccgtgtggctacttctgtggaagcagtgctgtagttactggaagataaaagggaaagcaagcccttggtgggggaaagtatggctgcgatgatggcatttcttaggacacctttggattaataatgaaaacaactactctctgagcagctgttcgaatcatctgatatttatactgaatgagttactgtaagtacgtattgacagaattacactgtactttcctctaggtgatctgtgaaaatggttcgctattcacttgacccggagaaccccacgaaatcatgcaaatcaagaggttccaatcttcgtgttcactttaagaacactcgtgaaactgctcaggccatcaagggtatgcatatacgaaaagccacgaagtatctgaaagatgtcactttacagaaacagtgtgtaccattccgacgttacaatggtggagttggcaggtgtgcgcaggccaagcaatggggctggacacaaggtcggtggcccaaaaagagtgctgaatttttgctgcacatgcttaaaaacgcagagagtaatgctgaacttaagggtttagatgtagattctctggtcattgagcatatccaagtgaacaaagcacctaagatgcgccgccggacctacagagctcatggtcggattaacccatacatgagctctccctgccacattgagatgatccttacggaaaaggaacagattgttcctaaaccagaagaggaggttgcccagaagaaaaagatatcccagaagaaactgaagaaacaaaaacttatggcacgggagtaaattcagcattaaaataaatgtaattaaaagg

SEQ ID NO: 26541 - DNA, 678 bp, Homo sapiens
  source 1..678: mol_type = unassigned DNA
tacgaatctcgcgagaagtcaagttctcatgagttctcccaaaatccaccgctcttcctctttccctaagcagcctgaggtgatctgtgaaaatggttcgctattcacttgacccggagaaccccacgaaatcatgcaaatcaagaggttccaatcttcgtgttcactttaagaacactcgtgaaactgctcaggccatcaagggtatgcatatacgaaaagccacgaagtatctgaaagatgtcactttacagaaacagtgtgtaccattccgacgttacaatggtggagttggcaggtgtgcgcaggccaagcaatggggctggacacaaggtcggtggcccaaaaagagtgctgaatttttgctgcacatgcttaaaaacgcagagagtaatgctgaacttaagggtttagatgtagattctctggtcattgagcatatccaagtgaacaaagcacctaagatgcgccgccggacctacagagctcatggtcggattaacccatacatgagctctccctgccacattgagatgatccttacggaaaaggaacagattgttcctaaaccagaagaggaggttgcccagaagaaaaagatatcccagaagaaactgaagaaacaaaaacttatggcacgggagtaaattcagcattaaaataaatgtaattaaaagg

SEQ ID NO: 26542 - DNA, 612 bp, Homo sapiens
  source 1..612: mol_type = unassigned DNA
cccacagggagtggacatccgccataacaaggaccgaaaggttcggcgcaaggagcccaagagccaggatatctacctgaggctgttggtcaagttatacaggtttctggccagaagaaccaactccacattcaaccaggttgtgttgaagaggttgtttatgagtcgcaccaaccggccgcctctgtccctttcccggatgatccggaagatgaagcttcctggccgggaaaacaagacggccgtggttgtggggaccataactgatgatgtgcgggttcaggaggtacccaaactgaaggtatgtgcactgcgcgtgaccagccgggcccgcagccgcatcctcagggcagggggcaagatcctcactttcgaccagctggccctggactcccctaagggctgtggcactgtcctgctctccggtcctcgcaagggccgagaggtgtaccggcatttcggcaaggccccaggaaccccgcacagccacaccaaaccctacgtccgctccaagggccggaagttcgagcgtgccagaggccgacgggccagccgaggctacaaaaactaaccctggatcctactctcttattaaaaagatttttgctgaca

SEQ ID NO: 26543 - DNA, 441 bp, Homo sapiens
  source 1..441: mol_type = unassigned DNA
ctttccggacctggccgagcaggaggcgccatcatgggagtggacatccgccataacaaggaccgaaaggttcggcgcaaggagcccaagagccaggatatctacctgaggctgttggtcaagttatacaggtttctggccagaagaaccaactccacattcaaccaggttgtgttgaagaggttgtttatgagtcgcaccaaccggccgcctctgtccctttcccggatgatccggaagatgaagcttcctggccgggaaaacaagacggccgtggttgtggggaccataactgatgatgtgcgggttcaggaggtacccaaactgaaggtgagctggcgggggctgggcagacccatcagacccttgctgtactgtgctgtgctgtgctgtgctgtgctgtgctgtctggtccatcctcagtcttgccaccgctggtga

SEQ ID NO: 26544 - DNA, 1004 bp, Homo sapiens
  source 1..1004: mol_type = unassigned DNA
actgggcccgccgggtcctccgggagccactgagaggccgtcggcgtcgggccagagcgtcaccgcgcgacgcatcgtgctagctacacgcatctcgctcccagatccctttcttccggaaagctatcgagaacacggcctgggtagggccagagaggcccccgacgtgctggcccttccctcttggacgttgcgcttgttcctgcgctctatgctctctgccgttatcgcccggctagtcagtcgtccaactcaccacagagaagtccggatcgtggtagagcgccgcgtcgcacccatgtgacgtcacggcggcgccactcgcttgaggctttccccgcccaccccagcccgttctctctttccggacctggccgagcaggaggcgccatcatgggagtggacatccgccataacaaggaccgaaaggttcggcgcaaggagcccaagagccaggatatctacctgaggctgttggtcaagttatacaggtttctggccagaagaaccaactccacattcaaccaggttgtgttgaagaggttgtttatgagtcgcaccaaccggccgcctctgtccctttcccggatgatccggaagatgaagcttcctggccgggaaaacaagacggccgtggttgtggggaccataactgatgatgtgcgggttcaggaggtacccaaactgaaggtatgtgcactgcgcgtgaccagccgggcccgcagccgcatcctcagggcagggggcaagatcctcactttcgaccagctggccctggactcccctaagggctgtggcactgtcctgctctccggtcctcgcaagggccgagaggtgtaccggcatttcggcaaggccccaggaaccccgcacagccacaccaaaccctacgtccgctccaagggccggaagttcgagcgtgccagaggccgacgggccagccgaggctacaaaaactaaccctggatcctactctcttattaaaaagatttttgctgacagtg

SEQ ID NO: 26545 - DNA, 559 bp, Homo sapiens
  source 1..559: mol_type = unassigned DNA
tctctctttccggacctggccgagcaggaggcgccatcatgttatacaggtttctggccagaagaaccaactccacattcaaccaggttgtgttgaagaggttgtttatgagtcgcaccaaccggccgcctctgtccctttcccggatgatccggaagatgaagcttcctggccgggaaaacaagacggccgtggttgtggggaccataactgatgatgtgcgggttcaggaggtacccaaactgaaggtatgtgcactgcgcgtgaccagccgggcccgcagccgcatcctcagggcagggggcaagatcctcactttcgaccagctggccctggactcccctaagggctgtggcactgtcctgctctccggtcctcgcaagggccgagaggtgtaccggcatttcggcaaggccccaggaaccccgcacagccacaccaaaccctacgtccgctccaagggccggaagttcgagcgtgccagaggccgacgggccagccgaggctacaaaaactaaccctggatcctactctcttattaaaaagatttttgctgaca

SEQ ID NO: 26546 - DNA, 618 bp, Homo sapiens
  source 1..618: mol_type = unassigned DNA
cttttgcgggtggcggcgaacgcggagagcacgccatgaaggcctcgggcacgctacgagagtacaaggtagtgggtcgctgcctgcccacccccaaatgccacacgccgcccctctaccgcatgcgaatctttgcgcctaatcatgtcgtcgccaagtcccgcttctggtactttgtatctcagttaaagaagatgaagaagtcttcaggggagattgtctactgtgggcaggtgtttgagaagtcccccctgcgggtgaagaacttcgggatctggctgcgctatgactcccggagcggcacccacaacatgtaccgggaataccgggacctgaccaccgcaggcgctgtcacccagtgctaccgagacatgggtgcccggcaccgcgcccgagcccactccattcagatcatgaaggtggaggagatcgcggccagcaagtgccgccggccggctgtcaagcagttccacgactccaagatcaagttcccgctgccccaccgggtcctgcgccgtcagcacaagccacgcttcaccaccaagaggcccaacaccttcttctaggtgcagggccctcgtccgggtgtgccccaaataaactcaggaacgccccggt

SEQ ID NO: 26547 - DNA, 1391 bp, Homo sapiens
  source 1..1391: mol_type = unassigned DNA
ccttttgcgggtggcggcgaacgcggagagcacgccatgaaggcctcgggcacgctacgagagtacaaggtagtgggtcgctgcctgcccacccccaaatgccacacgccgcccctctaccgcatgcgaatctttgcgcctaatcatgtcgtcgccaagtcccgcttctggtactttgtatctcagttaaagaagatgaagaagtcttcaggggagattgtctactgtgggcaggtgtttgagaagtcccccctgcgggtgaagaacttcgggatctggctgcgctatgactcccggagcggcacccacaacatgtaccgggaataccgggacctgaccaccgcaggcgctgtcacccagtgctaccgagacatgggtgcccggcaccgcgcccgagcccactccattcagatcatgaaggtggaggagatcgcggccagcaagtgccgccgtcagcacaagccacgcttcaccaccaagaggcccaacaccttcttctaggtgcagggccctcgtccgggtgtgccccaaataaactcaggaacgccccggtgctcgccgcatgttttctttgcacactgcagagctcaaaggggtgctatgagaggccggcccagtcagctcctggggtgcagctgagctgccatttctttgtcctgggaggggtcttcagtgcaaacaaacaaaccctcacatcctcctgtcctggagtgggccctccaggcgcccccacccctgagctccctcttgcttggtcagttctcagccctgctggcagccctgggctatgagctgcaggggtactgtctgtcctgggccctaaatctgtcccaactgccttgtgagacacaggcctcccaggctcccctgctgagtctggaccagggagaatctccctagatagtggggttggcgttcactccctggggattctcctaagtctctggttcccaaagttttcagagtagacacaagtgggcacccgaggggcgctctctgctgcttgggggctgtttccctttcactggttgggggcctcttagatgacgccctcatcttgcccaaggaggtcaaggactcaccacaggtactcatctctgggaaactgcctcaggcctggaaaattccaggcatgacactaatcccaccctggctgagtccttctgtcaggtggaggctaagctggcattggagaagtttgagacacagccaagagctcaggctctgggagcctcccatcctttgttgcgtgaccttgggcagccctgttctgggccagcggcccttctggggcttgctgtcttgatctcaacatcgggttccacattgatgtgggaagtgacgctgtgcaggtgctggggtcagcctatggggccctcctttgtcccaga

SEQ ID NO: 26548 - DNA, 732 bp, Homo sapiens
  source 1..732: mol_type = unassigned DNA
gcagataatgggaggagccgggcccgagcgagctctttcctttcgctgctgcggccgcagccatgagtatgctcaggcttcagaagaggctcgcctctagtgtcctccgctgtggcaagaagaaggtctggttagaccccaatgagaccaatgaaatcgccaatgccaactcccgtcagcagatccggaagctcatcaaagatgggctgatcatccgcaagcctgtgacggtccattcccgggctcgatgccggaaaaacaccttggcccgccggaagggcaggcacatgggcataggtaagcggaagggtacagccaatgcccgaatgccagagaaggtcacatggatgaggagaatgaggattttgcgccggctgctcagaagataccgtgaatctaagaagatcgatcgccacatgtatcacagcctgtacctgaaggtgaaggggaatgtgttcaaaaacaagcggattctcatggaacacatccacaagctgaaggcagacaaggcccgcaagaagctcctggctgaccaggctgaggcccgcaggtctaagaccaaggaagcacgcaagcgccgtgaagagcgcctccaggccaagaaggaggagatcatcaagactttatccaaggaggaagagaccaagaaataaaacctcccactttgtctgtacatactggcctctgtgattacatagatcagccattaaaataaaacaagccttaatctgc

SEQ ID NO: 26549 - DNA, 616 bp, Homo sapiens
  source 1..616: mol_type = unassigned DNA
cttccaggtagggcctacgcgtggctcccgggcgctaggtgttcgacagacttgaaccgcgaccttgtggcctcagagtaattcgccaaaatgacgaacacaaagggaaagaggagaggcacccgatatatgttctctaggccttttagaaaacatggagttgttcctttggccacatatatgcgaatctataagaaaggtgatattgtagacatcaagggaatgggtactgttcaaaaaggaatgccccacaagtgttaccatggcaaaactggaagagtctacaatgttacccagcatgctgttggcattgttgtaaacaaacaagttaagggcaagattcttgccaagagaattaatgtgcgtattgagcacattaagcactctaagagccgagatagcttcctgaaacgtgtgaaggaaaatgatcagaaaaagaaagaagccaaagagaaaggtacctgggttcaactaaagcgccagcctgctccacccagagaagcacactttgtgagaaccaatgggaaggagcctgagctgctggaacctattccctatgaattcatggcataataggtgttaaaaaaaaaaataaaggacctctgggctacaaaaa

SEQ ID NO: 26550 - DNA, 815 bp, Homo sapiens
  source 1..815: mol_type = unassigned DNA
gacgacggcgtcctcttgatcgcccttgaaggcccctttccgggctgtctgacacgatgcaagtgtcagcttgtgttggccggttgcctttctttcgcaagaggggaaaatatcctcacagactttctgtgttctcagagacgatcttcttccctagaaagaagtcgcttacggttggcgtttccctcaggcagcgccgtgggcagcccacaggcccttgtaaggcgcgcgccgcggccccgcctctttcctttcggccggaaccgccatcttccagtaattcgccaaaatgacgaacacaaagggaaagaggagaggcacccgatatatgttctctaggccttttagaaaacatggagttgttcctttggccacatatatgcgaatctataagaaaggtgatattgtagacatcaagggaatgggtactgttcaaaaaggaatgccccacaagtgttaccatggcaaaactggaagagtctacaatgttacccagcatgctgttggcattgttgtaaacaaacaagttaagggcaagattcttgccaagagaattaatgtgcgtattgagcacattaagcactctaagagccgagatagcttcctgaaacgtgtgaaggaaaatgatcagaaaaagaaagaagccaaagagaaaggtacctgggttcaactaaagcgccagcctgctccacccagagaagcacactttgtgagaaccaatgggaaggagcctgagctgctggaacctattccctatgaattcatggcataataggtgttaaaaaaaaaaataaaggacctctgggctacaaaaa

SEQ ID NO: 26551 - DNA, 806 bp, Homo sapiens
  source 1..806: mol_type = unassigned DNA
caggtagggcctacgcgtggctcccgggcgctaggtgttcgacagacttgaaccgcgaccttgtggcctcagaggtcgttcattgggaccgtggggagactctctaacctgtttgaggtccattggcatgggcgggttaaaccatgttctgccagacggggagcagcgtgcgccgggtcgggtctgggccgtgggctgagaaccggactgcgatgttgcggccctgcggggggacatttgcgagaaagacgagactgagtcgcttgggtaattcgccaaaatgacgaacacaaagggaaagaggagaggcacccgatatatgttctctaggccttttagaaaacatggagttgttcctttggccacatatatgcgaatctataagaaaggtgatattgtagacatcaagggaatgggtactgttcaaaaaggaatgccccacaagtgttaccatggcaaaactggaagagtctacaatgttacccagcatgctgttggcattgttgtaaacaaacaagttaagggcaagattcttgccaagagaattaatgtgcgtattgagcacattaagcactctaagagccgagatagcttcctgaaacgtgtgaaggaaaatgatcagaaaaagaaagaagccaaagagaaaggtacctgggttcaactaaagcgccagcctgctccacccagagaagcacactttgtgagaaccaatgggaaggagcctgagctgctggaacctattccctatgaattcatggcataataggtgttaaaaaaaaaaataaaggacctctgggctacaaaaa

SEQ ID NO: 26552 - DNA, 641 bp, Homo sapiens
  source 1..641: mol_type = unassigned DNA
gcgtggctcccgggcgctaggtgttcgacagacttgaaccgcgaccttgtggcctcagaggtcgttcattgggaccgtggggagactctctaacctgtttgagtaattcgccaaaatgacgaacacaaagggaaagaggagaggcacccgatatatgttctctaggccttttagaaaacatggagttgttcctttggccacatatatgcgaatctataagaaaggtgatattgtagacatcaagggaatgggtactgttcaaaaaggaatgccccacaagtgttaccatggcaaaactggaagagtctacaatgttacccagcatgctgttggcattgttgtaaacaaacaagttaagggcaagattcttgccaagagaattaatgtgcgtattgagcacattaagcactctaagagccgagatagcttcctgaaacgtgtgaaggaaaatgatcagaaaaagaaagaagccaaagagaaaggtacctgggttcaactaaagcgccagcctgctccacccagagaagcacactttgtgagaaccaatgggaaggagcctgagctgctggaacctattccctatgaattcatggcataataggtgttaaaaaaaaaaataaaggacctctgggctacaaaaa

SEQ ID NO: 26553 - DNA, 2078 bp, Homo sapiens
  source 1..2078: mol_type = unassigned DNA
cgtagttcgctcacctccctttctaactccgctgccgccatggctcctgtgaaaaagcttgtggtgaaggggggcaaaaaaaagaagcaagttctgaagttcactcttgattgcacccaccctgtagaagatggaatcatggatgctgccaattttgagcagtttttgcaagaaaggatcaaagtgaacggaaaagctgggaaccttggtggaggggtggtgaccatcgaaaggagcaagagcaagatcaccgtgacatccgaggtgcctttctccaaaaggtatttgaaatatctcaccaaaaaatatttgaagaagaataatctacgtgactggttgcgcgtagttgctaacagcaaagagagttacgaattacgttacttccagattaaccaggacgaagaagaggaggaagacgaggattaaatttcatttatctggaaaattttgtatgagttcttgaataaaacttgggaaccaaaatggtggtttatccttgtatctctgcagtgtggattgaacagaaaattggaaatcatagtcaaagggcttcccttggttcgccactcatttatttgtaacttgacttctttttttttctgcttaaaaatttcaattctcgtggtaataccagagtagaaggagagggtgactttaccgaactgacagccattggggaggcagatgcgggtgtggaggtgtgggctgaaggtagtgactgtttgattttaaaaagtgtgactgtcagttgtatctgttgcttttctcaatgattcagggatacaaatgggcttctctcattcattaaaagaaaacgcgacatctttctaagattctctgtgggaaaatgactgtcaataaaatgcgggtttctgggccattcgtcttactttcattttttgattacaaatttctcttgacgcacacaattatgtctgctaatcctcttcttcctagagagagaaactgtgctccttcagtgttgctgccataaaggggtttggggaatcgattgtaaaagtcccaggttctaaattaactaaatgtgtacagaaatgaacgtgtaagtaatgtttctacaggtctttgcaacaaactgtcactttcgtctccagcagagggagctgtaggaatagtgcttccagatgtggtctcccgtgtggggcccagcaatgggggcccctgatgccaagagctctggaggttcttgaaagaggggacacgaaggaggagtgactgggaagcctcccatgccaaggaggtgggaggtgccctggaaatagctgcctcatgccacttaggccatgactggatttaatgtcagtggtgtgccacagtgcagaggctagacaactgaaaggggctaccaaggctgggaaaaaaatgcaattgttgctgtgagtgactttgaaagactctggtgccttgtggtgcccttctgaaattcaaacagtaatgcaaaagtgtctgcattagaatttacggtgtctaaaattcatgtttttaaaagagcttgcctacagatggtttccacacttgaaattgtgccctgcgagttgcatagctggaagttcaatgctcagtcctaccttggctcccattaaacatttggtgctctgtggattgagttgaacgtgttgaggctttgcaatttcacttgtgttaaaggctctggcatttttccatttctatgcaaatttctttgaagcagaattgcttgcatatttcttctctgccgtcacagaaagcagagtttctttcaaacttcactgaggcatcagttgctctttggcaatgtcccttaaccatgattattaactaagtttgtggcttgagtttacaaattctacttgttgcattgatgttcccatgtagtaagtcatttttagtttggttgtgaaaaaaccctgggctgaagttggcatttcagttaaaagaaaaaaagaaactagtcccagatttgaaaacttgtaataaaattgaaactcactggttttctatgtctttttgaactcttgtaatcgagttttgatcatattttctattaaagtggctaacacctggctactcttactgta

SEQ ID NO: 26554 - DNA, 392 bp, Homo sapiens
  source 1..392: mol_type = unassigned DNA
gtggccctaggcagctggggcgctttgctctccttcaggccggagagagagagccaggccaccgcgagagcactgccagggccctcgaaagtggcagtggggtgctggagagttgagatggcaggatcccgacgtgaatgtagacgtggtgggtcctctggtgcgaaattccggatttccttgggtcttccggtaggagctgtaatcaattgtgctgacaacacaggagccaaaaacctgtatatcatctccgtgaaggggatcaagggacggctgaacagacttcccgctgctggtgtgggtgacatggtgatggccacagtcaagaaaggcaaaccagagctcagaaaaaaggtacatccagcagtggtcattcgacaacgaaagtcata

SEQ ID NO: 26555 - DNA, 625 bp, Homo sapiens
  source 1..625: mol_type = unassigned DNA
ccggcgttcaagatgtcgaagcgaggacgtggtgggtcctctggtgcgaaattccggatttccttgggtcttccggtaggagctgtaatcaattgtgctgacaacacaggagccaaaaacctgtatatcatctccgtgaaggggatcaagggacggctgaacagacttcccgctgctggtgtgggtgacatggtgatggccacagtcaagaaaggcaaaccagagctcagaaaaaaggtacatccagcagtggtcattcgacaacgaaagtcataccgtagaaaagatggcgtgtttctttattttgaagataatgcaggagtcatagtgaacaataaaggcgagatgaaaggttctgccattacaggaccagtagcaaaggagtgtgcagacttgtggccccggattgcatccaatgctggcagcattgcatgattctccagtatatttgctggagtgcagtaacaccactgaagctcactgtaactttgaactgctggacttggaatcctcctgctgtggccttcaaagggctgcaattacaagtgtgagccactgcatcccacctcacattttattctttggagattttttttgacttggattaaaaaactttatatttaca

SEQ ID NO: 26556 - DNA, 444 bp, Homo sapiens
  source 1..444: mol_type = unassigned DNA
ttttttcttttttccggcgttcaagatgtcgaagcgaggacgtggtgggtcctctggtgcgaaattccggatttccttgggtcttccggtaggagctgtaatcaattgtgctgacaacacaggagccaaaaacctgtatatcatctccgtgaaggggatcaagggacggctgaacagacttcccgctgctggtgtgggtgacatggtgatggccacagtcaagaaaggcaaaccagagctcagaaaaaaggtcttgctctgtcacacaggctggagtgcagtaacaccactgaagctcactgtaactttgaactgctggacttggaatcctcctgctgtggccttcaaagggctgcaattacaagtgtgagccactgcatcccacctcacattttattctttggagattttttttgacttggattaaaaaactttatatttaca

SEQ ID NO: 26557 - DNA, 2791 bp, Homo sapiens
  source 1..2791: mol_type = unassigned DNA
gtttttgctccggccacgtgaggagggtgggcggggcgttaaagttcatatcccagtgtcctttgaatcgacttccttttttcttttttccggcgttcaagatgtcgaagcgaggacgtggtgggtcctctggtgcgaaattccggatttccttgggtcttccggtaggagctgtaatcaattgtgctgacaacacaggagccaaaaacctgtatatcatctccgtgaaggggatcaagggacggctgaacagacttcccgctgctggtgtgggtgacatggtgatggccacagtcaagaaaggcaaaccagagctcagaaaaaaggtacatccagcagtggtcattcgacaacgaaagtcataccgtagaaaagatggcgtgtttctttattttgaagataatgcaggagtcatagtgaacaataaaggcgagatgaaaggttctgccattacaggaccagtagcaaaggagtgtgcagacttgtggccccggattgcatccaatgctggcagcattgcatgattctccagtatatttgtaaaaaataaaaaaaaaaactaaacccattaaaaagtatttgtttgcagtgcttgtctccctgttcacttccagggttcaagcgattctcctgcctcagcctcctaagtagctgggattacaggcacctgccgtcatgcctggctagtttttgtatttttggtggagacagggtttcaccatgtttgccaaacgactcaaactcctgatctcaagtgatctgcccacccaggcctctacagtgtttttgacataccctgaccatcacttttctgaaatggaaactctgggcattttttttttaaagcaatccttgcttttttgtgagtttgcagactttcagcatcttccaattgctgtatttacaattttggcctcaaaaagtattatttgggttttgagtcccaaaaataatagtagatactgctcaatgactggctatacatggtagcttctcctggagtgaggaaggcattcaaatggctgggcgcggtagctggcacctgtaatcccaacactttcggaggccaaggcaggcagatcatgaggtcaggagttcaagaccaggctgaccaacgtggtgaaacctcctcttttctaaaaatacaaaaattagctgggcgtggtggcgcaccgcctgtaatctcagctactgagagaatcgcttgaacctgggaggtggagtttgcagcgagtcgagattgcaccattgtactccatccagcctgggcaacggagcaagattccgttcccgcccccgccccaaaaaaaggcattgaagttaagatagactatatagttagatcctggacacacacatggattttgaggaatgatgtgagtttgtttatgtatgtacattttagcagttaacagatttggagtaaattgaatatttataaaacaacagtaattgccatgtaggtttactgtcatagtggaagatgattaagttgatggtacctacaggtattttgctatgaaaatgttttgacaaacaggatgatcgtgtaatttatgttccaagctctagtttgagaatggaagaatgtggtaaatttttgccaactgaacaggcataaagcgctgataataagggacttggccttaaggtaggaggttgttagcatttctttctaaacgtgtaagagtttatttaggtgacacccagcgttttggaaaaatgggtgtttgtttagaacaataatttggagggaagtggactaaacagggtttttagattaaggtttgtgtttatgtatctgtatctgcaaatactcagccataaatgtttctacctgtaagttgggtataatacaagctccacttggtatcaaaaaggactacccttagtgtcttccatgactagttatggaatgtaccagacctagagaggagttgttctaacctggagcttttgaaaatgtttccggtccataccctagaccaattaagtcagactgcagaataggactcagacatcagaattgtgaagctcccaggagatgtcaaggtatacccaagactgagaaccagtaccctgtctagactgaaccaggcttggttttagaagtattaaatctcgcctgggtacggtggctcacacctataatcccagcactttgggaggctgaggtgggtggatcatctgaggtcaggagagtgagaccagcctgtccaacatgttgaaaccccatctctactatacaaaattagccaggcatggtggtgcatgctgtaatcccagctacttgggaggctgaggcaggagaattgcttgaaccccggagatggaggttgcagtgagctgaggtcgcacgattgtgctccagcctgggcaaccagtgaaactctggggggaaagaaaaaaaatgtattaaatctctagttttagagagttacaccataacatccctgagtatggtcaatttcaagtcagctttagtgtgacaagcccctaggcccaccatttatgtctttatatattatggcaatatatgatccttatatattaaccactaatcgctgctgtttttgaatgttatcttttctgaggcagtcttgctctgtcacacaggctggagtgcagtaacaccactgaagctcactgtaactttgaactgctggacttggaatcctcctgctgtggccttcaaagggctgcaattacaagtgtgagccactgcatcccacctcacattttattctttggagattttttttgacttggattaaaaaactttatatttaca

SEQ ID NO: 26558 - DNA, 587 bp, Homo sapiens
  source 1..587: mol_type = unassigned DNA
cactggttggagctccatgtccccgggcctctcctgcccctcctaaagctgaagccaaagcgaaggctttaaaggccaagaaggcagtgttgaaaggtgtccacagccacaaaaagaagaagatccgcacgtcacccaccttccggcggccgaagacactgcgactccggagacagcccaaatatcctcggaagagcgctcccaggagaaacaagcttgaccactatgctatcatcaagtttccgctgaccactgagtctgccatgaagaagatagaagacaacaacacacttgtgttcattgtggatgttaaagccaacaagcaccagattaaacaggctgtgaagaagctgtatgacattgatgtggccaaggtcaacaccctgattcggcctgatggagagaagaaggcatatgttcgactggctcctgattacgatgctttggatgttgccaacaaaattgggatcatctaaactgagtccagctgcctaattctgaatatatatatatatatatcttttcaccatatacatgcctgtctgtcaatttctggttgggctgggaggccacacacacacactgac

SEQ ID NO: 26559 - DNA, 580 bp, Homo sapiens
  source 1..580: mol_type = unassigned DNA
ggccagacattcggttctgggaagctacatgcatccactggttggagctccatgtccccgggcctcgtggttttgcgatgggctcctgcccctcctaaagctgaagccaaagcgaaggctttaaaggccaagaaggcagtgttgaaaggtgtccacagccacaaaaagaagaagatccgcacgtcacccaccttccggcggccgaagacactgcgactccggagacagcccaaatatcctcggaagagcgctcccaggagaaacaagcttgaccactatgctatcatcaagtttccgctgaccactgagtctgccatgaagaagatagaagacaacaacacacttgtgttcattgtggatgttaaagccaacaagcaccagattaaacaggctgtgaagaagctgtatgacattgatgtggccaaggtcaacaccctgattcggcctgatggagagaagaaggcatatgttcgactggctcctgattacgatgctttggatgttgccaacaaaattgggatcatctaaactgagtccagctgcctaattctgaatatatatatatatatatcttttcacc

SEQ ID NO: 26560 - DNA, 683 bp, Homo sapiens
  source 1..683: mol_type = unassigned DNA
aggcatcatccgccagggagggccagacattcggttctgggaagctacatgcatccactggttggagctccatgtccccgggcctgtaaggaattagtgccctcagctttaaccattttccttctggttcatgttcaaccgggctacattacccgcccctctctccgcagcgtggttttgcgatgggctcctgcccctcctaaagctgaagccaaagcgaaggctttaaaggccaagaaggcagtgttgaaaggtgtccacagccacaaaaagaagaagatccgcacgtcacccaccttccggcggccgaagacactgcgactccggagacagcccaaatatcctcggaagagcgctcccaggagaaacaagcttgaccactatgctatcatcaagtttccgctgaccactgagtctgccatgaagaagatagaagacaacaacacacttgtgttcattgtggatgttaaagccaacaagcaccagattaaacaggctgtgaagaagctgtatgacattgatgtggccaaggtcaacaccctgattcggcctgatggagagaagaaggcatatgttcgactggctcctgattacgatgctttggatgttgccaacaaaattgggatcatctaaactgagtccagctgcctaattctgaatatatatatatatatatcttttca

SEQ ID NO: 26561 - DNA, 1562 bp, Homo sapiens
  source 1..1562: mol_type = unassigned DNA
gttcgaccgagcaaatcctgctccagcactctagaacttagctgtatctaactcccgagtcaatccaaatgtgttctttcctcttggcagcgttcctgcctcctggcatggcaatcctcttccctgagactggcagttgctcaagataggaagctcccgggaccagacccgagcgccagccggctacgccgtccgctggcctgagcaaataaacgcgtgtcttcaaaaaactacaatccccatggtggcacgcgcctgtagtcccagctactctggtggctgaggcaggagaatggcgtaaacccgggaggcggagcttacagtgagccgagatcgcgccactgcactccagcctgggcgacagagcgctcaaaaaaaaaacaaaaaacaaaaaacaaaaaactacaacccccatgaagctttagtgcctttgaggggaggagtggcgcatgtttgttcacgcacgaaaaagaaattaaacctaactaccgttcccagagggcgccgctctgcaaattacccaatcagctctaagtacaaagcatcgcgagtctttagtgctctttggcgctataagcccgtgggaacgagcattggagacccttttcacaagatggcgccgaaagcgaagaaggaagctcctgcccctcctaaagctgaagccaaagcgaaggctttaaaggccaagaaggcagtgttgaaaggtgtccacagccacaaaaagaagaagatccgcacgtcacccaccttccggcggccgaagacactgcgactccggagacagcccaaatatcctcggaagagcgctcccaggagaaacaagcttgaccactatgctatcatcaagtttccgctgaccactgagtctgccatgaagaagatagaagacaacaacacacttgtgttcattgtggatgttaaagccaacaagcaccagattaaacaggctgtgaagaagctgtatgacattgatgtggccaaggtcaacaccctgattcggcctgatggagagaagaaggcatatgttcgactggctcctgattacgatgctttggatgttgccaacaaaattgggatcatctaaactgagtccagctgcctaattctgaatatatatatatatatatcttttcaccatatacatgcctgtctgtcaatttctggttgggctgggaggccacacacacacactgacatgacagggcttgggcaagactcctgttctacttatccttttgaaatacctcaccctgccactccaccatgtatgatcattccagagatctttgtgactagagttagtgtcctaggaaaaccagaactcagaacttgcctccatggttgagtaacaagctgtacaagaaccccttttatccctggaagaggctgtgtatgaaaccaatgcccagggtttgaagggtgttagcatccatttcaggggagtgtggattggctggctctctggtagcattttgtcctcacacacccatctactatgtccaaccggtctgtctgcttccctcaccccttgcccaataaaggacaaggacttcagaggagta

SEQ ID NO: 26562 - DNA, 623 bp, Homo sapiens
  source 1..623: mol_type = unassigned DNA
ggggaggagatttccggcccccatccccgcagcgaccttataaggtctcttcccatgattctctctttcttttcgccatcttttgtctttccgtggagctgtcgccatgaaggtcgagctgtgcagttttagcgggtacaagatctaccccggacacgggaggcgctacgccaggaccgacgggaaggttttccagtttcttaatgcgaaatgcgagtcggctttcctttccaagaggaatcctcggcagataaactggactgtcctctacagaaggaagcacaaaaagggacagtcggaagaaattcaaaagaaaagaacccgccgagcagtcaaattccagagggccattactggtgcatctcttgctgatataatggccaagaggaatcagaaacctgaagttagaaaggctcaacgagaacaagctatcagggctgctaaggaagcaaaaaaggctaagcaagcatctaaaaagactgcaatggctgctgctaaggcacctacaaaggcagcacctaagcaaaagattgtgaagcctgtgaaagtttcagctccccgagttggtggaaaacgctaaactggcagattagatttttaaataaagattggattataactct

SEQ ID NO: 26563 - DNA, 799 bp, Homo sapiens
  source 1..799: mol_type = unassigned DNA
tttccgtggagctgtcgccatgaaggtcgagctgtgcagttttagcgggtacaagatctaccccggacacgggaggcgctacgccaggaccgacgggaaggttttccagtttcttaatgcgaaatgcgagtcggctttcctttccaagaggaatcctcggcagataaactggactgtcctctacagaaggaagcacaaaaagggacagtcggaagaaattcaaaagaaaagaacccgccgagcagtcaaattccagagggccattactggtgcatctcttgctgatataatggccaagaggaatcagaaacctgaagttagaaaggctcaacgagaacaagctatcagggctgctaaggaagcaaaaaaggctaagcaagcatctaaaaagactgcaatggctgctgctaaggtaattatggggtttctttactttcttgaacaatacaacaggaaaattttctttttttgagacggagtcttgctctgttgcccaggatggggtgcagtggcgtgatctgatctcagctcactgcaacctctgcctcccgggttcaagtgatactcctgcctcagcctcccgagtagctgggagtacaggtgcgcgccatcacgcccggctgattttttgtttgtttgtttgtttgtttaagtagagacagggtttcaccatgtcggacaggctggtcttgaactcttgacctcaggtgatctgcccacctcagcctcccaaagtgctggggttacaagtgtgagccactgagcccggctggaaaatttattttcagtctaaattgtg

SEQ ID NO: 26564 - DNA, 581 bp, Homo sapiens
  source 1..581: mol_type = unassigned DNA
gacataggtctcgcgagatctttggtaaacttacagaaccggaagcagcgtgtagttctcttcccttttgcggccatcaccgaagcgggagcggccaaaatgaagtttaatccctttgtgacttccgaccgaagcaagaatcgcaaaaggcatttcaatgcaccttcccacattcgaaggaagattatgtcttcccctctttccaaagagctgagacagaagtacaacgtgcgatccatgcccatccgaaaggatgatgaagttcaggttgtacgtggacactataaaggtcagcaaattggcaaagtagtccaggtttacaggaagaaatatgttatctacattgaacgggtgcagcgggaaaaggctaatggcacaactgtccacgtaggcattcaccccagcaaggtggttatcactaggctaaaactggacaaagaccgcaaaaagatcctcgaacggaaagccaaatctcgccaagtaggaaaggaaaagggcaaatacaaggaagaaaccattgagaagatgcaggaataaagtaatcttatatacaagctttgattaaaacttgaaacaaagag

SEQ ID NO: 26565 - DNA, 475 bp, Homo sapiens
  source 1..475: mol_type = unassigned DNA
tccttctttcctttttgctggtagggccgggtggttgctgccgaaatgggcaagttcatgaaacctgggaaggtggtgcttgtcctggctggacgctactccggacgcaaagctgtcatcgtgaagaacattgatgatggcacctcagatcgcccctacagccatgctctggtggctggaattgaccgctacccccgcaaagtgacagctgccatgggcaagaagaagatcgccaagagatcaaagataaaatcttttgtgaaagtgtataactacaatcacctaatgcccacaaggtactctgtggatatccccttggacaaaactgtcgtcaataaggatgtcttcagagatcctgctcttaaacgcaaggcccgacgggaggccaaggtcaagtttgaagagagatacaagacaggcaagaacaagtggttcttccagaaactgcggttttagatgctttgttttgatcatt

SEQ ID NO: 26566 - DNA, 4916 bp, Homo sapiens
  source 1..4916: mol_type = unassigned DNA
cggctcagggctggcgcatttggtgaggagctcagacaacgaggcccttagggtcggcttaggcggttccctgaccaaggcgccagaaaagggcctggctcaagcaagcacgggcggcgtgcagtacagcacacctagccccgattcttcaacagttctcgccctccgagcctagcacaacgagcctcaccgaaaccgtacaccgccaccaggacactccgtgatgggggatcaccaccctcagaaagaggaagcgactagcaggcgcgcaatcccgcgagaccaggaggccccgcccgaagcccggcctctgtgaccggaagtgaggcgttttgccccgcccccgtggccgatacctcgcgagacttggcgaaggccttcctttttcgtctgggctgccaacatgccatccagactgaggaagacccggaaacttaggggccacgtgagccacggccacggccgcataggcaagcaccggaagcaccccggcggccgcggtaatgctggtggtctgcatcaccaccggatcaacttcgacaaataccacccaggctactttgggaaagttggtatgaagcattaccacttaaagaggaaccagagcttctgcccaactgtcaaccttgacaaattgtggactttggtcagtgaacagacacgggtgaatgctgctaaaaacaagactggggctgctcccatcattgatgtggtgcgatcgggctactacaaagttctgggaaagggaaagctcccaaagcagcctgtcatcgtgaaggccaaattcttcagcagaagagctgaggagaagattaagagtgttgggggggcctgtgtcctggtggcttgaagccacatggagggagtttcattaaatgctaactactttttccttgtggtgtgagtgtaggttcttcagtggcacctctacatcctgtgtgcattgggagcccaggttctagtacttagggtatgaagacatggggtcctctcctgacttccctcaaatatatggtaaacgtaagaccaacacagacgttggccagttaaacatttctgtttataaagtcagaataatacctgttgatcactgaaaggcctgcatgtattgtactctgaattttacagtgaatgagagaatgtaccctaattgttcaacagggctcaaaaggaaagattccattttgatgggtcacattctaaagaggggcagtgtgataggaatgagatggtcctttaggacttaagttctcagcccaaggtttttccacgtggccccctcatcttttttttttttttaaacggagtctctcttgccaggctggagtgcagtggcacgatctcggctcactgcagcctccgcctcccaggttaagcgattctcctgcctcagcttcctgactaactgggattacaggcgcccaccaccatgcccagctaatttttgtattttcagtagagatggggtttcaccatgttggccatgctggtctctaactcctaacctcaagtgatctgcccacatcggcctccaaaagttctgggattatagtgtgagccactgcgcccggccatggctccttaatcttgatccaaattattgttacatccagaatgtgatgaatcaaaatctcgagatgggggtccagcaatctgaaatttcagtatgccagggcttttctgtatgtcaaagtgggtttgaaatagttaatttttcttctagtctgaaatgtatcgggaaaatttggaaatcctgaaggctggaaattgaaataagtttttctaggatttgtgtctcttgctattggaaaactgatggtgaccaattcatgtttacaaataagatcctcatagatctcggtaaattataatttgctacagttttatggttcttcctgtgattttgagctttttttgacccaaaataatacagtctaaaactatagacaaataagatggcacttagactcctgggttttagttagtggaggtttccttagtgcactgtggggtcataataagccgagaaccatggctgtctatgggacacatctgtcaggacaacctttagaggatgttggggatcaaatagaaggcacagagaagcactgaattggcttacataagaataggctagaattacaagtagtgaaacctcgattcagctggacaattttaaacaaatgtatcatttggcttgtatcttctgttgtgctggagaagttagaaataagggctctccagaccagcctgaccaacctggagaaaccttgtctctactaaatacacaaaattagccaggcgtggtggcacatgcctgtaatcccagctactttggaggctgagccaggagaatctccaggaggcggaggttgctgtgagccgagatcgtgccattgcactccagcttgggcaacaagagtgaaactctgtccaccccccccaaaaaaagtaagggctctccattagggcccatagaggacttgtaatatggaacctgaatccaaggatcccacaataagtggtcagtagttcatgatgaattaaaagactcaatatttggtcttcacccaatacctgtgtgacttttagtcctaatttcctcatctttaaaatttcagtgaaagtgcctacctgaggattgtgtagattaaaatggaaaccgtgcacttaattttttgttttgttttgagacggagtctcgctctgtcgcccaggctggagtgcagtggtgcgatctcagatcactgcaagctccgcctcctaggttcagaccattctcctgcctcagcttcccaagtagctgggactacaggcgcccgccactgcgcccggctaattttttgcatttttagtagagacagggtttcaccgtgttagccaggatggtctcgatctcctgatctgcccgcctcagcctcccaaagtgctgggattacaggcatgagccaccgcgcccggcccaggcacttaatttttgtgtttgacttagtaacttaagtgcaaactattacgggagcagatggagtcaattggccttcatgtgattgtcagtgggaaattggtccaagcagagggaatactggttcaggaaactggtttgggaaggttaggcaaacgggaagtgctatggtggagagaaagattactctggccgggctgtaaaggacggctacaatgggaggctgaaggcagaaccaagaaaatgggagtgagtatggaaaaggtacgattcagacggcataatggacgggacttggagactgaattgtagtgggccgaccacaaaatgataaggcatggaaggaagtagagtttggggggaaggatccctagtcccttaatggctaccttcttccccaggagttgttaggccatccgatcccctggcctgggaaagaaacactgatttcgttgctggcttgttcactcaccagaagctacagctactaacagttctaaaaactgtttcatgtgatgaggaacagacgaaaatagttttgagccctaagtccgccgattccagtgctttcttgaacccgcatttactaaaatattttcatgactgccaagctttgaatagcctgctgtgttcatggaggctcatactggcgatctctagtggctggctaaagcttgaattgcaaaagatctaatttctggtctaatgtatatatgccttaaatatagttgcgttcaaacgtgggagctgcaggtgcaacttgattttatgacaaatggctgccacataatttgcacaagcagtgctcgtcaagggcagctaaatcaggcgagctttcaatcaaaataaatgtactactaaaccctacttagcggctaactagcccaagagcagacagcccacggacggactgcaagtcggaagcgcgggcggaagctgtgcagcgcccacctggtggctccatcggccgcgttcatcagtcagcacgacccgacctcagtggcgtcctcacaacacagaccggaccttgggtcttaccccggcacctgagaaccacttccggtgagtagcttctacttccggagacgatgactcccccgcgtcccagaccggaagaagcccggcggagaccggcctcgctcggccacttccggcaagggcggagccggccagtggtgcgcgagcgcagataactcccctggagaggcgggatgttcaactccacccctggtccttgggcggccgtgggtccccttcgaagcggaggaatggccaacctcgccgcacttcgagcccctttagggtgcgtttaagaacagtgggcgtggcctttacgtaaatcttcgagatgggaacctccagaatttgtctcaattgtctaaaaggtaatgagcgtcagcgacattcaagggcactttgggctaaaaaagaaagtgcttgtacacggatggaaatattctagaagaacataaaaggaatttcctcttaggaggttagggaaatgagcacgaagtatgttttggtgcagttttttgttcaacccaatgcgtattttcatattgagaggcaatataaatggagcgaaagtatcttgagaaaaaaaaaaaaactaccagaacttgccgttgctgaaaagtaatattttctctttcgagagttttcatggccttttaaattacacccccacctccacaggcaaataaatttgttttggaatgcataccacatcatctggctctagaaacgtattttgtgtagctcccctagcaagaatataggttaaagcgtaaatttaattcctggctctattttacatcccaatttttattttcctctcattcccactttacgttgtttcaaataacctagtttgtgtatccctgtaagtcattttggtataaagtaggttataagtgtacatgcgaaaagatgtttttaacaaaaatgtaactga

SEQ ID NO: 26567 - DNA, 867 bp, Homo sapiens
  source 1..867: mol_type = unassigned DNA
cttcctttttcgtctgggctgccaacatgccatccagactgaggaagacccggaaacttaggggccacgtgagccacggccacggccgcataggcaagcaccggaagcaccccggcggccgcggtaatgctggtggtctgcatcaccaccggatcaacttcgacaaataccacccaggctactttgggaaagttggtatgaagcattaccacttaaagaggaaccagagcttctgcccaactgtcaaccttgacaaattgtggactttggtcagtgaacagacacgggtgaatgctgctaaaaacaagactggggctgctcccatcattgatgtggtgcgatcggtaagttaattggatgtttttctgtacttccataccttcccttacaaaactctggcttaatctaatccacttatataatctgtacttcccagttacctaccagacattgatattcttcctgtggtagaattatcataggtagttccctatccgtagcagtgcctactgtcactgcccaggttgtatcaggtttgcatttcgtgcttgaactatagctggttttcactgagcacagctcttggcccttcatgttctccagataatagaatcctaatatgttccattgatactcagtgccatgcattatctgaagagattttcccccaaaacagatgtattatgtctgtccttgcgggggttctggtccctgtgtcagtcttaactctcatgaatatagaggtagtgttaagaggccagaaccctagggacgctttaaattcacttcccagcctatttaatgtccattgagtagttctggtggtcaggaaggtggttgtcttcttttgcttagcagggggtattt

SEQ ID NO: 26568 - DNA, 4796 bp, Homo sapiens
  source 1..4796: mol_type = unassigned DNA
gggagggcgaactgcaagagggctgccaggattagccgagggattccgaatgaagacggagtatttccgaacatacacacctctcccaagagcgtttccggagggttccgaaaatacccgagcgggcctcggcgccctcattggccatcaccgcgagggcttacgaagaccggaaatatccaaaggtgccggggctaggcttatatagttcacgcattcaccagttcattcataaaacaaatgtttgttgagcgcccatcatatgccaatcacagtgacaagtgctgggtgagcaatactggagagataacgctgaggtatgggtcccaggacctctcgaattggagccactcggaaatccagcggtagagtttcgaaaacttccgaacggttcccggaatacgctctcggccctctaaccgaagagttccgaatattcccgagcgttgagcgaattttcggcggaagcagccgaacatcatcgagccgcctcggaggtggggaccgacaactcctgtcgtgcccgcccggagaggaagcggaaatgcgtgtacggtattaaaggcgtcgcctcgcccctcgccttcctctttccgtctcaggtcgccgctgcgaagggagccgccgccatgtctgcgcatctgcaatggatggtcgtgcggaactgctccagtttcctgatcaagaggaataagcagacctacagcactgagcccaataacttgaaggcccgcaattccttccgctacaacggactgattcaccgcaagactgtgggcgtggagccggcagccgacggcaaaggtgtcgtggtggtcattaagcggagatccggccagcggaagcctgccacctcctatgtgcggaccaccatcaacaagaatgctcgcgccacgctcagcagcatcagacacatgatccgcaagaacaagtaccgccccgacctgcgcatggcagccatccgcagggccagcgccatcctgcgcagccagaagcctgtgatggtgaagaggaagcggacccgccccaccaagagctcctgagccccctgcccccagagcaataaagtcagctggctttctcacctgcctcgactgggcctccctttttgaaacgctctggggagctctggccctgtgtgttgtcattcaggccatgtcatcaaaactctgcatgtcaccttgtccatctggaggtgatgtcaatggctggccatgcaggaggggtggggtagctgccttgtccctggtgagggcaagggtcactgtcttcacagaaaaagtttgctgacttgtgattgagacctactgtcccattgtgaggtggcctgaagaatcccagctggggcagtggcttccattcagaagaagaaaggccttttctagcccagaagggtgcaggctgagggctgggccctgggccctggtgctgtagcacggtttggggacttggggtgttcccaagacctgggggacgacagacatcacgggaggaagatgagatgacttttgcatccagggagtgggtgcagccacatttggaggggatgggctttacttgatgcaacctcatctctgagatgggcaacttggtgggtggtggcttataactgtaagggagatggcagccccagggtacagccagcaggcattgagcagccttagcattgtccccctactcccgtcctccaggtgtccccatccctcccctgtctctttgagctggctcttgtcacttaggtctcatctcagtggccgctcctgggccaccctgtcacccaagctttcctgattgcccagccctcttgtttcctttggcctgtttgctccctagtgtttattacagcttgtgaggccaggagtttgagaccatcctaggcaacataatgagacaccgtctctaaaataaaattagctgggtgtggtggtgcaccgcctgtggtcccagctcctcagaggttgagtagaggctgaggtgagcggagcacttgagccaagagtatgaggctgcagtgagcccatgagccccaccactacactccagcctggaagacaccatgacacacagtgaggcctggatggggaaagagtcctgctgttgatcctcacatgtttcctgggcacctaactctgtcagccactgccagggaccaaggatccagcatccatggcacccctggttcctgccatcctggggtacccgattcaaagaaggactctgctccctgtctgagaccacccccggctctgactgagagtaaggggactgtcagggcctcgacttgccattggttggggtcgtacggggctgggagccctgcgttttgaggcagaccactgcccttccgacctcagtcctgtctgctccagtcttgcccagctcgaaggagagcagatctgaccacttgccagcccctgtctgctgtgaattaccatttcctttgtccttcccttagttgggtctattagctcagattgagaggtgttgccttaaaactgagttgggtgacttggtacctgctcaggaccccccgcactgtcccaatcccactcaggcccacctccagctggcctcactccgctggtgacttcgtacctgctcaggagcccccactgtcccagtcccactcaggcccatctctggctggcctcactgcgctgggactccgccttcataaggagagctcactgctcacgttagtagatggccccttctcgtgaggcctctcccctggcacctgcttcagttgtcctccacagcactgatttgcagcccacaagctggcaggtttatctgtctcatgtttgtcttgtgctggtgggcaaggggtttgtctagcacaccagcatataatgagatgcttgatgaatggtgcatattgaatgtataaagcccaccggtcctgagagtttgctcactggagactttctggagatggagtctcgctctgttgcccaggctggcgagtgcaatggcgcgatcttggctcactgcagcctccacctcctgggttcaagcgattctcctgcctcagcctcccgagtagctgggattacaggtgggtgtcaccacacccagctcagtattgtatttttagcagagatggggtttcaccattttgcccaggctggtttggaactcctgacttcaaattacccacctgcctcagcctcccaaagtgctggcattacaggcgctcgaggctttctgatgtggctgctgctgctcagaaggccttgtccttaaccacctccttgcctgccctggaggcttgtgcctctaggccccaccccctgtggagtcctgctggctttctccatccctatctgaatcctccctgctgtgtggcctcccctggtctcatccgtaacacagcccagcttagtgggcctctgttcctgcgggtggccagcctgtctgtgtggctgggctggggaggccacgtctggtatctgaatgctatcggtgggttggggtggaggaaccaggagagggctggagggagggagatggtctcagccccacagagtttggagtcctcagtgtgctgagcaaacgtggagacaccatttccctcctctagacctcatcttggagagagagatgttggatggggccatctattccagctttattcacacaaatcatgtctgttggcctggaaattggaaaaccagttaaaccaaaaacatgatattaagaaaacaggcaggctcaccatagtaaaaatgctgaaagccaaagacaaaattgggagaacaaaagaaaagcgtcttgtcacatacagaaggtccctgataaagttagtagctgccctcatcagaaaccaggcccaggcagtggggacacatccagagtgctgaaagaacctcccccaggtcatcctatccccaagagtgatgcccggcagcattcccagctcagggctaatggttcacggaagccaggaatcaaactgcctgggttccagtcccagctctgccagttatgcccagctgtggggacttgggcagctcgtttagtagcaccgtgcctcagtttcccatatgtaaaaggccattttgagtgcctttcacagccctgcataaggcaggtgtctcagtgttcactgctgtctctccagctcttagtccagtagctgcatggtgagtgagcgtagggcgcaccctggaaggctgccaagcccaaagttgtgcagagcgctggggactccagactccccacagcagcagagactcgggactgaggcatcctctgttcacaggacatgctggcatctactgggtcagggctctgctgctcggtggctgtgcaaccttgggcaagttcctcaacctctctgtgtcttcgtaccctcatctgtaacatgcgtgtcgatagaccctactactcagggttgatgagaagattaaatgtgcaaaacctgcttgactgtgcccacaaatcctgattgtaggaataaattaatgactttttataaatattttgatcagatggactcatgatcacagatgtcttcacatgcctatgactaatttgtacacaaactaatgctcgtgtttcccaagcacctggaagacatgccagatccatgtgcagtaatgcctggtggctccaggtctgccccgccgtcctgtggggctgtgagctttcccagcctcctgcccgtgtttgtgaatatcattctgtcctcagctgcatttccagcccaggctgtttggcgctgcccaggaatggtatcaattcccctgtttctcttgtagccagttactagaataaaatcatctactttaaaa

SEQ ID NO: 26569 - DNA, 573 bp, Homo sapiens
  source 1..573: mol_type = unassigned DNA
ctctttccgtctcaggtcgccgctgcgaagggagccgccgccatgtctgcgcatctgcaatggatggtcgtgcggaactgctccagtttcctgatcaagaggaataagcagacctacagcactgagcccaataacttgaaggcccgcaattccttccgctacaacggactgattcaccgcaagactgtgggcgtggagccggcagccgacggcaaaggtgtcgtggtggtcattaagcggagatccgagtgagtttttctcaggtccttgattggaactgcctcagagccaagggtccttttactcagtggcagcaacaaacgcagtctgttggctagtgatcctcctgtctcagggacacgtagtccagggagcagccaattgcttggcacttggggaccccgttctggggagtcctgaaagctttcacctcttggattgccgaatacatgggtggcccttcctagactaagggactggcctgagtgaggctgggcctctcagccaagctgatgttgaaccactgctgtggggatgggcctggggttcctgggaagctgttcatacccattg

SEQ ID NO: 26570 - DNA, 590 bp, Homo sapiens
  source 1..590: mol_type = unassigned DNA
ctctttccgtctcaggtcgccgctgcgaagggagccgccgccatgtctgcgcatctgcaatggatggtcgtgcggaactgctccagtttcctgatcaagaggaataagcagacctacagcactgagcccaataacttgaaggcccgcaattccttccgctacaacggactgattcaccgcaagactgtgggcgtggagccggcagccgacggcaaaggtgtcgtggtggtcattaagcggagatccggtgagttttgtctggtttgggccagagagcggcccctttcccgggtctgggagctgtgattttttactgtcaggcaggaagagcggtaactgccatcgcggcgggcatccctggcgccagggtgttggtctgggtaccggcttccctctcggccgacttgtcagctctgtgagccgcgcgcgtctgagcccgtgtcctcacctgtaaagtggagaaatgaaaaaggacctgaacttcctcggtggttgttgagagttaaggcacggggttgatgttttcagatgaaattctcaaagcaagtcagggtggggatggatggtttcatcccacaggtgggaagatt

SEQ ID NO: 26571 - DNA, 510 bp, Homo sapiens
  source 1..510: mol_type = unassigned DNA
atgtctgcgcatctgcaatggatggtcgtgcggaactgctccagtttcctgatcaagaggaataagcagacctacagcactgagcccaataacttgaaggcccgcaattccttccgctacaacggactgattcaccgcaagactgtgggcgtggagccggcagccgacggcaaaggtgtcgtggtggtcattaagcggagatccggccagcggaagcctgccacctcctatgtgcggaccaccatcaacaagaatgctcgcgccacgctcagcagcatcagacacatgatccgcaagaacaagtaccgccccgacctgcgcatggacatgctggcatctactgggtcagggctctgctgctcggtggctgtgcaaccttgggcaagttcctcaacctctctgtgtcttcgtaccctcatctgtaacatgcgtgtcgatagaccctactactcagggttgatgagaagattaaatgtgcaaaacctgcttgactgtgcccacaaatcctga

SEQ ID NO: 26572 - DNA, 616 bp, Homo sapiens
  source 1..616: mol_type = unassigned DNA
ctctttccgtctcaggtcgccgctgcgaagggagccgccgccatgtctgcgcatctgcaatggatggtcgtgcggaactgctccagtttcctgatcaagaggaataagcagacctacagcactgagcccaataacttgaaggcccgcaattccttccgctacaacggactgattcaccgcaagactgtgggcgtggagccggcagccgacggcaaaggtgtcgtggtggtcattaagcggagatccggccagcggaagcctgccacctcctatgtgcggaccaccatcaacaagaatgctcgcgccacgctcagcagcatcagacacatgatccgcaagaacaagtaccgccccgacctgcgcatggacatgctggcatctactgggtcagggctctgctgctcggtggctgtgcaaccttgggcaagttcctcaacctctctgtgtcttcgtaccctcatctgtaacatgcgtgtcgatagaccctactactcagggttgatgagaagattaaatgtgcaaaacctgcttgactgtgcccacaaatcctgattgtaggaataaattaatgactttttataaatattttgatcagatggactcatgatcacagatg

SEQ ID NO: 26573 - DNA, 852 bp, Homo sapiens
  source 1..852: mol_type = unassigned DNA
gggaggtgagcgttcgtcttcctcgcgtggtcgccatctccggcccgccgcgcactccctctcagtcctctgcctgccttctccccttgcgcctcaagggtcattggcggaccccaacccctccccgtgaagtcgttgtgaattttcaagttattttcccctcactctcattcgccgcagctagtctcggctgcctgaattcggtcccgccgccttaggtcactcagtcccgcctgacaagagttctaggtcgctgtctgccctcaggggtctcccattcacccaagttcccagtcgctctcttcctctgctgtccgagcgtggcccgtggcctaacgctgctttagttctctgtgtctgacgctttccctgtgcccgtttccccgcagccgccgccatgtctgcgcatctgcaatggatggtcgtgcggaactgctccagtttcctgatcaagaggaataagcagacctacagcactgagcccaataacttgaaggcccgcaattccttccgctacaacggactgattcaccgcaagactgtgggcgtggagccggcagccgacggcaaaggtgtcgtggtggtcattaagcggagatccggccagcggaagcctgccacctcctatgtgcggaccaccatcaacaagaatgctcgcgccacgctcagcagcatcagacacatgatccgcaagaacaagtaccgccccgacctgcgcatggcagccatccgcagggccagcgccatcctgcgcagccagaagcctgtgatggtgaagaggaagcggacccgccccaccaagagctcctgagccccctgcccccagagcaataaagtcagctggctttctca

SEQ ID NO: 26574 - DNA, 1204 bp, Homo sapiens
  source 1..1204: mol_type = unassigned DNA
ctttccgtctcaggtcgccgctgcgaagggagccgccgccatgtctgcgcatctgcaatggatggtcgtgcggaactgctccagtttcctgatcaagaggaataagcagacctacagcactgagcccaataacttgaaggcccgcaattccttccgctacaacggactgattcaccgcaagactgtgggcgtggagccggcagccgacggcaaaggtgtcgtggtggtcattaagcggagatccggccagcggaagcctgccacctcctatgtgcggaccaccatcaacaagaatgctcgcgccacgctcagcagcatcagacacatgatccgcaagaacaagtaccgccccgacctgcgcatggtgagctggggtttggggatcaggcttggggagactggccagtgctgtggggaagggcctcccactactggttgcaatatgggctggagagggatggattcttgctttcagcctactccccacacccagcattggcctagggggcggcttgtggagtgtatgggctgagccttgctctgctcccccgcccccaggcagccatccgcagggccagcgccatcctgcgcagccagaagcctgtgatggtgaagaggaagcggacccgccccaccaagagctcctgagccccctgcccccagagcaataaagtcagctggctttctcacctgcctcgactgggcctccctttttgaaacgctctggggagctctggccctgtgtgttgtcattcaggccatgtcatcaaaactctgcatgtcaccttgtccatctggaggtgatgtcaatggctggccatgcaggaggggtggggtagctgccttgtccctggtgagggcaagggtcactgtcttcacagaaaaagtttgctgacttgtgattgagacctactgtcccattgtgaggtggcctgaagaatcccagctggggcagtggcttccattcagaagaagaaaggccttttctagcccagaagggtgcaggctgagggctgggccctgggccctggtgctgtagcacggtttggggacttggggtgttcccaagacctgggggacgacagacatcacgggaggaagatgagatgacttttgcatccagggagtgggtgcagccacatttggaggggatgggctttacttgatgcaacctcatctctgagatgggcaacttggtgggtgg

SEQ ID NO: 26575 - DNA, 695 bp, Homo sapiens
  source 1..695: mol_type = unassigned DNA
ttccggcgttgttgaccctatttcccgtgctgcaccgcagcccctttctcttccggttctaggcgcttcgggagccgcggcttatggtgcagacatggccaagtccaagaaccacaccacacacaaccagtcccgaaaatggcacagaaatggtatcaagaaaccccgatcacaaagatacgaatctcttaagggggtggaccccaagttcctgaggaacatgcgctttgccaagaagcacaacaaaaagggcctaaagaagatgcaggccaacaatgccaaggccatgagtgcacgtgccgaggctatcaaggccctcgtaaagcccaaggaggttaagcccaagatcccaaagggtgtcagccgcaagctcgatcgacttgcctacattgcccaccccaagcttgggaagcgtgctcgtgcccgtattgccaaggggctcaggctgtgccggccaaaggccaaggccaaggccaaggccaaggatcaaaccaaggcccaggctgcagccccagcttcagttccagctcaggctcccaaacgtacccaggcccctacaaaggcttcagagtagatatctctgccaacatgaggacagaaggactggtgcgaccccccacccccgcccctgggctaccatctgcatggggctggggtcctcctgtgctatttgtacaaataaacctgaggcagga

SEQ ID NO: 26576 - DNA, 742 bp, Homo sapiens
  source 1..742: mol_type = unassigned DNA
gcttatggtgagtgttggccgcgcggcatccgatgccatccgcgacttacgggtggcggcggggcgcgggctgcggagaggactggtgaccgaccgtgtgtctgtcgggagcaaaagctgcggggtgggaatggtgcagacatggccaagtccaagaaccacaccacacacaaccagtcccgaaaatggcacagaaatggtatcaagaaaccccgatcacaaagatacgaatctcttaagggggtggaccccaagttcctgaggaacatgcgctttgccaagaagcacaacaaaaagggcctaaagaagatgcaggccaacaatgccaaggccatgagtgcacgtgccgaggctatcaaggccctcgtaaagcccaaggaggttaagcccaagatcccaaagggtgtcagccgcaagctcgatcgacttgcctacattgcccaccccaagcttgggaagcgtgctcgtgcccgtattgccaaggggctcaggctgtgccggccaaaggccaaggccaaggccaaggccaaggatcaaaccaaggcccaggctgcagccccagcttcagttccagctcaggctcccaaacgtacccaggcccctacaaaggcttcagagtagatatctctgccaacatgaggacagaaggactggtgcgaccccccacccccgcccctgggctaccatctgcatggggctggggtcctcctgtgctatttgtacaaataaacctgaggcagga

SEQ ID NO: 26577 - DNA, 551 bp, Homo sapiens
  source 1..551: mol_type = unassigned DNA
acgggtggcggcggggcgcgggctgcggagaggactggtgcagacatggccaagtccaagaaccacaccacacacaaccagtcccgaaaatggcacagaaatggtatcaagaaaccccgatcacaaagatacgaatctcttaagggggtggaccccaagttcctgaggaacatgcgctttgccaagaagcacaacaaaaagggcctaaagaagatgcaggccaacaatgccaaggccatgagtgcacgtgccgaggctatcaaggccctcgtaaagcccaaggaggttaagcccaagatcccaaagggtgtcagccgcaagctcgatcgacttgcctacattgcccaccccaagcttgggaagcgtgctcgtgcccgtattgccaaggggctcaggctgtgccggccaaaggccaaggccaaggccaaggccaaggatcaaaccaaggcccaggctgcagccccagcttcagttccagctcaggctcccaaacgtacccaggcccctacaaaggcttcagagtagatatctctgccaacatgaggacagaa

SEQ ID NO: 26578 - DNA, 670 bp, Homo sapiens
  source 1..670: mol_type = unassigned DNA
tgccatccgcgacttacgggtggcggcggggcgcgggctgcggagaggactggtgaccgaccgtgcagacatggccaagtccaagaaccacaccacacacaaccagtcccgaaaatggcacagaaatggtatcaagaaaccccgatcacaaagatacgaatctcttaagggggtggaccccaagttcctgaggaacatgcgctttgccaagaagcacaacaaaaagggcctaaagaagatgcaggccaacaatgccaaggccatgagtgcacgtgccgaggctatcaaggccctcgtaaagcccaaggaggttaagcccaagatcccaaagggtgtcagccgcaagctcgatcgacttgcctacattgcccaccccaagcttgggaagcgtgctcgtgcccgtattgccaaggggctcaggctgtgccggccaaaggccaaggccaaggccaaggccaaggatcaaaccaaggcccaggctgcagccccagcttcagttccagctcaggctcccaaacgtacccaggcccctacaaaggcttcagagtagatatctctgccaacatgaggacagaaggactggtgcgaccccccacccccgcccctgggctaccatctgcatggggctggggtcctcctgtgctatttgtacaaataaacctgaggcagg

SEQ ID NO: 26579 - DNA, 537 bp, Homo sapiens
  source 1..537: mol_type = unassigned DNA
cgggtggcggcggggcgcgggctgcggagaggactggtgaccgaccgtgtgtgcagacatggccaagtccaagaaccacaccacacacaaccagtcccgaaaatggcacagaaatggtatcaagaaaccccgatcacaaagatacgaatctcttaagggggtggaccccaagttcctgaggaacatgcgctttgccaagaagcacaacaaaaagggcctaaagaagatgcaggccaacaatgccaaggccatgagtgcacgtgccgaggctatcaaggccctcgtaaagcccaaggaggttaagcccaagatcccaaagggtgtcagccgcaagctcgatcgacttgcctacattgcccaccccaagcttgggaagcgtgctcgtgcccgtattgccaaggggctcaggctgtgccggccaaaggccaaggccaaggccaaggccaaggatcaaaccaaggcccaggctgcagccccagcttcagttccagctcaggctcccaaacgtacccaggcccctacaaaggcttcagagta

SEQ ID NO: 26580 - DNA, 713 bp, Homo sapiens
  source 1..713: mol_type = unassigned DNA
cgcgcggcatccgatgccatccgcgacttacgggtggcggcggggcgcgggctgcggagaggactggtgaccgaccgtgtgtctgtcgggagcaaaagctgcggggtgcagacatggccaagtccaagaaccacaccacacacaaccagtcccgaaaatggcacagaaatggtatcaagaaaccccgatcacaaagatacgaatctcttaagggggtggaccccaagttcctgaggaacatgcgctttgccaagaagcacaacaaaaagggcctaaagaagatgcaggccaacaatgccaaggccatgagtgcacgtgccgaggctatcaaggccctcgtaaagcccaaggaggttaagcccaagatcccaaagggtgtcagccgcaagctcgatcgacttgcctacattgcccaccccaagcttgggaagcgtgctcgtgcccgtattgccaaggggctcaggctgtgccggccaaaggccaaggccaaggccaaggccaaggatcaaaccaaggcccaggctgcagccccagcttcagttccagctcaggctcccaaacgtacccaggcccctacaaaggcttcagagtagatatctctgccaacatgaggacagaaggactggtgcgaccccccacccccgcccctgggctaccatctgcatggggctggggtcctcctgtgctatttgtacaaataaacctgaggcagg

SEQ ID NO: 26581 - DNA, 1442 bp, Homo sapiens
  source 1..1442: mol_type = unassigned DNA
gaacgaaagctaggagcggaagagcgtgcgtggaaatggcgctcggtacgtgcccccgacctgtcgtctgccgcgggggcgcgctcgcacgccggaaggggcggggccagatttggctttatatagcggacccgtaaggccgaccggcctctaccggcgggatttgatggcgtgatgtctcacagaaagttctccgctcccagacatgggtccctcggcttcctgcctcggaagcgcagcagcaggcatcgtgggaaggtgaagagcttccctaaggatgacccgtccaagccggtccacctcacagccttcctgggatacaaggctggcatgactcacatcgtgcgggaagtcgacaggccgggatccaaggtgaacaagaaggaggtggtggaggctgtgaccattgtagagacaccacccatggtggttgtgggcattgtgggctacgtggaaacccctcgaggcctccggaccttcaagactgtctttgctgagcacatcagtgatgaatgcaagaggcgtttctataagaattggcataaatctaagaagaaggcctttaccaagtactgcaagaaatggcaggatgaggatggcaagaagcagctggagaaggacttcagcagcatgaagaagtactgccaagtcatccgtgtcattgcccacacccagatgcgcctgcttcctctgcgccagaagaaggcccacctgatggagatccaggtgaacggaggcactgtggccgagaagctggactgggcccgcgagaggcttgagcagcaggtacctgtgaaccaagtgtttgggcaggatgagatgatcgacgtcatcggggtgaccaagggcaaaggctacaaaggggtcaccagtcgttggcacaccaagaagctgccccgcaagacccaccgaggcctgcgcaaggtggcctgtattggggcatggcatcctgctcgtgtagccttctctgtggcacgcgctgggcagaaaggctaccatcaccgcactgagatcaacaagaagatttataagattggccagggctaccttatcaaggacggcaagctgatcaagaacaatgcctccactgactatgacctatctgacaagagcatcaaccctctgggtggctttgtccactatggtgaagtgaccaatgactttgtcatgctgaaaggctgtgtggtgggaaccaagaagcgggtgctcaccctccgcaagtccttgctggtgcagacgaagcggcgggctctggagaagattgaccttaagttcattgacaccacctccaagtttggccatggccgcttccagaccatggaggagaagaaagcattcatgggaccactgaagaaagaccgaattgcaaaggaagaaggagcttaatgccaggaacagattttgcagttggtggggtctcaataaaagttattttccactga

SEQ ID NO: 26582 - DNA, 1289 bp, Homo sapiens
  source 1..1289: mol_type = unassigned DNA
cggtgatttttttcccacctagtctcacagaaagttctccgctcccagacatgggtccctcggcttcctgcctcggaagcgcagcagcaggcatcgtgggaaggtgaagagcttccctaaggatgacccgtccaagccggtccacctcacagccttcctgggatacaaggctggcatgactcacatcgtgcgggaagtcgacaggccgggatccaaggtgaacaagaaggaggtggtggaggctgtgaccattgtagagacaccacccatggtggttgtgggcattgtgggctacgtggaaacccctcgaggcctccggaccttcaagactgtctttgctgagcacatcagtgatgaatgcaagaggcgtttctataagaattggcataaatctaagaagaaggcctttaccaagtactgcaagaaatggcaggatgaggatggcaagaagcagctggagaaggacttcagcagcatgaagaagtactgccaagtcatccgtgtcattgcccacacccagatgcgcctgcttcctctgcgccagaagaaggcccacctgatggagatccaggtgaacggaggcactgtggccgagaagctggactgggcccgcgagaggcttgagcagcaggtacctgtgaaccaagtgtttgggcaggatgagatgatcgacgtcatcggggtgaccaagggcaaaggctacaaaggggtcaccagtcgttggcacaccaagaagctgccccgcaagacccaccgaggcctgcgcaaggtggcctgtattggggcatggcatcctgctcgtgtagccttctctgtggcacgcgctgggcagaaaggctaccatcaccgcactgagatcaacaagaagatttataagattggccagggctaccttatcaaggacggcaagctgatcaagaacaatgcctccactgactatgacctatctgacaagagcatcaaccctctgggtggctttgtccactatggtgaagtgaccaatgactttgtcatgctgaaaggctgtgtggtgggaaccaagaagcgggtgctcaccctccgcaagtccttgctggtgcagacgaagcggcgggctctggagaagattgaccttaagttcattgacaccacctccaagtttggccatggccgcttccagaccatggaggagaagaaagcattcatgggaccactgaagaaagaccgaattgcaaaggaagaaggagcttaatgccaggaacagattttgcagttggtggggtctcaataaaagttattttccactgaca

SEQ ID NO: 26583 - DNA, 543 bp, Homo sapiens
  source 1..543: mol_type = unassigned DNA
agttccggctctgccgtgaagagctttgcattgtgggaagtctttcctttctcgttccccggccatcttagcggctgctgttggttgggggccgtcccgctcctaaggcaggaagatggtggccgcaaagaagacgaaaaagtcgctggagtcgatcaactctaggctccaactcgttatgaaaagtgggaagtacgtcctggggtacaagcagactctgaagatgatcagacaaggcaaagcgaaattggtcattctcgctaacaactgcccagctttgaggaaatctgaaatagagtactatgctatgttggctaaaactggtgtccatcactacagtggcaataatattgaactgggcacagcatgcggaaaatactacagagtgtgcacactggctatcattgatccaggtgactctgacatcattagaagcatgccagaacagactggtgaaaagtaaaccttttcacctacaaaatttcacctgcaaaccttaaacctgcaaaattttcctttaataaaatttgcttgttttaaaaa

SEQ ID NO: 26584 - DNA, 575 bp, Homo sapiens
  source 1..575: mol_type = unassigned DNA
gctgttggtgagtgggctcctaccgaccgaggtttaggcagcgcggggagctttgcgggttgccatttgtaactccggatcctaaaattcctgtcctgttctctgtctcttctaggttgggggccgtcccgctcctaaggcaggaagatggtggccgcaaagaagacgaaaaagtcgctggagtcgatcaactctaggctccaactcgttatgaaaagtgggaagtacgtcctggggtacaagcagactctgaagatgatcagacaaggcaaagcgaaattggtcattctcgctaacaactgcccagctttgaggaaatctgaaatagagtactatgctatgttggctaaaactggtgtccatcactacagtggcaataatattgaactgggcacagcatgcggaaaatactacagagtgtgcacactggctatcattgatccaggtgactctgacatcattagaagcatgccagaacagactggtgaaaagtaaaccttttcacctacaaaatttcacctgcaaaccttaaacctgcaaaattttcctttaataaaatttgcttgttttaaaaa

SEQ ID NO: 26585 - DNA, 1129 bp, Homo sapiens
  source 1..1129: mol_type = unassigned DNA
ttttaaaaaattagacctgtttatcgcgctctcagtgcaaactcggctcacaagttcacgctaacacagtcacaaaaggcgagttttgggaaactcgagcagggcgccaccgttctccaggggacaggtaacttgggtgaccgcaggggtgaggacacagctgcttctaccaagcggagagtaaatgcgggtgctgcggcgcatcggagtcacccacaaggctctccaagagccgcgcctcaggacaaagatgaattcagcggcattgagaccgtggtcgcagccgccgcagcctcttctcatctaccctcccacctcaccttcagtcggcttttcgaactccctccgggttctaagcgcctcgattagttagaccgcagctcgcagcagaacagcaacacaacgccgcgaagcttaaaggcccgcagagggggaaaagaacacccccgccgtcattcttttttttccttctttgagacagagtctcactctgtcgcccaggctgagtgcagtggcgcgatcatggctcactgcagcctcgacctaccgagctcaagcgacctctccgcctcagcctccggcgtagctgggagtagctaggactactggagcgcgccaccacgcccggctaatttcttttttatttcttttttatttttttgtagagacaggggtggtctatgttgtccaggctggccttgagctggacgcaacagatcttcccgcctcaacctccgaaagtgctgggattaaaggttgggggccgtcccgctcctaaggcaggaagatggtggccgcaaagaagacgaaaaagtcgctggagtcgatcaactctaggctccaactcgttatgaaaagtgggaagtacgtcctggggtacaagcagactctgaagatgatcagacaaggcaaagcgaaattggtcattctcgctaacaactgcccagctttgaggaaatctgaaatagagtactatgctatgttggctaaaactggtgtccatcactacagtggcaataatattgaactgggcacagcatgcggaaaatactacagagtgtgcacactggctatcattgatccaggtgactctgacatcattagaagcatgccagaacagactggtgaa

SEQ ID NO: 26586 - DNA, 517 bp, Homo sapiens
  source 1..517: mol_type = unassigned DNA
ctttcctcagcttttctcccccagccattgcataaaagtcttacgtgtgtgtttctctttaaggcttcatttcttttcctgagtgttgcctactgataacggcatgcattttctcaggcttttctgagagtcatttttgtgactcctgtcccttagttttgtcttcattctgaagtttgcttagataccagctgttctctgaggcctgctgggaacgggacttctaaaaggaactatgtctggaaggctgtggtccaaggccatttttgctggctataagcggggtctccggaaccaaagggagcacacagctcttcttaaaattgaaggtgtttacgcccgagatgaaacagaattctatttgggcaagagatgcgcttatgtatataaagcaaagaacaacacagtcactcctggcggcaaaccaaacaaaaccagagtcatctggggaaaagtaactcgggcccatggaaacagtggcatggttcgtgccaaattccgaagcaatcttcctgct

SEQ ID NO: 26587 - DNA, 549 bp, Homo sapiens
  source 1..549: mol_type = unassigned DNA
tcttaccgccatcttggctcctgtggaggtgagtgaagggtctgctgctgaaatttgggggcaaataaccggagtaggtttgttcctgtgccttggcgagtcgccggcctgctgggaacgggacttctaaaaggaactatgtctggaaggctgtggtccaaggccatttttgctggctataagcggggtctccggaaccaaagggagcacacagctcttcttaaaattgaaggtgtttacgcccgagatgaaacagaattctatttgggcaagagatgcgcttatgtatataaagcaaagaacaacacagtcactcctggcggcaaaccaaacaaaaccagagtcatctggggaaaagtaactcgggcccatggaaacagtggcatggttcgtgccaaattccgaagcaatcttcctgctaaggccattggacacagaatccgagtgatgctgtacccctcaaggatttaaactaacgaaaaatcaataaataaatgtggatttgtgctcttgtatttttaagtggattaaaaaacttactaccttaaa

SEQ ID NO: 26588 - DNA, 1437 bp, Homo sapiens
  source 1..1437: mol_type = unassigned DNA
cttgttcccaagtagtacattttgcagcctaccaagatgaaaggacttaggaaaataattgtaagagtgctattgaatgtggcttatttcagtgcgaagccgatttccgaggattgtttttctggcgtttggagaagatgcctaaattgagggcggagtcgaaagatgtttaatcccacaaggccacgcggcggggcctcgtccttctcttaccgccatcttggctcctgtggaggcctgctgggaacgggacttctaaaaggaactatgtctggaaggctgtggtccaaggccatttttgctggctataagcggggtctccggaaccaaagggagcacacagctcttcttaaaattgaaggtgtttacgcccgagatgaaacagaattctatttgggcaagagatgcgcttatgtatataaagcaaagaacaacacagtcactcctggcggcaaaccaaacaaaaccagagtcatctggggaaaagtaactcgggcccatggaaacagtggcatggttcgtgccaaattccgaagcaatcttcctgctaaggccattggacacagaatccgagtgatgctgtacccctcaaggatttaaactaacgaaaaatcaataaataaatgtggatttgtgctcttgtatttttaagtggattaaaaaacttactaccttaaattgatttgctacatgcttaaaatgatagaggttgctcagcatttttggagtacaagggggtcagagagacatgtgatgaaaattacagggcgagtacagagatttagaagggaacgggttttaatgcgagtatctttgacagagtcttgctctgttgcccatgctggagtgtagtggtgctcgctgcagcctcacattcaaaggctcaagcaatcctcccttggcctttgaagtagctgggaccacaggctcatgccaccatccctgggtcatttttaaattttttgtagagagggtctgactcttgcctatgctggcttcaaactcctgggctcaagcaatcctccttccttggcctctcctgaagtgctgggatacagttatgagccaccacacctgccaagtgctttgtgatactatgcatttgttcaatgcagattgggaaacttaaaatttgaatggagattatgttgatgggctttggcagttcatttggatagactgggatgagaagctcttgggacttgtgactggacaaagcattccagtatattaaaataaaattaagccatattactccactcataaaaagcaatcctatggtaggtacatggaggttgggaatagtgcacggaaaggtggcagctttctttggcttcatgttttaatctggtaaagttcaagattgcactttaagcaggcctcctaaatattttagatttcttggggatatgctaaaataaaacaactaaggcatca

SEQ ID NO: 26589 - DNA, 691 bp, Homo sapiens
  source 1..691: mol_type = unassigned DNA
acttccgtttgcctcgcggtttctttctttccgcgccgatagcgctcacgcaagcatggttaacgtccctaaaacccgccggactttctgtaagaagtgtggcaagcaccaaccccataaagtgacacagtacaagaagggcaaggattctctgtacgcccagggaaagcggcgttatgacaggaagcagagtggctatggtgggcaaactaagccgattttccggaaaaaggctaaaactacaaagaagattgtgctaaggcttgagtgcgttgagcccaactgcagatctaagagaatgctggctattaaaagatgcaagcattttgaactgggaggagataagaagagaaaggtatataattatgggtggaaggtgcaatctttttcatagctttattatttgaaaaggtgaacatctattcattgtggcatagagctcaggggtaatcctctaaaaatattagatctatagctaaagatatgtgaggtcttttgctacaaggaggaaaggaagaatgaggcagcttaacagcatggtgagtattttaggaacagataatgttcttaatggggcagtagttcatggcaaaatacaaaacaacttttttctgttctgttacagggccaagtgatccagttctaagtgtcatcttttattatgaagacaataaaatcttgagtttatgtt

SEQ ID NO: 26590 - DNA, 910 bp, Homo sapiens
  source 1..910: mol_type = unassigned DNA
gtcggggtgagtggaccaccctttaggcggagtccttccttaagctcccgcccgcggctccgaactgagtcctctcagccgcccgagggcgctgcgctgagccttacactctatgattgctcctaccgactcccatgaggaagtgcgatcgggaacctcctatatacttccgtttgcctcgcggtttctttctttccgcgccgatagcgctcacgcaagcatggttaacgtccctaaaacccgccggactttctgtaagaagtgtggcaagcaccaaccccataaagtgacacagtacaagaagggcaaggattctctgtacgcccagggaaagcggcgttatgacaggaagcagagtggctatggtgggcaaactaagccgattttccggaaaaaggctaaaactacaaagaagattgtgctaaggcttgagtgcgttgagcccaactgcagatctaagagaatgctggctattaaaagatgcaagcattttgaactgggaggagataagaagagaaagggccaagtgatccagttctaagtgtcatcttttattatgaagacaataaaatcttgagtttatgttcacttcatttgtttgctgttcatcttttgggagggaataagctagagccatcaatacaattccgcttgtggggaaatttatgcctcttactggtactacttgttttgcattgaagctgactggttgagttcacatcatatgttgcaattttctaatttggcacttcaatcactaggggccttatgaggcagtttgtcattatgcaatggttattggttatcatgtgagtagacacatttcaggctaatagggagaagtcagtaacacattcatagtgaatatgagatgtctttgctaagagttaagtgtcagatctttgttata

SEQ ID NO: 26591 - DNA, 451 bp, Homo sapiens
  source 1..451: mol_type = unassigned DNA
gaggaagtgcgatcgggaacctcctatatacttccgtttgcctcgcggtttctttctttccgcgccgatagcgctcacgcaagcatggttaacgtccctaaaacccgccggactttctgtaagaagtgtggcaagcaccaaccccataaagtgacacagtacaagaagggcaaggattctctgtacgcccagggaaagcggcgttatgacaggaagcagagtggctatggtgggcaaactaagccgattttccggaaaaaggctaaaactacaaagaagattgtgctaaggcttgagtgcgttgagcccaactgcagatctaagagaatgctggctattaaaagatgcaagcattttgaactgggaggagataagaagagaaagggccaagtgatccagttctaagtgtcatcttttattatgaagacaataaaatcttgagtttatgttc

SEQ ID NO: 26592 - DNA, 746 bp, Homo sapiens
  source 1..746: mol_type = unassigned DNA
attggtttgcagtactgtcgctcaggtgcagttcccacttccgcctgtttcttccctttcctgttaggcgagagctgcgaaaggcgagagctgcgaagggccaggtgtcgggcgctgtttctcgttttcatcatatagacaaaacagccctgctgcaaagatggtcaacgtacctaaaacccgaagaaccttctgtaagaagtgtggcaagcatcagcctcacaaagtgacacagtataagaagggcaaggattctttgtatgcccagggaaggaggcgctatgatcggaagcagagtggctatggtgggcagacaaagccaattttccggaagaaggctaagaccacaaagaagattgtgctaaggctggaatgtgttgagcctaactgcagatccaagaggatgctggccattaagagatgcaagcattttgaactgggaggagataagaagagaaagggccaagtgatccagttctaaactttgggatatttttcttcaattttgaagagaaaatggtgaagccatagaaaagttacccgagggaaaataaatacagtgatattcttacgcaaactttttgtggtttttacttataaatagaattccatgtttagtgtagtcccacctcaaactttactaacaagtttatatatgtatgaagggaaaatactactttactactttttgttttctggtcaatttcaaatgttgaatgaattcataaacattgagcagcttagaa

SEQ ID NO: 26593 - DNA, 7686 bp, Homo sapiens
  source 1..7686: mol_type = unassigned DNA
ctcttgaccccacctacactacgacgacggacgctcgagaacgctgcaccgcgccccgcaggaagtgcttccctgggcggaagcttctgagcgtgatatagcggaagtgccttctcttccggtctttctggtctcggccgcagaagcgagatgacgaagggaacgtcatcgtttggaaagcgtcgcaataagacgcacacgttgtgccgccgctgtggctctaaggcctaccaccttcagaagtcgacctgtggcaaatgtggctaccctgccaagcgcaagagaaagtataactggagtgccaaggctaaaagacgaaataccaccggaactggtcgaatgaggcacctaaaaattgtataccgcagattcaggcatggattccgtgaaggaacaacacctaaacccaagagggcagctgttgcagcatccagttcatcttaagaatgtcaacgattagtcatgcaataaatgttctggttttaaaaaatacatatctggttttggtaaggtatttttaatcaattaggcttgtagtatcagtgaaatactgtaggtttagggactgggctagcttcatatcagatttacttgttaagtgactgttttggaatgtttacttttggactgggtttgtaacacggttaaaggcaatgagaaacaagcagaattccaggagtccttgaagcagagggcactggaagacaatatagcagattaaaatagcacagctcatgtggcataggtgggtattttagatgtttgagtaaatttgaaagagtatgatgtttaaattacctttagcaacatgttcatctgctatgctgtcatgactagggggatgattattagtcacatagagcttgggagtaccactggaaacgtatgggtaggagtttaggtggcttctgtttttcaaaagatgatcttatcctagtatctgtaatgctcacttggcacacctgacttgtgggctgtgtgtaaggtggctagctaagtgaaaaaagcctgctaggtgtgagtcaacttaagaatatgtaaataggtttgagaaaaagtagggcttgggtgcaagtaaagattgagcaggaaataaaggaaaatcaagtataatccctgagatttgtagactaaaggcaatgatgtgggactacttggtcgaatttttttagccctcaacttggtaattgggtgtttctgtgttaaagcactgaaacttgctgtcgtgccttcctagttttcgtggtttattgacagggttgggggttttttttgtttttttaaaatgaagggacaaagtcaactggactgctgagtgagagggcaggggcagttgaagggaacatgaattgctggaacagctacataaaatagtgatgtagccaagtcatgctatttaaattataattctccactgtgtttagaataacatctgaggttcttaacctggccttggaagggtatcacttttacttgtaacctggaatggctttataatgtgctagctaattgctactctcatcttgtattttaactcctaatttacccttcaggtctcagcttcagaacattcacttataaagaaaccctgctgattaaatctctcttgggcttcctcccgaaatgtgagactatactttaaagatgtatggttagagtccaattgccattgcctttcttgtttacagatagtgcaatggcgcaatcctggctcactgcagcctctaattcctgggctcaagtcaagtggttctcctgcctcagccttctgagtagctgggactacagatgcacaccaccacacctggctaatttttgtgttttttgtagagatggagattcactcgactaattctttttgtattcttagtagagactgggtttcaacatgttgaccaggctggtctcgaactcgacctcgtgatccgccgcctcggcctcccaaagtgctaggattacaggcgtgagccaccactcccggctgtcatcatcaaattttcaagtgaagatagtctgttgaagattgaacaatgaccttgaaagacagctgagttgctgtgggtataatgtaaagctggtgaagtttggccagtttgggcttcagaagtctaagtctagtgaaggtaccctgacccccatataaacaacccttgaggccggtgtggtggctcacggctgtaatcctggcactttgggaggccgaggtgggcggatcacaaggtcaagagatcgagatcaccctggcccacatggtgagaccccaactctactaaaaatacaaaaattagctgggtgtggtggcatgtgcctgtagtcttagctacttgagaggctgaggcaggagaatcgcttgaacctgggaggcagaggttgcagtgagctgagatcatgccactgtgctccagcctggtggcacagtgagactccacctcaaaaaaaaaaaaaaatccttgaactaatgactcaaattttcaaatgaaacaaaataagcagtggatcttgcattggagatggagttaaactatgttgcccaggctggtcttggactcctggtttcaagtgatcctctcatcttggcctcccaaagtgctgggattacagggacgagccaccacaccccacctattgtctatatttctatctttaacagcacttcagtcctgccttaagttatagttatgtatagatacccattatactttaaatttttcagcagaaattatgcttttatcttctctgcagtgttatatgttggtgtgcaaaaatgttaaatttatttttcctaagtaccccatctgcttttcaactctgtcctctgcctgaaaagcctccctccagcccctacttccctcccatcttagttcacaaagtcaggttgatttgcccccagctgtcaaagcagactacctgtttccacatgtaactggttatgttctgtaaagttacaaaaatagaaaggttgaatctgtggcggccgggtacggtagctcacgtcctatagtcgcagcactttgggaggccaaggtgggcagttcacgtgaggtggggagttcgagaccagcctgaccaacatggagaaaccccgtctctactaaaaatacaaaaatattagccgggcgtggtggtgcatgcctgtaatcccagctactagggaggctgaggcaggagaattgcttgaacctgggagacggaggttgcggtgagctgcagaggcctcacctctaattgagacacaattatatattgttgatatatatatatatatatatacacacacacacacacactatgatggataaatgcatgagtttctgtgagagcattggaaaggagtttgtcactcaataggtgaagccaggctaagatttaagctgagccagggaggacttgaaggaatcatgatgagagagaaggtaagtggctttgccagcaatgaaacagctgacataatggtaaccagtcagaggagggcataactatgaaactggacaccttggttgtcaggttagaaggatggggtgtagggttggtaagaaaagaattcagggaagagcagcgatcagattatgaagaatttgtcttgagaaattacagaggatttaaaccagaatgttaggaatagttattctagcaagatgaatgtggaaagtgttagtgtgcatgtgatgagtcttgaagctggaaactaggtaacaggttcttaaatagttcatgtgaaaatcatgacagactaaggcagtggctgtggggctgtccgggagttctctacagaaaacatctaaaacttgaatgtgcaagtgagtagctaacttccaagcttcccatttctgtataatttaagcatgaaaatgagaacactgagatttgataggcatgtagaagtcagagtaagcaagagggcttgagttcatcgatgaacttcagtaactatccttgacttagtattggtggaaaccatttgtgaatttacagactccaaaaacaaaaagataatttagagtctcaaagtaagatttggggagatgtccattggagacagaagtggagagagggagaagttcatttgttgacatatttatgtatggtgcacctactgtgtgccaagccatgttagagatacagtgggagcaaaaccagatgtgttttctgccctctgactccagtggttgcagaattagcccaggaactagaattggatggagtcacacaaaccaaggaaggggattgtttgaggggggcactcagtcacatgtggctgaggccaaagagaatgaagatatattttaaaattctggatttggcaaaatttaggctagtctttacttttcataaacctctctcatgttagagcagcaaagaaaaaccagtttgccaagaggtcacgagattgggcagtgaggaatggggagtttagtttaaaagacaacactagatacttttggaagtttacctattctgtggttcccttttattgactaaatggtgcccttcattcatgaagcaagtatctatttagtgactactatgtgtcaaaagctatctaggcccagaaacttttaagtggaaaacaaaacaaagaccctgccctgacagatttcaatcatgtatatactgtatgtatgtttgtggaaggtgacataatagacaattgcagatagtgataagtgtgtaagacaaggataccacgagcgtaatagacagtggggatggaggaacctttagaaggttggttaagttgaatgataaggagccattcttttgtctttacctgaatgacttatcattcagccctttttgagttttgggttgcttgcagagtttaaccttgcctgtaattgaaacttaattttgtaatagcataacttcatgtaagaaaagcaaagcaatacattacagaattattttactgaagaacttgtttcagagaaagaggctgtttcacatttattagcacatttggattatatttaggtgttttatttttttttaaacaaaggagtttggatcataatacaagagaagcacagggcaaagacactgcataacctcaagaactaagaatggaaggactggccaggcctggtggtgcacacctgtaatcccagctactcaggaggctgaggcgagagaatcgcttgagcctggggggcagaggttgcagtgagctgagagaacggcgggcggcagagcgagactccatctcaaaaaaaaaaaaggataaaggaaggacttaagcaaaatcttccttgtaagtagaaggatgttttgacaagaaaagttgcaatggaaaaatggttctcatgtacacgagtatgtagaataagcatcgtgtgtggattggattcagatcaaaacattgcttttatgtttgtgtctttatacggtgggagtataccctggtgccccaggatgaagacttgacctgacccatgtatttttagattactcacagataacaaaaagtattttcatcatgattagttgcgaaaacagttttatttcaataggtaaaacgtgcagtcctatgtaatcgtcagaaggtaatcttaattatagcttgggtgtgctttaaactgcaagctggcagtggagggcacgattcctctgatttcagctttctccttatacttttctggagctgtgagctgcaagttaactcagtgggattaaagtgtagactggaggtacaaaaggtgaggagtgaggagatagggtagttcttccttggctggctggcttcataatccctgggccccgcagataattaaatcgactttttctgtctcaggcatttgtatgacctctttggaggttccctgctgggtagttatccttgtatctgatggacccatctcaatttaaaatactctgccaggttcggaggttcatgcttgtcatcccagcactttgggaggctcagaggtgccattggcttgagcccaagagtttgagaccagcctgggcaacctggtgaaacctcttctccattaaaaatacaaaaaattagccaggcatggtggtatgtgcctgtagtcccagctactcagggagctgaggtggaaggattgcttgagcctgggaggtcaaggctgcagtgaaccttgattgtgccactgcactccagcctggatgacaaagaccctgtctcaagaaaagtctgtaattctttcctaacccttagtatccagcctcagtcctgaggttttctttacctctgggggctattttatgccggctctctcctgagtgtcacacatctggtcctcaggaaacattctcacatccctggcctgaaaaaaacaatttcagggagatcgcatggcagcagccctctctgggctccccagctaaatggttgtacgaaacacatttcaaagctctctgaagggcttccttgaagttcctttcactgggtttcaaagtagaaggtagtaactcctttgtccaagaaggctgaattgagcacttaacaattctccaaagaaatttcttcattggtctctatcctagaccccttctgtatccttgatatggctgaggattctaaaaaatgaccagtcttacatgggagggctgggatataaaaaataaaataataaataatgataaaaactgaaaactgaccacgttcttggatatgttttctttgggttgtgtgtgtgtgtgagacttttgatagttacccaaagtaggaaaaatcccattctaataaggttatatttatgtagctctgcaaataaacatctagcaaatgtaaaaagtattttctttgccttaaaaatgattaaaattatttgaactcctgaggagtgttatatgaataaaattagtaagttatttggaggaaagttattttttaaaaagacaactggtaaaacagtacaggagaaaggccagcttcctcaagtgaggacagttgtttagaattgactgaggagcggccgggtgcggaggctcacatctgtaatcccacacgccttgggaggctctgaggcgggtagatcacctgaggtcaggagtttgagaccagcctggccaacatggcgaaaccccgtctccactaaaaatacaaaaattagccaggtgcagtggcacacacctgtaatcccagctactccgaaggctgaggcaggaggatcacctgagcccaggaagttgagactgcagtgagctgagattgcaccactgcactccagcctcagtgacagcgagactgtctcaaaaaaagaaaaaagtgactgaggaggaagaggccaggtggcaaatggaacagaatcaccaaagggtgaacaggactaaggcaatgtagtgtatggctcagctacgtcagagtggaaaaggtgttattagagcagaaactatggtccctgcgtcacagggaagcaacctacagagaagcagcagctccccaagagaggagagataagaagccagaagcctcagagtgaacaattgtcctattagggattgctctagagagagaaacctctgggaacgtacccctgtgaggcagcacagcacaatgcttttagaattgtatgagagttgatatatctccatttgttttgcaaaggcaaaaactaagatacagagattatctgttaaagttatgtatttctttggtaataaagatgctgacagtgttgctggaatgcatttctttaataaagatattgtacaatgaaa

SEQ ID NO: 26594 - DNA, 401 bp, Homo sapiens
  source 1..401: mol_type = unassigned DNA
gggccttcggagcgcgcggccagccctgggcactggtttcgttgggttgaatttagggaaaactaggccaaacgtaccaagaaagtcgggatcgtcggtaaatacgggacccgctatggggcctccctccggaaaatggtgaagaaaattgaaatcagccagcacgccaagtacacttgctctttctgtggcaaaaccaagatgaagagacgagctgtggggatctggcactgtggttcctgcatgaagacagtggctggcggtgcctggacgtacaataccacttccgctgtcacggtaaagtccgccatcagaagactgaaggagttgaaagaccagtagacgctcctctactctttgagacatcactggcctataataaatgggttaatttatgtaac

SEQ ID NO: 26595 - DNA, 3112 bp, Homo sapiens
  source 1..3112: mol_type = unassigned DNA
gactttcctcaggaaacaccaggctcttctgaattagtcgcgagcagaaccatcgtcctttccttcagaactctgaccagtttgaaactgtctaacttcttaatgtggctatatgatcgtttgcagctggcctgcaacttgttctgggaatggaaccttggattttagtcaccactgtcgctagcatcctgcacagtcagccacttttagagagcataatgcagagggggaaataaatgagatttggaatagagacggggtttcaccctgctggccaggctggtctcgaactcctgacccaccccgcctcccaaagtgttagaatcacaagcgtgagccaccgcgcccggccccacaaatgtaagatttatgcacttctccaagccaagtgctgtgcatcgaatggaggaactcgtacctttgcaggattttgtgatatatgtgaaataatccggacatgcttctgctatggttgtttgtcgccatagtttgcgaatctgggtaaacctggatgagagagacgccttacaattgcaaacatttctcaggaggccgcctgaaaacgcccaaaccatagagctcagttcctagctaggcctctaccagccacttccgctcgtccgcctaataccgcgcctgcgcaccgcgtctcttcctttctgggctcggacctaggtcgcggcgacatggccaaacgtaccaagaaagtcgggatcgtcggtaaatacgggacccgctatggggcctccctccggaaaatggtgaagaaaattgaaatcagccagcacgccaagtacacttgctctttctgtggcaaaaccaagatgaagagacgagctgtggggatctggcactgtggttcctgcatgaagacagtggctggcggtgcctggacgtacaataccacttccgctgtcacggtaaagtccgccatcagaagactgaaggagttgaaagaccagtagacgctcctctactctttgagacatcactggcctataataaatgggttaatttatgtaacaaaattgccttggcttgttaactttattagacattctgatgtttgcattgtgtaaatactgttgtattggaaaagcatgccaagatggattattgtaattcagtgtcttttttagtagtcaaatggtaaaatgcagcataagaatataagtcttccaagttagatatgagtgttagctttttataagtctgctcctgccagtttgactttgagatacattggagccaactgtaaactttagtttttaaattacagttagtttttttgtttgtttttgaggcggagtctctgttacccaggctggagtgcagtataccagtcttggcccacttcaacctccacttcttaggttcaagcgattctcctgcctcagcctcctgagtagctgggattacaggcacgcaccaccatacctggctaatttttgtattttgagtagagatggagttttcaccacattggccaggctgttcttgaactgacctcaagcgatccacctgccttggccttccagagtgctgggattacaggtgtgagccaccacgcccagccttgcatttaatatttttataatgtgtctaggctgggtgcggtgactcacgcctgaaatcccagcactttgggtggctgaggcaggtggattacttgaggccaggagattgagaccagtgtggccaacatagcaaaaacccgtctcgacgaaaaatacaaaaaatagcttggtatggtggcacatgcctgtaatcccagctactttggaggctcaggcacaagaatcacttgaacctacgaggcggaggttgcagtgggccaggatcgtgccactgcactttatttagccaggacaacactctgtctccaaaaaaaagtttctgaaggtaaaagatatactaaaggatatacatatactgcctcttctatgatgtttcatttgacctacaccatcagcatcttcaggaaacagtatgaaactaatttcacattaaatgttgcaaacgtctgcaattctccagtttttagtttgcacgtaaggattcgtaggattgatttcagattgacagatggttgtagtaacaaaaaaatgaattgccttggagaattcgagttattttaggcctgcctttgacacttttatgcacttaattcactgccaatttagtctaactcctcaaccatctgtggtatggacttctcagtcctcctaattggtatgtcttttatctatcccagagtcagtagtcctttaaggatgcaaatttaattcgataagaatgtggatttacttcatctttaggacagagtaaaaacctttatttcacttggtctgacccctatcttctataacttgtttttttgctcattactggcctttgcacggatgtctcccttcacctgtacctcctgcattgcctctggcagaaacatcgctaccccaggagaatacttcactgggtcaggcatttgctagatccatagcagtaactcatctgtggatctcatttgtgtcacaaaatggtactcctactgattttgtaatgtgaagcaagtactgtgggtcagtaggggtaggaccaggagtgacaagtcaggattttcaggcttcataggaatgacacagctctccaggtgaatctcctggagaattctccataggatctccaggtgagtgaccaggatttcatgtaagcatagggaattgaatgagcattagatggtctaatgctgcggttaagaacaccaacttagccaaactgcctagatagttgggtgacttgggttaagtgacttaacctctctgcttcagtttcctgtataattcttggtagtagaatggagtatatgctgggtgtttggattattaatttggagtcttacaaagctgctatgttacatgattaggcatggaaaacttcggtttttataatcagtgaagtactgctttttgtttgttttctgagagagtgtctgtcacccaggctgaagtgcagtggcatgatctcagttcactgcagcctctacctcccgggttcaagcagttctcgtgcctcagcctccgaagtagctgggattacaggcttatgccacaaa

SEQ ID NO: 26596 - DNA, 1052 bp, Homo sapiens
  source 1..1052: mol_type = unassigned DNA
actgcccggaaacggaagtctcgttctttttcgtccttttccccggttgctgcttgctgtgagtgtctctagggtgatacgtgggtgagaaaggtcctggtccgcgccagagcccagcgcgcctcgtcgccatgcctcggaaaattgaggaaatcaaggacttcctgctcacagcccgacgaaaggatgccaaatctgtcaagatcaagaaaaataaggacaacgtgaagtttaaagttcgatgcagcagatacctttacaccctggtcatcactgacaaagagaaggcagagaaactgaagcagtccctgccccccggtttggcagtgaaggaactgaaatgaaccagacacactgattggaactgtattatattaaaatactaaaaatcctaagtgtctttcgtctttgcggatgggaaagggaaaaatgctacctcgtagtggcttctgatgggaacaggacgcgggttctgttgctgccttcctgtgtctttttttttttttttttttctttctttgagacggagtcttgctctgtggctcatcctggagcacagtggtgcgatatcagctcactaccacctccgcctcctgggttcaagcgactgtcctgcctcagcctcccgagtggctgggattacaggcacacatcaccacgcctggccaatttttgtatttgtagtagagacagggtttcactgcctgcctcagcctcccatagtgctgggattacaggcatgagcctccgtgcccggtgcatccctaatcttgagcatgatctcagtcggcaaatgaggccatctgttttcagcctgtttgaaaataagatgtggggaggccatgatggaaatagcacgtggggttaaacataactggcagatgtgggagcgatggtggggcatgccattcaaacaggtcccaaaatgggtgcaacaaggtatagcacatctaccactcgctaacttgactgacttggagaaatgactacacttttgcctgtttcctcagttggaaaatagccatattaacacctctttcattggcttgctg

SEQ ID NO: 26597 - DNA, 431 bp, Homo sapiens
  source 1..431: mol_type = unassigned DNA
agtgcgaacgcctacatgagtcttgatcctcggcaggcaccgtacccagtttcctccgttgggagggtttaactgcccggaaacggaagtctcgttctttttcgtccttttccccggttgctgcttgctgtcctggtccgcgccagagcccagcgcgcctcgtcgccatgcctcggaaaattgaggaaatcaaggacttcctgctcacagcccgacgaaaggatgccaaatctgtcaagatcaagaaaaataaggacaacgtgaagtttaaagttcgatgcagcagatacctttacaccctggtcatcactgacaaagagaaggcagagaaactgaagcagtccctgccccccggtttggcagtgaaggaactgaaatgaaccagacacactgattggaactgtattatattaaaatactaaaaatcctaa

SEQ ID NO: 26598 - DNA, 532 bp, Homo sapiens
  source 1..532: mol_type = unassigned DNA
gcttgctgtgagtgtctctagggtgatacgtgggtgagaaaggtaatctggggcaatccactgccaggtgaaatctggggaccccaggtccgcgtggagggtgtcggggaggagaaggggagtgcgatggggccgatatttcgggggagagcgggaaaacggggttcgctgccagcccccgcgccgtgttaacgccgaggactgtttcccgcaggtcctggtccgcgccagagcccagcgcgcctcgtcgccatgcctcggaaaattgaggaaatcaaggacttcctgctcacagcccgacgaaaggatgccaaatctgtcaagatcaagaaaaataaggacaacgtgaagtttaaagttcgatgcagcagatacctttacaccctggtcatcactgacaaagagaaggcagagaaactgaagcagtccctgccccccggtttggcagtgaaggaactgaaatgaaccagacacactgattggaactgtattatattaaaatactaaaaatcctaagtgtctttcgtctttg

SEQ ID NO: 26599 - DNA, 756 bp, Homo sapiens
  source 1..756: mol_type = unassigned DNA
atcaccgccctagcatccggggaaatcgcggtcttagcatccggcgcgcggcggttgaattgctgcgcccagcgaggcaaccgcctccgaacgccaggtgggggcgaggcgtctcggagtctcagagacaccaaggcccctgcgacaaggtggctgcagctaggccgggggcgtcaggacgacggagcgggttcgggtcggtgacacgcagacctgagggagctgggcccgccttttccgcccgcgccccaggcccttgcagatcgagatttgcgtcctagagtgggaaaaaagcagaggccagggcgccgattttatttggagagaagcaagcatctttgcctctttggagtaggaaattcagacttgaaaaagtggtgtgtggttgactctgtttctcgccatgtcttctcacaagactttcaccattaagcgattcctggccaagaaacaaaagcaaaatcgtcccatcccccagtggattcagatgaaacctggtagtaaaatcaggtacaactccaaaaggaggcattggagaagaaccaagctgggtctataaggaattgcacatgagatggcacacatatttatgctgtatcaagttcacgatcatcttacgatatcaagctgaaaatgtcaccactacctggacagttgcacatgttttactgggaatatttttttctgtttttctgtatgctctgtgctagtagggtggattcagtaataaatatgtgaaagcttttgtttcaaaaa

SEQ ID NO: 26600 - DNA, 749 bp, Homo sapiens
  source 1..749: mol_type = unassigned DNA
cttttcagactcagcccgcctgcacccaggtgaaataaacagccatgttgctcacacaaagcctgtttggtggtctcttcacatggacgcgcatgaaatttggtgccgtgactcagatcgggggacctcccttgggagatcaatcccctgtcctcctgttctttgctccatgagaaagatccacctacgacctcaggtcctcagacggaccagcccaaggaacatctcaccaattttaaatcagatattttgcctgtgatctatataattttatgccagaagacttggactcaagcattaagatattttatttggagagaagcaagcatctttgcctctttggagtaggaaattcagacttgaaaaagtggtgtgtggttgactctgtttctcgccatgtcttctcacaagactttcaccattaagcgattcctggccaagaaacaaaagcaaaatcgtcccatcccccagtggattcagatgaaacctggtagtaaaatcaggtacaactccaaaaggaggcattggagaagaaccaagctgggtctataaggaattgcacatgagatggcacacatatttatgctgtatcaagttcacgatcatcttacgatatcaagctgaaaatgtcaccactacctggacagttgcacatgttttactgggaatatttttttctgtttttctgtatgctctgtgctagtagggtggattcagtaataaatatgtgaaagcttttgtttcaaaaa

SEQ ID NO: 26601 - DNA, 653 bp, Homo sapiens
  source 1..653: mol_type = unassigned DNA
tccggcgcgcggcggttgaattgctgcgcccagcgaggcaaccgcctccgaacgccaggtgggggcgaggcgtctcggagtctcagagacaccaaggcccctgcgacaaggtggctgcagctaggccgggggcgtcaggacgacggagcgggttcgggtcggtgacacgcagacctgagggagctgggcccgccttttccgcccgcgccccaggcccttgcagatcgagatttgcgtcctagagtgggaaaaaagcagaggccagggcgccgtggtgtgtggttgactctgtttctcgccatgtcttctcacaagactttcaccattaagcgattcctggccaagaaacaaaagcaaaatcgtcccatcccccagtggattcagatgaaacctggtagtaaaatcaggtacaactccaaaaggaggcattggagaagaaccaagctgggtctataaggaattgcacatgagatggcacacatatttatgctgtatcaagttcacgatcatcttacgatatcaagctgaaaatgtcaccactacctggacagttgcacatgttttactgggaatatttttttctgtttttctgtatgctctgtgctagtagggtggattcagtaataaatatgtgaaagcttttgtttcaaaaa

SEQ ID NO: 26602 - DNA, 2321 bp, Homo sapiens
  source 1..2321: mol_type = unassigned DNA
ggaaggtgacatatacagcgggagtggtaagcacttccttttcctgtggcagcagccgggctgagaggagcgtggctgtctcctctctccgccatggcgtgtgctcgcccactgatatcggtgtactccgaaaagggggagtcatctggcaaaaatgtcactttgcctgctgtattcaaggctcctattcgaccagatattgtgaactttgttcacaccaacttgcgcaaaaacaacagacagccctatgctgtcagtgaattagcaggtcatcagactagtgctgagtcttggggtactggcagagctgtggctcgaattcccagagttcgaggtggtgggactcaccgctctggccagggtgcttttggaaacatgtgtcgtggaggccgaatgtttgcaccaaccaaaacctggcgccgttggcatcgtagagtgaacacaacccaaaaacgatacgccatctgttctgccctggctgcctcagccctaccagcactggtcatgtctaaaggtcatcgtattgaggaagttcctgaacttcctttggtagttgaagataaagttgaaggctacaagaagaccaaggaagctgttttgctccttaagaaacttaaagcctggaatgatatcaaaaaggtctatgcctctcagcgaatgagagctggcaaaggcaaaatgagaaaccgtcgccgtatccagcgcaggggcccgtgcatcatctataatgaggataatggtatcatcaaggccttcagaaacatccctggaattactctgcttaatgtaagcaagctgaacattttgaagcttgctcctggtgggcatgtgggacgtttctgcatttggactgaaagtgctttccggaagttagatgaattgtacggcacttggcgtaaagccgcttccctcaagagtaactacaatcttcccatgcacaagatgattaatacagatcttagcagaatcttgaaaagcccagagatccaaagagcccttcgagcaccacgcaagaagatccatcgcagagtcctaaagaagaacccactgaaaaacttgagaatcatgttgaagctaaacccatatgcaaagaccatgcgccggaacaccattcttcgccaggccaggaatcacaagctccgggtggataaggcagctgctgcagcagcggcactacaagccaaatcagatgagaaggcggcggttgcaggcaagaagcctgtggtaggtaagaaaggaaagaaggctgctgttggtgttaagaagcagaagaagcctctggtgggaaaaaaggcagcagctaccaagaaaccagcccctgaaaagaagcctgcagagaagaaacctactacagaggagaagaagcctgctgcataaactcttaaatttgattattccataaaggtcaaatcattttggacagcttcttttgaataaagacctgattatacaggcagtgagaaacatgacttggtgtgctctgtaaagcttggttagaatttttttaaagtgacattttgttggccataatttagactgttacattttatatagtgtggtataaaatggggcatggatttatactaagtccatggagttcagtggaaggggaatgatttaaaaaaagttgtggttttctaaataatgtggcttgaaaaataggtgtaacaggacttggtcagaaacgcagaggctgttcaagtttagctccccaccagatggaaaataggttaaattctgtaaagatttaactttaaccacaagagggcacaactggagagcacaatttttttggtactgcagtaaaattgattacctcttgagaagtgttctttttaaccagctataacaatagagttgagtattttcacccatggtttgaaaaagtgccagaaggccacactggcccacatctgtaatcccaacactttgggaccctaaggtgggcagagcacttgagccaatgagttcaagaccagcctggtcaacatgatgaaatctcgtctctactgaaaatataaaaaatagccagtcatggtgcatgcctgtaaccccagctacttggaggctgaggcaagagaatcacttgaacctgggaggtggaggttgcaatgagccaagattgtaccattgccctccagcctgggcgtcagagcaagactctctgaaaagtaccagaagcatttttcaggactgcctgtgtgtcttggtgattatgttaaccaactgtgttcaaaagaagtacccatgaaatgcctccagatataagggtgtttttttttacccataaagctaaactgcaaatattaccctagaattaa

SEQ ID NO: 26603 - DNA, 1277 bp, Homo sapiens
  source 1..1277: mol_type = unassigned DNA
cttttcctgtggcagcagccgggctgagaggagcgtggctgtctcctctctccgccatggcgtgtgctcgcccactgatatcggtgtactccgaaaagggggagtcatctggcaaaaatgtcactttgcctgctgtattcaaggctcctattcgaccagatattgtgaactttgttcacaccaacttgcgcaaaaacaacagacagccctatgctgtcagtgaattagcaggtcatcagactagtgctgagtcttggggtactggcagagctgtggctcgaattcccagagttcgaggtggtgggactcaccgctctggccagggtgcttttggaaacatgtgtcgtggaggccgaatgtttgcaccaaccaaaacctggcgccgttggcatcgtagagtgaacacaacccaaaaacgatacgccatctgttctgccctggctgcctcagccctaccagcactggtcatgtctaaaggtcatcgtattgaggaagttcctgaacttcctttggtagttgaagataaagttgaaggctacaagaagaccaaggaagctgttttgctccttaagaaacttaaagcctggaatgatatcaaaaaggtctatgcctctcagcgaatgagagctggcaaaggcaaaatgagaaaccgtcgccgtatccagcgcaggggcccgtgcatcatctataatgaggataatggtatcatcaaggccttcagaaacatccctggaattactctgcttaatgtaagcaagctgaacattttgaagcttgctcctggtgggcatgtgggacgtttctgcatttggactgaaagtgctttccggaagttagatgaattgtacggcacttggcgtaaagccgcttccctcaagagtaactacaatcttcccatgcacaagatgattaatacagatcttagcagaatcttgaaaagcccagagatccaaagagcccttcgagcaccacgcaagaagatccatcgcagagtcctaaagaagaacccactgaaaaacttgagaatcatgttgaagctaaacccatatgcaaagaccatgcgccggaacaccattcttcgccaggccaggaatcacaagctccgggtggataaggcagctgctgcagcagcggcactacaagccaaatcagatgagaaggcggcggttgcaggcaagaagcctgtggtaggtaagaaaggaaagaaggctgctgttggtgaaaagaagcctgcagagaagaaacctactacagaggagaagaagcctgctgcataa

SEQ ID NO: 26604 - DNA, 820 bp, Homo sapiens
  source 1..820: mol_type = unassigned DNA
cttttcctgtggcagcagccgggctgagaggagcgtggctgtctcctctctccgccatggcgtgtgctcgcccactgatatcggtgtactccgaaaagggggagtcatctggcaaaaatgtcactttgcctgctgtattcaaggctcctattcgaccagatattgtgaactttgttcacaccaacttgcgcaaaaacaacagacagccctatgctgtcagtgaattagcaggtcatcagactagtgctgagtcttggggtactggcagagctgtggctcgaattcccagagttcgaggtggtgggactcaccgctctggccagggtgcttttggaaacatgtgtcgtggaggccgaatgtttgcaccaaccaaaacctggcgccgttggcatcgtagagtgaacacaacccaaaaacttgagaatcatgttgaagctaaacccatatgcaaagaccatgcgccggaacaccattcttcgccaggccaggaatcacaagctccgggtggataaggcagctgctgcagcagcggcactacaagccaaatcagatgagaaggcggcggttgcaggcaagaagcctgtggtaggtaagaaaggaaagaaggctgctgttggtgttaagaagcagaagaagcctctggtgggaaaaaaggcagcagctaccaagaaaccagcccctgaaaagaagcctgcagagaagaaacctactacagaggagaagaagcctgctgcataaactcttaaatttgattattccataaaggtcaaatcattttggacagcttcttttgaataaagacctgattatacaggcagtg

SEQ ID NO: 26605 - DNA, 469 bp, Homo sapiens
  source 1..469: mol_type = unassigned DNA
acccggcgctccattaaatagccgtagacggaacttcgcctttctctcggccttagcgccatttttttggaaacctctgcgccatgagagccaagtggaggaagaagcgaatgcgcaggctgaagcgcaaaagaagaaagatgaggcagaggtccaagtaaaccgctagcttgttgcaccgtggaggccacaggagcagaaacatggaatgccagacgctggggatgctggtacaagttgtgggactgcatgctactgtctagagcttgtctcaatggatctagaacttcatcgccctctgatcgccgatcacctctgagacccaccttgctcataaacaaaatgcccatgttggtcctctgccctggacctgtgacattctggactatttctgtgtttatttgtggccgagtgtaacaaccatataataaatcacctcttccgctgttttagctgaagaattaaatca

SEQ ID NO: 26606 - DNA, 699 bp, Homo sapiens
  source 1..699: mol_type = unassigned DNA
cgacacccggcgctccattaaatagccgtagacggaacttcgcctttctctcggccttagcgccatttttttgggtgagtgttttttggttcctgcgttgggattccgtgtacaatccatagacatctgacctcggcacttagcatcatcacagcaaactaactgtagcctttctctctttccctgtagaaacctctgcgccatgagagccaagtggaggaagaagcgaatgcgcaggctgaagcgcaaaagaagaaagatgaggcagaggtccaagtaaaccgctagcttgttgcaccgtggaggccacaggagcagaaacatggaatgccagacgctggggatgctggtacaagttgtgggactgcatgctactgtctagagcttgtctcaatggatctagaacttcatcgccctctgatcgccgatcacctctgagacccaccttgctcataaacaaaatgcccatgttggtcctctgccctggacctgtgacattctggactatttctgtgtttatttgtggccgagtgtaacaaccatataataaatcacctcttccgctgttttagctgaagaattaaatcatcttgtctattatgttttttatggttccatcgggtgggggttttctgtcattagagtttgccctgtcactacctgtgctatggagggtatcaaagctataaaggcaacagc

SEQ ID NO: 26607 - DNA, 677 bp, Homo sapiens
  source 1..677: mol_type = unassigned DNA
cgcaggatggtgagtggatgcctcggtctcggggctttagatgcatggaggttcccttttcttgcccgtatgccagcctagggcccgtctcgcgcgtcgcaggggccggatggcgttagattgctagctctgacttggtcgaggggtttgttaaagttgttaagaataaggcctactttaagagataccaagtgaaatttagaagacgacgagagggtaaaactgattattatgctcggaaacgcttggtgatacaagataaaaataaatacaacacacccaaatacaggatgatagttcgtgtgacaaacagagatatcatttgtcagattgcttatgcccgtatagagggggatatgatagtctgcgcagcgtatgcacacgaactgccaaaatatggtgtgaaggttggcctgacaaattatgctgcagcatattgtactggcctgctgctggcccgcaggcttctcaataggtttggcatggacaagatctatgaaggccaagtggaggtgactggtgatgaatacaatgtggaaagcattgatggtcagccaggtgccttcacctgctatttggatgcaggccttgccagaactaccactggcaataaagtttttggtgccctgaagggagctgtggatggaggcttgtctatccctcacaggtaagaatac

SEQ ID NO: 26608 - DNA, 1010 bp, Homo sapiens
  source 1..1010: mol_type = unassigned DNA
cgccgctgggcctgcaggtctctgtcgagcagcggacgccggtctctgttccgcaggatggggtttgttaaagttgttaagaataaggcctactttaagagataccaagtgaaatttagaagacgacgagagggtaaaactgattattatgctcggaaacgcttggtgatacaagataaaaataaatacaacacacccaaatacaggatgatagttcgtgtgacaaacagagatatcatttgtcagattgcttatgcccgtatagagggggatatgatagtctgcgcagcgtatgcacacgaactgccaaaatatggtgtgaaggttggcctgacaaattatgctgcagcatattgtactggcctgctgctggcccgcaggcttctcaataggtttggcatggacaagatctatgaaggccaagtggaggtgactggtgatgaatacaatgtggaaagcattgatggtcagccaggtgccttcacctgctatttggatgcaggccttgccagaactaccactggcaataaagtttttggtgccctgaagggagctgtggatggaggcttgtctatccctcacagtaccaaacgattccctggttatgattctgaaagcaaggaatttaatgcagaagtacatcggaagcacatcatgggccagaatgttgcagattacatgcgctacttaatggaagaagatgaagatgcttacaagaaacagttctctcaatacataaagaacagcgtaactccagacatgatggaggagatgtataagaaagctcatgctgctatacgagagaatccagtctatgaaaagaagcccaagaaagaagttaaaaagaagaggtggaaccgtcccaaaatgtcccttgctcagaagaaggatcgggtagctcaaaagaaggcaagcttcctcagagctcaggagcgggctgctgagagctaaacccagcaattttctatgattttttcagatatagataataaacttatgaacagcaacta

SEQ ID NO: 26609 - DNA, 2325 bp, Homo sapiens
  source 1..2325: mol_type = unassigned DNA
ccttttcccaccccctagcgccgctgggcctgcaggtctctgtcgagcagcggacgccggtctctgttccgcaggatggtgagtggatgcctcggtctcggggctttagatgcatggaggttcccttttcttgcccgtatgccagcctagggcccgtctcgcgcgtcgcaggggccggatggcgttagattgctagctctgacttggtcgaggtgcagttcccagcgtggccttaaatggctgccgcccggtgcgcgaacttggggggaggggttggcgaagaagggttgcgtgagcttggacggcggattggggagaagggtgagtttagtagacagcctgagtgcggatactgccgtctagtgtgaggggaacgccagaatggaggggggctgcaggtcctcgggtcccactcgacctccgagtaccgagtacttcgtgggttttccaggagaatgtcggagccggcaagtcttagatttaggaagcttgtgcccgtgggctgagcaagtggcttttaagccaaaattgtcagtggagcttggaggccgaggggtccctgggccccggaagctcctttaacatggaatacgtgcctcctgcctcttcctctagagtccgtcgccggatgagtttttaattattggggtagggccccaagggtgggatgaaatgttgctttagctgatggggaacagtgctgttttagtgggggaattactgctgaatgtgctcttgcccagttaagctttgtggcaggtaatttaggcttttgaaaaacataacatgggaagcgagagaggtacgtagttgttatttgaggctaggttttcgaagtgggacatagcgtgttccgaacaaaccgacgtttggcatcactgattgctgtctggagcagtgcttcgcaaaagtttggcacaattaccggtgctggtccttgaagaaacaaatatggaaattgaaagcgtttaaaaccttttgaaagcaatataacaataattttatacctgttaaatgtaataaattggggcctgcattttgtatgtttcttttattccatatttctctaaggattcatttttattgttttatgaaactactagtctgtgacatggaaggtagaggaaaaagattcttgaccctagttgcttgtgaaacctgggattctacaagtgacagttgtctgtttactcttgaagttcaagtgttactttgttacatggttaatttatgtcaaaagtatcataggctaagacatcaaagttttaataacattcttttttctttaaggggtttgttaaagttgttaagaataaggcctactttaagagataccaagtgaaatttagaagacgacgaggtactgtcacctttttgtgtttacaatattaatctgctttgcagatgcagtggagtatcctttctacaattatttttttctttcagagggtaaaactgattattatgctcggaaacgcttggtgatacaagataaaaataaatacaacacacccaaatacaggatgatagttcgtgtgacaaacagagatatcatttgtcagattgcttatgcccgtatagagggggatatgatagtctgcgcagcgtatgcacacgaactgccaaaatatggtgtgaaggttggcctgacaaattatgctgcagcatattgtactggcctgctgctggcccgcaggcttctcaataggtttggcatggacaagatctatgaaggccaagtggaggtgactggtgatgaatacaatgtggaaagcattgatggtcagccaggtgccttcacctgctatttggatgcaggccttgccagaactaccactggcaataaagtttttggtgccctgaagggagctgtggatggaggcttgtctatccctcacagtaccaaacgattccctggttatgattctgaaagcaaggaatttaatgcagaagtacatcggaagcacatcatgggccagaatgttgcagattacatgcgctacttaatggaagaagatgaagatgcttacaagaaacagttctctcaatacataaagaacagcgtaactccagacatgatggaggagatgtataagaaagctcatgctgctatacgagagaatccagtctatgaaaagaagcccaagaaagaagttaaaaagaagaggtggaaccgtcccaaaatgtcccttgctcagaagaaggatcgggtagctcaaaagaaggcaagcttcctcagagctcaggagcgggctgctgagagctaaacccagcaattttctatgattttttcagatatagataataaacttatgaacagcaact

SEQ ID NO: 26610 - DNA, 947 bp, Homo sapiens
  source 1..947: mol_type = unassigned DNA
atgattgcttatagaccggaagccgggaccttaattctctttcccatcttgcaagatggcgggtgaaaaagttgagaagccagatactaaagagaagaaacccgaagccaagaaggttgatgctggtggcaaggtgaaaaagggtaacctcaaagctaaaaagcccaagaaggggaagccccattgcagccgcaaccctgtccttgtcagaggaattggcaggtattcccgatctgccatgtattccagaaaggccatgtacaagaggaagtactcagccgctaaatccaaggttgaaaagaaaaagaaggagaaggttctcgcaactgttacaaaaccagttggtggtgacaagaacggcggtacccgggtggttaaacttcgcaaaatgcctagatattatcctactgaagatgtgcctcgaaagctgttgagccacggcaaaaaacccttcagtcagcacgtgagaaaactgcgagccagcattacccccgggaccattctgatcatcctcactggacgccacaggggcaagagggtggttttcctgaagcagctggctagtggcttattacttgtgactggacctctggtcctcaatcgagttcctctacgaagaacacaccagaaatttgtcattgccacttcaaccaaaatcgatatcagcaatgtaaaaatcccaaaacatcttactgatgcttacttcaagaagaagaagctgcggaagcccagacaccaggaaggtgagatcttcgacacagaaaaagagaaatatgagattacggagcagcgcaagattgatcagaaagctgtggactcacaaattttaccaaaaatcaaagctattcctcagctccagggctacctgcgatctgtgtttgctctgacgaatggaatttatcctcacaaattggtgttctaaatgtcttaagaacctaattaaatag

SEQ ID NO: 26611 - DNA, 1074 bp, Homo sapiens
  source 1..1074: mol_type = unassigned DNA
atcttgcaaggtaagaatcgcgggcctgtctgcaagacttgagttcaggactcccaatccttcgccatccgaacctggagggcatccagtcgacacctacaggggtcggacatgtccaaggctaactgagaggccttccagacgcttcatttttgttgtttgggtttgcggcagggcacaaagaggatggcgggtgaaaaagttgagaagccagatactaaagagaagaaacccgaagccaagaaggttgatgctggtggcaaggtgaaaaagggtaacctcaaagctaaaaagcccaagaaggggaagccccattgcagccgcaaccctgtccttgtcagaggaattggcaggtattcccgatctgccatgtattccagaaaggccatgtacaagaggaagtactcagccgctaaatccaaggttgaaaagaaaaagaaggagaaggttctcgcaactgttacaaaaccagttggtggtgacaagaacggcggtacccgggtggttaaacttcgcaaaatgcctagatattatcctactgaagatgtgcctcgaaagctgttgagccacggcaaaaaacccttcagtcagcacgtgagaaaactgcgagccagcattacccccgggaccattctgatcatcctcactggacgccacaggggcaagagggtggttttcctgaagcagctggctagtggcttattacttgtgactggacctctggtcctcaatcgagttcctctacgaagaacacaccagaaatttgtcattgccacttcaaccaaaatcgatatcagcaatgtaaaaatcccaaaacatcttactgatgcttacttcaagaagaagaagctgcggaagcccagacaccaggaaggtgagatcttcgacacagaaaaagagaaatatgagattacggagcagcgcaagattgatcagaaagctgtggactcacaaattttaccaaaaatcaaagctattcctcagctccagggctacctgcgatctgtgtttgctctgacgaatggaatttatcctcacaaattggtgttctaaatgtcttaagaacctaattaa

SEQ ID NO: 26612 - DNA, 612 bp, Homo sapiens
  source 1..612: mol_type = unassigned DNA
aaataatggttgtacggacttctgaccgctcagtatttggcaaaaaacctaataggtgtgaggtagtttcaaattctcaaaaaaaaagtttatagtgtattggggagacaaaccccaaatgagtcatagtgaaggttggagtagaatgggtagagtttgagaggaaggcctgtatcttaccgggggagggattgtagtctggggagcccagcccattcatgtacaggttcattattgtcttgttagagagatgactggtgaaatgcctttttttatctacaaaaaaatatttttagatggcgggtgaaaaagttgagaagccagatactaaagagaagaaacccgaagccaagaaggttgatgctggtggcaaggtgaaaaagggtaacctcaaagctaaaaagcccaagaaggggaagccccattgcagccgcaaccctgtccttgtcagaggaattggcaggtattcccgatctgccatgtattccagaaaggccatgtacaagaggaagtactcagccgctaaatccaaggttgaaaagaaaaagaaggagaaggttctcgcaactgttacaaaaccagttggtggtgacaagaacggcggtacccggg

SEQ ID NO: 26613 - DNA, 488 bp, Homo sapiens
  source 1..488: mol_type = unassigned DNA
ggtgggtgttagaggaagcggggagacggcgcgtgcactgtgttcctggtcctgggttccagaggatgacactgagcctgtcgcagccacgttggggttccgcactgaagccaaaaggtttcgcgtctcccagcgtccccgaccggaagtcgcctcttggtctttgcgatctttttctctggctcaatttgggctgattccgtttgtgtccgcaattcctaaatcgagtttcttgaaaagagacactggtcttaagggttaagacgaaagatggcgggtgaaaaagttgagaagccagatactaaagagaagaaacccgaagccaagaaggttgatgctggtggcaaggtgaaaaagggtaacctcaaagctaaaaagcccaagaaggggaagccccattgcagccgcaaccctgtccttgtcagaggaattggcaggtattcccgatctgccatgtattccagaaaggccatgtacaagaggaagta

SEQ ID NO: 26614 - DNA, 588 bp, Homo sapiens
  source 1..588: mol_type = unassigned DNA
ttagaggaagcggggagacggcgcgtgcactgtgttcctggtcctgggttccagaggatgacactgagcctgtcgcagccacgttggggttccgcactgaagccaaaagatggcgggtgaaaaagttgagaagccagatactaaagagaagaaacccgaagccaagaaggttgatgctggtggcaaggtgaaaaagggtaacctcaaagctaaaaagcccaagaaggggaagccccattgcagccgcaaccctgtccttgtcagaggaattggcaggtattcccgatctgccatgtattccagaaaggccatgtacaagaggaagtactcagccgctaaatccaaggttgaaaagaaaaagaaggagaaggttctcgcaactgttacaaaaccagttggtggtgacaagaacggcggtacccgggtggttaaacttcgcaaaatgcctagatattatcctactgaagatgtgcctcgaaagctgttgagccacggcaaaaaacccttcagtcagcacgtgagaaaactgcgagccagcattacccccgggaccattctgatcatcctcactggacgccacaggggcaa

SEQ ID NO: 26615 - DNA, 682 bp, Homo sapiens
  source 1..682: mol_type = unassigned DNA
gtcagcggaggaccgagcgacggccgggaatggcagcgcgggggctccgcggaggcgccacgcacagtgtccaaagcatccttgcttcctcctggaaaccgcggccgccagtgaatcagaaccagaaaaaggctaaatgattcccagagacacagccatgaagcaggtggtttcgatctgaaaaaatcaaggtgaaaagctctagcaaccagaaagaaacgaatggaggaaaatggaaaacgcaagctagaagacagagtctcattctgtaggccaggccggaggacgggaatgagaaaggccatgtacaagaggaagtagtcagccgctaaatccaagatggcgggtgaaaaagttgagaagccagatactaaagagaagaaacccgaagccaagaaggttgatgctggtggcaaggtgaaaaagggtaacctcaaagctaaaaagcccaagaaggggaagccccattgcagccgcaaccctgtccttgtcagaggaattggcaggtattcccgatctgccatgtattccagaaaggccatgtacaagaggaagtactcagccgctaaatccaaggttgaaaagaaaaagaaggagaaggttctcgcaactgttacaaaaccagttggtggtgacaagaacggcggtacccgggtggttaaacttcgcaaaatggtaagat

SEQ ID NO: 26616 - DNA, 425 bp, Homo sapiens
  source 1..425: mol_type = unassigned DNA
ggcctgtctgcaagacttgagttcaggactcccaatccttcgccatccgaacctggagggcatccagtcgacacctacagggatggcgggtgaaaaagttgagaagccagatactaaagagaagaaacccgaagccaagaaggttgatgctggtggcaaggtgaaaaagggtaacctcaaagctaaaaagcccaagaaggggaagccccattgcagccgcaaccctgtccttgtcagaggaattggcaggtattcccgatctgccatgtattccagaaaggccatgtacaagaggaagtactcagccgctaaatccaaggttgaaaagaaaaagaaggagaaggttctcgcaactgttacaaaaccagttggtggtgacaagaacggcggtacccgggtggttaaacttcgcaaaatggtaagat

SEQ ID NO: 26617 - DNA, 1101 bp, Homo sapiens
  source 1..1101: mol_type = unassigned DNA
gcagcctggggattaggacccggagttgccaaggtgtcagcactctttgctcttgaattgattaaaaagtctaatcaaatgcatatattttcttcaaacaagttttacccgaaagtttgttgaaagaggctaaatcagggagttctttgcgtctgcaaggcggctttttagttctggattcttttccggcttattctaagacacctatgagtcgtggggcttctctcgcgaagtctttaagtggacagtacgcatgcgccaacttcctctttttccggctggaaccatggagggtgtagaagagaagaagaaggaggttcctgctgtgccagaaacccttaagaaaaagcgaaggaatttcgcagagctgaagatcaagcgcctgagaaagaagtttgcccaaaagatgcttcgaaaggcaaggaggaagcttatctatgaaaaagcaaagcactatcacaaggaatataggcagatgtacagaactgaaattcgaatggcgaggatggcaagaaaagctggcaacttctatgtacctgcagaacccaaattggcgtttgtcatcagaatcagaggtatcaatggagtgagcccaaaggttcgaaaggtgttgcagcttcttcgccttcgtcaaatcttcaatggaacctttgtgaagctcaacaaggcttcgattaacatgctgaggattgtagagccatatattgcatgggggtaccccaatctgaagtcagtaaatgaactaatctacaagcgtggttatggcaaaatcaataagaagcgaattgctttgacagataacgctttgattgctcgatctcttggtaaatacggcatcatctgcatggaggatttgattcatgagatctatactgttggaaaacgcttcaaagaggcaaataacttcctgtggcccttcaaattgtcttctccacgaggtggaatgaagaaaaagaccacccattttgtagaaggtggagatgctggcaacagggaggaccagatcaacaggcttattagaagaatgaactaaggtgtctaccatgattatttttctaagctggttggttaataaacagtacctgctctcaaattgaaata

SEQ ID NO: 26618 - DNA, 680 bp, Homo sapiens
  source 1..680: mol_type = unassigned DNA
ccgaaaggaaagaaggccaagggaaagaaggtggctccggccccagctgtcgtgaagaagcaggaggctaagaaagtggtgaatcccctgtttgagaaaaggcctaagaattttggcattggacaggacatccagcccaaaagagacctcacccgctttgtgaaatggccccgctatatcaggctgctggcaaaggggacgtcccaacgaagagaccacctgtccttcgagcaggagttaacaccgtcaccaccttggtggagaacaagaaagctcagctggtggtgattgcacacgacgtggatcccatcgagctggttgtcttcttgcctgccctgtgtcgtaaaatgggggtcccttactgcattatcaagggaaaggcaagactgggacgtctagtccacaggaagacctgcaccactgtcgccttcacacaggtgaactcggaagacaaaggcgctttggctaagctggtggaagctatcaggaccaattacaatgacagatacgatgagatccgccgtcactggggtggcaatgtcctgggtcctaagtctgtggctcgtatcgccaagctcgaaaaggcaaaggctaaagaacttgccactaaactgggttaaatgtacactgttgagttttctgtacataaaaataattgaaataatacaaattttccttca

SEQ ID NO: 26619 - DNA, 891 bp, Homo sapiens
  source 1..891: mol_type = unassigned DNA
tttcctttctctctcctcccgccgcccaagatgccgaaaggaaagaaggccaagggaaagaaggtggctccggccccagctgtcgtgaagaagcaggaggctaagaaagtggtgaatcccctgtttgagaaaaggcctaagaattttggcattggacaggacatccagcccaaaagagacctcacccgctttgtgaaatggccccgctatatcaggttgcagcggcagagagccatcctctataagcggctgaaagtgcctcctgcgattaaccagttcacccaggccctggaccgccaaacagctactcagctgcttaagctggcccacaagtacagaccagagacaaagcaagagaagaagcagagactgttggcccgggccgagaagaaggctgctggcaaaggggacgtcccaacgaagagaccacctgtccttcgagcaggagttaacaccgtcaccaccttggtggagaacaagaaagctcagctggtggtgattgcacacgacgtggatcccatcgagctggttgtcttcttgcctgccctgtgtcgtaaaatgggggtcccttactgcattatcaagggaaaggcaagactgggacgtctagtccacaggaagacctgcaccactgtcgccttcacacaggtgaactcggaagacaaaggcgctttggctaagctggtggaagctatcaggaccaattacaatgacagatacgatgagatccgccgtcactggggtggcaatgtcctgggtcctaagtctgtggctcgtatcgccaagctcgaaaaggcaaaggctaaagaacttgccactaaactgggttaaatgtacactgttgagttttctgtacataaaaataattgaaataatacaaattttccttca

SEQ ID NO: 26620 - DNA, 1057 bp, Homo sapiens
  source 1..1057: mol_type = unassigned DNA
tgagctgtagttccgtggcactatagccaggttccggctgtatccgctgccatcctcctccaggcgcggcctcggagggcctcctgctcctcctggcgctaggagagccccactcggtgtggcacggagacaccgaggtggattagagccccacttggtgtggcacggagacattgagatggactagagccccgggcggccgagagcggaatgcgttgttcccggtgtcgcagggctgggtgtcgcaggcctggagcaccgcagtgcggggctcggagccctagcgtctctcgggcttgctgggggccgctccagaggccttgtgagcgacgagttctgagcccgcccctgttgcttctagagcctgtggggccgcgactcagaggagtcatgagtccggggtgtctcctgggtgggcgacgcgaagagagcgtggtctcgggcttagccttgctctggccactcggggttcccggggctgcatgcttgtgcggctgaatgtgagatgctcctgtcgaggggtggtgctggggggttgcagaaagctgctcgccagcttagttcagccgaaaggaaagaaggccaagggaaagaaggtggctccggccccagctgtcgtgaagaagcaggaggctaagaaagtggtgaatcccctgtttgagaaaaggcctaagaattttggcattggacaggacatccagcccaaaagagacctcacccgctttgtgaaatggccccgctatatcaggttgcagcggcagagagccatcctctataagcggctgaaagtgcctcctgcgattaaccagttcacccaggccctggaccgccaaacagctactcagctgcttaagctggcccacaagtacagaccagagacaaagcaagagaagaagcagagactgttggcccgggccgagaagaaggctgctggcaaaggggacgtcccaacgaagagaccacctgtccttcgagcaggagttaacaccgtcaccaccttggtggagaacaagaaagctcagctggtggtgattgcacacgacgtggatcccatcga

SEQ ID NO: 26621 - DNA, 1041 bp, Homo sapiens
  source 1..1041: mol_type = unassigned DNA
accaggacaccttcagccgcgtctcctggtgcgcctgcgcgggggccctggaggaggagaagtaggcggggccggcggccgctggtgactacaagccccggcgtgcaccgcgctaggctggccgtggcgcgcccggaaggtgtcgcggccctgggccccgccccggaagataaggccgctcgctgacgccgtgtttcctctttcggccgcgctggtgaacaggacccgtcgccatgggccgtgtgatccgtggacagaggaagggcgccgggtctgtgttccgcgcgcacgtgaagcaccgtaaaggcgctgcgcgcctgcgcgccgtggatttcgctgagcggcacggctacatcaagggcatcgtcaaggacatcatccacgacccgggccgcggcgcgcccctcgccaaggtggtcttccgggatccgtatcggtttaagaagcggacggagctgttcattgccgccgagggcattcacacgggccagtttgtgtattgcggcaagaaggcccagctcaacattggcaatgtgctccctgtgggcaccatgcctgagggtacaatcgtgtgctgcctggaggagaagcctggagaccgtggcaagctggcccgggcatcagggaactatgccaccgttatctcccacaaccctgagaccaagaagacccgtgtgaagctgccctccggctccaagaaggttatctcctcagccaacagagctgtggttggtgtggtggctggaggtggccgaattgacaaacccatcttgaaggctggccgggcgtaccacaaatataaggcaaagaggaactgctggccacgagtacggggtgtggccatgaatcctgtggagcatccttttggaggtggcaaccaccagcacatcggcaagccctccaccatccgcagagatgcccctgctggccgcaaagtgggtctcattgctgcccgccggactggacgtctccggggaaccaagactgtgcaggagaaagagaactagtgctgagggcctcaataaagtttgtgtttatgcc

SEQ ID NO: 26622 - DNA, 965 bp, Homo sapiens
  source 1..965: mol_type = unassigned DNA
tctttcggccgcgctggtgaacaggtaggtcatccttgcggccttgcggcatgggcagtatccgccgccatcctcttccgtgaggcgcgctgagacccggaccggccctcctgagaggatgccggtgcgggcgcccgcggagagggacccgtcgccatgggccgtgtgatccgtggacagaggaagggcgccgggtctgtgttccgcgcgcacgtgaagcaccgtaaaggcgctgcgcgcctgcgcgccgtggatttcgctgagcggcacggctacatcaagggcatcgtcaaggacatcatccacgacccgggccgcggcgcgcccctcgccaaggtggtcttccgggatccgtatcggtttaagaagcggacggagctgttcattgccgccgagggcattcacacgggccagtttgtgtattgcggcaagaaggcccagctcaacattggcaatgtgctccctgtgggcaccatgcctgagggtacaatcgtgtgctgcctggaggagaagcctggagaccgtggcaagctggcccgggcatcagggaactatgccaccgttatctcccacaaccctgagaccaagaagacccgtgtgaagctgccctccggctccaagaaggttatctcctcagccaacagagctgtggttggtgtggtggctggaggtggccgaattgacaaacccatcttgaaggctggccgggcgtaccacaaatataaggcaaagaggaactgctggccacgagtacggggtgtggccatgaatcctgtggagcatccttttggaggtggcaaccaccagcacatcggcaagccctccaccatccgcagagatgcccctgctggccgcaaagtgggtctcattgctgcccgccggactggacgtctccggggaaccaagactgtgcaggagaaagagaactagtgctgagggcctcaataaagtttgtgtttatgcca

SEQ ID NO: 26623 - DNA, 750 bp, Homo sapiens
  source 1..750: mol_type = unassigned DNA
acgcgatacaagtacgtaatgacgacagacgttctttctttgctgcgtctactgcgagaatgaagactattctcagcaatcagactgtcgacattccagaaaatgtcgacattactctgaagggacgcacagttatcgtgaagggccccagaggaaccctgcggagggacttcaatcacatcaatgtagaactcagccttcttggaaagaaaaaaaagaggctccgggttgacaaatggtggggtaacagaaaggaactggctaccgttcggactatttgtagtcatgtacagaacatgatcaagggtgttacactgggcttccgttacaagatgaggtctgtgtatgctcacttccccatcaacgttgttatccaggagaatgggtctcttgttgaaatccgaaatttcttgggtgaaaaatatatccgcagggttcggatgagaccaggtgttgcttgttcagtatctcaagcccagaaagatgaattaatccttgaaggaaatgacattgagcttgtttcaaattcagcggctttgattcagcaagccacaacagttaaaaacaaggatatcaggaaatttttggatggtatctatgtctctgaaaaaggaactgttcagcaggctgatgaataagatctaagagttacctggctacagaaagaagatgccagatgacacttaagacctacttgtgatatttaaatgatgcaataaaagacctattgatttggaccttcttcttaaa

SEQ ID NO: 26624 - DNA, 640 bp, Homo sapiens
  source 1..640: mol_type = unassigned DNA
ctttgctgcgtctactgcgagaatgaagactattctcagcaatcagactgtcgacattccagaaaatgtcgacattactctgaagggacgcacagttatcgtgaagggccccagaggaaccctgcggagggacttcaatcacatcaatgtagaactcagccttcttggaaagaaaaaaaagaggctccgggttgacaaatggtggggtaacagaaaggaactggctaccgttcggactatttgtagtcatgtacagaacatgatcaagggtgttacactgggcttccgttacaagatgaggtctgtgtatgctcacttccccatcaacgttgttatccaggagaatgggtctcttgttgaaatccgaaatttcttgggtgaaaaatatatccgcagggttcggatgagaccaggtgttgcttgtttcaaattcagcggctttgattcagcaagccacaacagttaaaaacaaggatatcaggaaatttttggatggtatctatgtctctgaaaaaggaactgttcagcaggctgatgaataagatctaagagttacctggctacagaaagaagatgccagatgacacttaagacctacttgtgatatttaaatgatgcaataaaagacctattgatttgg

SEQ ID NO: 26625 - DNA, 1127 bp, Homo sapiens
  source 1..1127: mol_type = unassigned DNA
aaggatgtttctgtgctcgtgggggtactgggaatctgaaaccatctgctctgggaaaggctgcggcgcggctcccactctcggaaccttgtcctgtttgtcccccagctcggcaagcgccatatgagcctggcggcgccagatgcgaatcctgttgtgggctttttggcctattcccgcccctcagtcttgccgggatggcaccgcccgcataggacttccagggttgggctgagtgggagttcgactgctgggcctcgtaattctcgctttggggctgctccttccaggctgggacacactggggcccgctgtcggtctcccgtcctccgacatcttgtctggaacttccgcctggcagtctccagtaggagtggagctctgtgcggcgtagtttggtggaaaaacgggccttgcgtcggcctcacccccagtgtttgtgtttcagaatgaagactattctcagcaatcagactgtcgacattccagaaaatgtcgacattactctgaagggacgcacagttatcgtgaagggccccagaggaaccctgcggagggacttcaatcacatcaatgtagaactcagccttcttggaaagaaaaaaaagaggctccgggttgacaaatggtggggtaacagaaaggaactggctaccgttcggactatttgtagtcatgtacagaacatgatcaagggtgttacactgggcttccgttacaagatgaggtctgtgtatgctcacttccccatcaacgttgttatccaggagaatgggtctcttgttgaaatccgaaatttcttgggtgaaaaatatatccgcagggttcggatgagaccaggtgttgcttgttcagtatctcaagcccagaaagatgaattaatccttgaaggaaatgacattgagcttgtttcaaattcagcggctttgattcagcaagccacaacagttaaaaacaaggatatcaggaaatttttggatggtatctatgtctctgaaaaaggaactgttcagcaggctgatgaataagatctaagagttacctggctacagaaagaagatgccagatgacacttaagacctacttgtgatatttaaatgatgcaataaaagacctattgatttgga

SEQ ID NO: 26626 - DNA, 689 bp, Homo sapiens
  source 1..689: mol_type = unassigned DNA
agacgttctttctttgctgcgtctactgcgaggctgggacacactggggcccgctgtcggtctcccgtcctccgacatcttgtctggaacttccgcctggcagtctccagtaggagtggagctctgtgcggcgtagtttggtggaaaaacgggccttgcgtcggcctcacccccagtgtttgtgtttcagaatgaagactattctcagcaatcagactgtcgacattccagaaaatgtcgacattactctgaagggacgcacagttatcgtgaagggccccagaggaaccctgcggagggacttcaatcacatcaatgtagaactcagccttcttggaaagaaaaaaaagaggctccgggttgacaaatggtggggtaacagaaaggaactggctaccgttcggactatttgtagtcatgtacagaacatgatcaagggtgttacactgggcttccgttacaagatgaggtctgtgtatgctcacttccccatcaacgttgttatccaggagaatgggtctcttgttgaaatccgaaatttcttgggtgaaaaatatatccgcagggttcggatgagaccaggtgttgcttgttcagtatctcaagcccagaaagatgaattaatccttgaaggaaatgacattgagcttgtttcaaattcagcggctttgattcagcaagccacaaca

SEQ ID NO: 26627 - DNA, 644 bp, Homo sapiens
  source 1..644: mol_type = unassigned DNA
ggcggggggcgggtccacgccagcccggaagagacgcagcaccgcgcatgctccttcctttccagccccggtaccggaccctgcagccgcagagatgttgatgcctaagaagaaccggattgccatttatgaactcctttttaaggagggagtcatggtggccaagaaggatgtccacatgcctaagcacccggagctggcagacaagaatgtgcccaaccttcatgtcatgaaggccatgcagtctctcaagtcccgaggctacgtgaaggaacagtttgcctggagacatttctactggtaccttaccaatgagggtatccagtatctccgtgattaccttcatctgcccccggagattgtgcctgccaccctacgccgtagccgtccagagactggcaggcctcggcctaaaggtctggagggtgagcgacctgcgagactcacaagaggggaagctgacagagatacctacagacggagtgctgtgccacctggtgccgacaagaaagccgaggctggggctgggtcagcaaccgaattccagtttagaggcggatttggtcgtggacgtggtcagccacctcagtaaaattggagaggattcttttgcattgaataaacttacagccaaaaaaccttaa

SEQ ID NO: 26628 - DNA, 609 bp, Homo sapiens
  source 1..609: mol_type = unassigned DNA
acttcctctccagcccctgcgtaatcgataaggaaacccggacgctgctgcccctttctttttttcaggcggccgggaagatggcggacattcagactgagcgtgcctaccaaaagcagccgaccatctttcaaaacaagaagagggtcctgctgggagaaactggcaaggagaagctcccgcggtactacaagaacatcggtctgggcttcaagacacccaaggaggctattgagggcacctacattgacaagaaatgccccttcactggtaatgtgtccattcgagggcggatcctctctggcgtggtgaccaagatgaagatgcagaggaccattgtcatccgccgagactatctgcactacatccgcaagtacaaccgcttcgagaagcgccacaagaacatgtctgtacacctgtccccctgcttcagggacgtccagatcggtgacatcgtcacagtgggcgagtgccggcctctgagcaagacagtgcgcttcaacgtgctcaaggtcaccaaggctgccggcaccaagaagcagttccagaagttctgaggctggacatcggcccgctccccacaatgaaataaagttattttctcattcc

SEQ ID NO: 26629 - DNA, 631 bp, Homo sapiens
  source 1..631: mol_type = unassigned DNA
gcctcaatccggaaacagaaactccccaggcccggcactgcgggagccacctctttcgagggtgggagtgcacatgcgcacaggggacctgaaaaacccttaaataccggcatgcgtgcggatgaggcctctttccctgccgccgccgagtcgcgcggaggcggaggcttgggtgcgttcaagattcaacttcacccgtaacccaccgccatggccgaggaaggcattgctgctggaggtgtaatggacgttaatactgctttacaagaggttctgaagactgccctcatccacgatggcctagcacgtggaattcgcgaagctgccaaagccttagacaagcgccaagcccatctttgtgtgcttgcatccaactgtgatgagcctatgtatgtcaagttggtggaggccctttgtgctgaacaccaaatcaacctaattaaggttgatgacaacaagaaactaggagaatgggtaggcctttgtaaaattgacagagaggggaaaccccgtaaagtggttggttgcagttgtgtagtagttaaggactatggcaaggagtctcaggccaaggatgtcattgaagagtatttcaaatgcaagaaatgaagaaataaatctttggctcaca

SEQ ID NO: 26630 - DNA, 646 bp, Homo sapiens
  source 1..646: mol_type = unassigned DNA
cacacagacgggcggtggctgcgcagcgtagctccgcctcctgcgtgagaggaagcggggacgtgtgaggtcacttcctgcgtgttgggtggcttcctgcggcgtttccactctcgctctcctttcgttgcctgatcgccgccatcatgggtcgcatgcatgctcccgggaagggcctgtcccagtcggctttaccctatcgacgcagcgtccccacttggttgaagttgacatctgacgacgtgaaggagcagatttacaaactggccaagaagggccttactccttcacagatcggtgtaatcctgagagattcacatggtgttgcacaagtacgttttgtgacaggcaataaaattttaagaattcttaagtctaagggacttgctcctgatcttcctgaagatctctaccatttaattaagaaagcagttgctgttcgaaagcatcttgagaggaacagaaaggataaggatgctaaattccgtctgattctaatagagagccggattcaccgtttggctcgatattataagaccaagcgagtcctccctcccaattggaaatatgaatcatctacagcctctgccctggtcgcataaatttgtctgtgtactcaagcaataaaatgattgtttaactaaaa

SEQ ID NO: 26631 - DNA, 711 bp, Homo sapiens
  source 1..711: mol_type = unassigned DNA
ggcccgggcgcgacaatcggggggcatcctgcggcgaggggaccctgtggggcttgggacgagagacgggggtctttccgtgggaaccgagctaggtgccgggcaagagacgcgcggctggcccacctggatcctggccaactcgggattgagttcgttcctggtctcagaaggcccgttttgctttcagggaggagcttgtgaaaaatggcacctcgaaaggggaaggaaaagaaggaagaacaggtcatcagcctcggacctcaggtggctgaaggagagaatgtatttggtgtctgccatatctttgcatccttcaatgacacttttgtccatgtcactgatctttctggcaaggaaaccatctgccgtgtgactggtgggatgaaggtaaaggcagaccgagatgaatcctcaccatatgctgctatgttggctgcccaggatgtggcccagaggtgcaaggagctgggtatcaccgccctacacatcaaactccgggccacaggaggaaataggaccaagacccctggacctggggcccagtcggccctcagagcccttgcccgctcgggtatgaagatcgggcggattgaggatgtcacccccatcccctctgacagcactcgcaggaaggggggtcgccgtggtcgccgtctgtgaacaagattcctcaaaatattttctgttaataaattgccttcatgtaaa

SEQ ID NO: 26632 - DNA, 1599 bp, Homo sapiens
  source 1..1599: mol_type = unassigned DNA
ctcccactctctctttccggtgtggagtctggagacgacgtgcagaaatggcacctcgaaaggggaaggaaaagaaggaagaacaggtcatcagcctcggacctcaggtggctgaaggagagaatgtatttggtgtctgccatatctttgcatccttcaatgacacttttgtccatgtcactgatctttctggcaaggaaaccatctgccgtgtgactggtgggatgaaggtaaaggcagaccgagatgaatcctcaccatatgctgctatgttggctgcccaggatgtggcccagaggtgcaaggagctgggtatcaccgccctacacatcaaactccgggccacaggaggaaataggaccaagacccctggacctggggcccagtcggccctcagagcccttgcccgctcgggtatgaagatcgggcggattgaggatgtcacccccatcccctctgacagcactcgcaggaaggggggtcgccgtggtcgccgtctgtgaacaagattcctcaaaatattttctgttaataaattgccttcatgtaaactgtttcaactccagccttctctccttcatcaggggctactcaggcatttgatttcttcctcctatttggcttcttgggagaaaggagcctgaggagagctgagatcctggtgctgcatttggggtcttttccatgctacttgcggcattaagttgccttggtcatctaaagcagaccaaggcgttggagacctcgttttgagtggagatgctggttctaaatatggaccaattcttaaagagccagagtgggaactgttgatccaagtgtagcctgaagcgaaagaggagccttccagacccatgccatatataaacacacgtgggtgtgcattctccccccacaccttctgtgcaaagctgggagctcactccactgcgtcttgctttttttcacttggcagatcttggagattgttccacatcagtacataaagtacataaagattgtcaccccacaaatacacaccaagtcctattttcatcagcgataaaaaagaaaagttcttgctttccggaagcttgcatgcggctctgagtacccagtgacaccagatggtactcagcgttttgcaagggattaccacaaggccccgtgatggtgcctgccatggttaggacaggctggtggctgggtagggttagtgagacccagtggagaggatgctgtgtgtcacaggctggagaggtgagaccattgaggtagtcagttgtagaggaaagaaaccagcaagaggggaaaatctgttgggatgctgcttttagcctttgatggcgtgttccaggcagagggaataagcaaataaatgggtcctgagacaaggggttactgtgatgaggcggcgttggttacatgccaaaccttgctagggattttaataacaacattgaatcttaacctgatgaaataacagtactcctggggaggcgggagggatagcattaggagatatacctaatgctaaatgacgagttaatgggtgcagcacaccaacatggcacatgtatacatatgtaacaaacctgcacgttgtgcacatgtacccta

SEQ ID NO: 26633 - DNA, 784 bp, Homo sapiens
  source 1..784: mol_type = unassigned DNA
ctccgccccctcccactctctctttccggtgtggagtctggagacgacgtgcaggtaggaggcccgggcgcgacaatcggggggcatcctgcggcgaggggaccctgtggggcttgggacgagagacgggggtctttccgtgggaaccgagctaggtgccgggcaagagacgcgcggctggcccacctggatcctggccaactcgggattgagttcgttcctggtctcagaaggcccgttttgctttcagggaggagcttgtgaagtaaggaaatggcacctcgaaaggggaaggaaaagaaggaagaacaggtcatcagcctcggacctcaggtggctgaaggagagaatgtatttggtgtctgccatatctttgcatccttcaatgacacttttgtccatgtcactgatctttctggcaaggaaaccatctgccgtgtgactggtgggatgaaggtaaaggcagaccgagatgaatcctcaccatatgctgctatgttggctgcccaggatgtggcccagaggtgcaaggagctgggtatcaccgccctacacatcaaactccgggccacaggaggaaataggaccaagacccctggacctggggcccagtcggccctcagagcccttgcccgctcgggtatgaagatcgggcggattgaggatgtcacccccatcccctctgacagcactcgcaggaaggggggtcgccgtggtcgccgtctgtgaacaagattcctcaaaatattttctgttaataaattgccttcatgtaaactgtttc

SEQ ID NO: 26634 - DNA, 592 bp, Homo sapiens
  source 1..592: mol_type = unassigned DNA
gttaacgcactgggtcgtgctcattggtctgatttgaagataggaacatttaacttcgtacacccaagacttacacttgaaaaatggcacctcgaaaggggaaggaaaagaaggaagaacaggtcatcagcctcggacctcaggtggctgaaggagagaatgtatttggtgtctgccatatctttgcatccttcaatgacacttttgtccatgtcactgatctttctggcaaggaaaccatctgccgtgtgactggtgggatgaaggtaaaggcagaccgagatgaatcctcaccatatgctgctatgttggctgcccaggatgtggcccagaggtgcaaggagctgggtatcaccgccctacacatcaaactccgggccacaggaggaaataggaccaagacccctggacctggggcccagtcggccctcagagcccttgcccgctcgggtatgaagatcgggcggattgaggatgtcacccccatcccctctgacagcactcgcaggaaggggggtcgccgtggtcgccgtctgtgaacaagattcctcaaaatattttctgttaataaattgccttcatgtaaactgtt

SEQ ID NO: 26635 - DNA, 531 bp, Homo sapiens
  source 1..531: mol_type = unassigned DNA
ggcagtctcgcgataactgcgcaggcgcggaccaaagcgatctcttctgaggatccggcaagatggcagaagtagagcagaagaagaagcggaccttccgcaagttcacctaccgcggcgtggacctcgaccagctgctggacatgtcctacgagcagctgatgcagctgtacagtgcgcgccagcggcggcggctgaaccggggcctgcggcggaagcagcactccctgctgaagcgcctgcgcaaggccaagaaggaggcgccgcccatggagaagccggaagtggtgaagacgcacctgcgggacatgatcatcctacccgagatggtgggcagcatggtgggcgtctacaacggcaagaccttcaaccaggtggagatcaagcccgagatgatcggccactacctgggcgagttctccatcacctacaagcccgtaaagcatggccggcccggcatcggggccacccactcctcccgcttcatccctctcaagtaatggctcagctaataaaggcgcacatgactcc

SEQ ID NO: 26636 - DNA, 1082 bp, Homo sapiens
  source 1..1082: mol_type = unassigned DNA
ggcgcggaccaaagcgatctcttctgaggatccggcaagatggcagaagtagagcagaagaagaagcggaccttccgcaagttcacctaccgcggcgtggacctcgaccagctgctggacatgtcctacgagcagctgatgcagctgtacagtgcgcgccagcggcggcggctgaaccggggcctgcggcggaagcagcactccctgctgaagcgcctgcgcaaggccaagaaggaggcgccgcccatggagaagccggaagtggtgaagacgcacctgcgggacatgatcatcctacccgagatggtgggcagcatggtgggcgtctacaacggcaagaccttcaaccaggtggagatcaagcccgagatgatcggccactacctgggcgagttctccatcacctacaagcccgtaaagcatggccggcccggcatcggggccacccactcctcccgcttcatccctctcaagtaatggctcagctaataaaggcgcacatgactccagtcctttgcgcagcttgttcttcctggcgtcccgagctctgggaggggcctgggcctgcttcaggttcgtggtgtgaggaggttcaggttggacgttcgggggtgtgtggtagtgttgtgtggatggtctcttggtgtcgaagactgacagctgtgcgggccctgccccaactcggctgcccctgctcctgtctgcagggacagctgtggagctgggtgcccaagcccaggtgtgtagctccgtcccttttggccccctcagcgttcttgacctcggggcagctgcctggcctcactctgtcttctgggtacctcacgtagagggggccactcctgggctaagtgcagcccctcaagccctcacctggcctgggctctcctttctggcttccctcatctcctgtggagggttcccgcaggaagtgaagcagcagcaggaacctttgggccacctgagcccctcccttctatcctcacccctgcttggcttcttagaagctcctgactctcctcctgacaccacgctgctggcatctcctctcccagcaggctccatggctgcagccagcccca

SEQ ID NO: 26637 - DNA, 2203 bp, Homo sapiens
  source 1..2203: mol_type = unassigned DNA
ctctttccgccatctttccgcgccggtgagtagcactctctgagagctccaatttcatccgtctgccatcggcgccatcctgcaatctaagccacaatggtgcgcatgaatgtcctggcagatgctctcaagagtatcaacaatgccgaaaagagaggcaaacgccaggtgcttattaggccgtgctccaaagtcatcgtccggtttctcactgtgatgatgaagcatggttacattggcgaatttgaaatcattgatgaccacagagctgggaaaattgttgtgaacctcacaggcaggctaaacaagtgtggggtgatcagccccagatttgacgtgcaactcaaagacctggaaaaatggcagaataatctgcttccatcccgccagtttggtttcattgtactgacaacctcagctggcatcatggaccatgaagaagcaagacgaaaacacacaggagggaaaatcctgggattctttttctagggatgtaatacatatatttacaaataaaatgcctcatggactctggtgcttccacttggtcgttttgagcctttacagcagtgtagccacagcttctgcggcagcatgcagttgcttcgtttatcggtgaatgcgattccctgaagtgactaatacagccaagggaaaaagttcttatgaaaccagtatgcctaagaaacagtcacccctgctgtctgccaaaaccaggtatttgacactaaatattttagttgtatttcagtttttttttttttttttcttttttggagacagagtctgactctattgctcaggctggagtgcagtggcgcgatcttggcccactgcaacctccacctcccgggttcaagtgattgtcctgtctcagccgcctgagtaactgggattacaagtgtgtgtcgccacatccggctaatttttatattttagtagagacagggtttcgccatgttgcccaggctggtcttgagttctgggcctcaagtgatcagcctacctcggcctcccgaagtgctgggattacagccacgagccattacacctggcctatatttcagtattttctattagtttttgatgaatttgttttgcctggctaggattattctgtagataggattttagatctggcttttgtcactgactgctgtaataaatacttgctaggaatttttttttttttttttttttttttaagacaaagtcgctctgtcacacaggctggagtgcagtggcatgatcttggctcactgcacctccgcttcccagattcaagtagttctcgtgcctcagcctcctgagtagctgggattacaggtgtgtgccaccatgtctggctgatttttgtatttttagtagaggtggggtttcaccatgttggccaggctggtctcgaactcctgatctcaagtgatctgcctgccttggtctcccaaagtgctgggattacaggtgtgaccaccacgccctgccttaagaattgttccaagagaatctggtgccacttgcaggtgcccattgaagtgcaatgggcactgttgatcactgaggaggtagtgggtgctgacccggtgctggggcctgtcccctagtctctgctttgcccttggctagctaggtggtgtgccaagtggggagagaagctaccttattaaggggcatggatcagcttcctgaaaggagggcctgcctctgtaagatatgggaagtcgctgagaatgttacagaacggccctagagatggggcagataacggcccccatttgtgagaagtgagttgggaggcatgtttggggcctctgatgtttgggaggctgtgggtaattaacatgagttttggggtccagcagcagaattcaggtttcctcttccactcagtaacctcagcatccgtatctgtaatgggaatgatacaaaacctatccccaagttgagggaaaaatgagattgtgtaaagcgcacttggcacatgacagtcacaagcatggggacagtgagtccagaaggattttcttatgccagcattgtaagccctaggatcacagggctctggcttgtttaaccatcgtgtctctggtccctagcctgcaaacctggtgtgtagggatgcctcagtcgcttacatgttgattgagtgaatcgtcggtttctttctggacactgacttcaaaaataaaataggatatgaaaatgg

SEQ ID NO: 26638 - DNA, 797 bp, Homo sapiens
  source 1..797: mol_type = unassigned DNA
ctctttccgccatctttccgcgccgccacaatggtgcgcatgaatgtcctggcagatgctctcaagagtatcaacaatgccgaaaagagaggcaaacgccaggtgcttattaggccgtgctccaaagtcatcgtccggtttctcactgtgatgatgaagcatggttacattggcgaatttgaaatcattgatgaccacagagctgggaaaattgttgtgaacctcacaggcaggctaaacaagtgtggggtgatcagccccagatttgacgtgcaactcaaagacctggaaaaatggcagaataatctgcttccatcccgccagtttggtttcattgtactgacaacctcagctggcatcatggaccatgaagaagcaagacgaaaacacacaggagggaaaatcctgggattctttttctagggatgtaatacatatatttacaaataaaatgcctcatggactctggtgcttccacttggtcgttttgagcctttacagcagtgtagccacagcttctgcggcagcatgcagttgcttcgtttatcggtgaatgcgattccctgaaattcaagtagttctcgtgcctcagcctcctgagtagctgggattacaggtgtgtgccaccatgtctggctgatttttgtatttttagtagaggtggggtttcaccatgttggccaggctggtctcgaactcctgatctcaagtgatctgcctgccttggtctcccaaagtgctgggattacaggtgtgaccaccacgccctgccttaagaattgttccaagagaatctg

SEQ ID NO: 26639 - DNA, 585 bp, Homo sapiens
  source 1..585: mol_type = unassigned DNA
gaaaagcggccagggtggcccctagctttccttttccggttgcggcgccgcgcggtgaggttgtctagtccacgctcggagccatgccgtccaagggcccgctgcagtctgtgcaggtcttcggacgcaagaagacagcgacagctgtggcgcactgcaaacgcggcaatggtctcatcaaggtgaacgggcggcccctggagatgattgagccgcgcacgctacagtacaagctgctggagccagttctgcttctcggcaaggagcgatttgctggtgtagacatccgtgtccgtgtaaagggtggtggtcacgtggcccagatttatgctatccgtcagtccatctccaaagccctggtggcctattaccagaaatatgtggatgaggcttccaagaaggagatcaaagacatcctcatccagtatgaccggaccctgctggtagctgaccctcgtcgctgcgagtccaaaaagtttggaggccctggtgcccgcgctcgctaccagaaatcctaccgataagcccatcgtgactcaaaactcacttgtataataaacagtttttgagggattttaaagtttc

SEQ ID NO: 26640 - DNA, 638 bp, Homo sapiens
  source 1..638: mol_type = unassigned DNA
cggcgccgcgcggtgaggttgtctagtccacgctcggagccatgccgtccaagggcccgctgcagtctgtgcaggtcttcggacgcaagaagacagcgacagctgtggcgcactgcaaacgcggcaatggtctcatcaaggtgaacgggcggcccctggagatgattgagccgcgcacgctacagtacaagctgctggagccagttctgcttctcggcaaggagcgatttgctggtgtagacatccgtgtccgtgtaaagggtggtggtcacgtggcccagatttatggtgagtcccaggaactgggcgcatggaggaggtggctctgggagggaggccttcacagcgctcctgtaccctttaattgtgtgtctttctcacagctatccgtcagtccatctccaaagccctggtggcctattaccagaaatatgtggatgaggcttccaagaaggagatcaaagacatcctcatccagtatgaccggaccctgctggtagctgaccctcgtcgctgcgagtccaaaaagtttggaggccctggtgcccgcgctcgctaccagaaatcctaccgataagcccatcgtgactcaaaactcacttgtataataaacagtttttgagggattttaaagtttc

SEQ ID NO: 26641 - DNA, 595 bp, Homo sapiens
  source 1..595: mol_type = unassigned DNA
actccgccagggggcgctgtgtggctcccgagtaggctcagagcgaccgtggccgggcggaagcggctttctggcctaagctttaacaggcttcgcctgtgcttcctgtttcctcttttaccaaggacccgccaacatgggccgcgttcgcaccaaaaccgtgaagaaggcggcccgggtcatcatagaaaagtactacacgcgcctgggcaacgacttccacacgaacaagcgcgtgtgcgaggagatcgccattatccccagcaaaaagctccgcaacaagatagcaggttatgtcacgcatctgatgaagcgaattcagagaggcccagtaagaggtatctccatcaagctgcaggaggaggagagagaaaggagagacaattatgttcctgaggtctcagccttggatcaggagattattgaagtagatcctgacactaaggaaatgctgaagcttttggacttcggcagtctgtccaaccttcaggtcactcagcctacagttgggatgaatttcaaaacgcctcggggacctgtttgaattttttctgtagtgctgtattattttcaataaatctgggacaacagcctt

SEQ ID NO: 26642 - DNA, 613 bp, Homo sapiens
  source 1..613: mol_type = unassigned DNA
cttctcctagatcgcaccgcctcttcctcctggaagctatataatgatatcgcgtcacttccgctctctcttccacaggaggcctacacgccgccgcttgtgctgcagccatgtctctagtgatccctgaaaagttccagcatattttgcgagtactcaacaccaacatcgatgggcggcggaaaatagcctttgccatcactgccattaagggtgtgggccgaagatatgctcatgtggtgttgaggaaagcagacattgacctcaccaagagggcgggagaactcactgaggatgaggtggaacgtgtgatcaccattatgcagaatccacgccagtacaagatcccagactggttcttgaacagacagaaggatgtaaaggatggaaaatacagccaggtcctagccaatggtctggacaacaagctccgtgaagacctggagcgactgaagaagattcgggcccatagagggctgcgtcacttctggggccttcgtgtccgaggccagcacaccaagaccactggccgccgtggccgcaccgtgggtgtgtccaagaagaaataagtctgtaggccttgtctgttaataaatagtttatatacctatgg

SEQ ID NO: 26643 - DNA, 613 bp, Homo sapiens; identical to SEQ ID NO: 26642
  source 1..613: mol_type = unassigned DNA

SEQ ID NO: 26644 - DNA, 613 bp, Homo sapiens; identical to SEQ ID NO: 26642
  source 1..613: mol_type = unassigned DNA

SEQ ID NO: 26645 - DNA, 212 bp, Homo sapiens
  source 1..212: mol_type = unassigned DNA
cttctcctagatcgcaccgcctcttcctcctggaagctatataatgatatcgcgtcacttccgctctctcttccacaggaggcctacacgccgccgcttgtgctgcagccatgtctctagtgatccctgaaaagttccagcatattttgcgagtactcaacaccaacatcgatgggcggcggaaaatagcctttgccatcactgccattaag

SEQ ID NO: 26646 - DNA, 613 bp, Homo sapiens; identical to SEQ ID NO: 26642
  source 1..613: mol_type = unassigned DNA

SEQ ID NO: 26647 - DNA, 613 bp, Homo sapiens; identical to SEQ ID NO: 26642
  source 1..613: mol_type = unassigned DNA

SEQ ID NO: 26648 - DNA, 589 bp, Homo sapiens
  source 1..589: mol_type = unassigned DNA
ctctcttccacaggaggcctacacgccgccgcttgtgctgcagccatgtttactgtgtctgatttcttcccccgtactttttcaactagtctctagtgatccctgaaaagttccagcatattttgcgagtactcaacaccaacatcgatgggcggcggaaaatagcctttgccatcactgccattaagggtgtgggccgaagatatgctcatgtggtgttgaggaaagcagacattgacctcaccaagagggcgggagaactcactgaggatgaggtggaacgtgtgatcaccattatgcagaatccacgccagtacaagatcccagactggttcttgaacagacagaaggatgtaaaggatggaaaatacagccaggtcctagccaatggtctggacaacaagctccgtgaagacctggagcgactgaagaagattcgggcccatagagggctgcgtcacttctggggccttcgtgtccgaggccagcacaccaagaccactggccgccgtggccgcaccgtgggtgtgtccaagaagaaataagtctgtaggccttgtctgttaataaatagtttatatacctatgg

SEQ ID NO: 26649 - DNA, 685 bp, Homo sapiens
  source 1..685: mol_type = unassigned DNA
cacgccgccgcttgtgctgcagccatgtctctagtgatccctgaaaagttccagcatattttgcgagtactcaacaccaacatcgatgggcggcggaaaatagcctttgccatcactgccattaagtagagacagggtttcaccatgttggccaggctggttttgaactcctgccctcaatgtcatctgcccacttgggcctcccaaagtgctgggattacaggcgtgagccactgcgaccggcccaaagttaaccttctgtcgaacggtttatatctggaaagggtgtgggccgaagatatgctcatgtggtgttgaggaaagcagacattgacctcaccaagagggcgggagaactcactgaggatgaggtggaacgtgtgatcaccattatgcagaatccacgccagtacaagatcccagactggttcttgaacagacagaaggatgtaaaggatggaaaatacagccaggtcctagccaatggtctggacaacaagctccgtgaagacctggagcgactgaagaagattcgggcccatagagggctgcgtcacttctggggccttcgtgtccgaggccagcacaccaagaccactggccgccgtggccgcaccgtgggtgtgtccaagaagaaataagtctgtaggccttgtctgttaataaatagtttatatacctatgg

SEQ ID NO: 26650 - DNA, 654 bp, Homo sapiens
  source 1..654: mol_type = unassigned DNA
cttctcctagatcgcaccgcctcttcctcctggaagctatataatgatatcgcgtcacttccgctctctcttccacaggaggcctacacgccgccgcttgtgctgcagccatgtttactgtgtctgatttcttcccccgtactttttcaactagtctctagtgatccctgaaaagttccagcatattttgcgagtactcaacaccaacatcgatgggcggcggaaaatagcctttgccatcactgccattaagggtgtgggccgaagatatgctcatgtggtgttgaggaaagcagacattgacctcaccaagagggcgggagaactcactgaggatgaggtggaacgtgtgatcaccattatgcagaatccacgccagtacaagatcccagactggttcttgaacagacagaaggatgtaaaggatggaaaatacagccaggtcctagccaatggtctggacaacaagctccgtgaagacctggagcgactgaagaagattcgggcccatagagggctgcgtcacttctggggccttcgtgtccgaggccagcacaccaagaccactggccgccgtggccgcaccgtgggtgtgtccaagaagaaataagtctgtaggccttgtctgttaataaatagtttatatacctatgg

SEQ ID NO: 26651 - DNA, 685 bp, Homo sapiens; identical to SEQ ID NO: 26649
  source 1..685: mol_type = unassigned DNA

SEQ ID NO: 26652 - DNA, 589 bp, Homo sapiens; identical to SEQ ID NO: 26648
  source 1..589: mol_type = unassigned DNA

SEQ ID NO: 26653 - DNA, 847 bp, Homo sapiens
  source 1..847: mol_type = unassigned DNA
gtactttcgccatcatagtattctccaccactgttccttccagccacgaacgacgcaaacgaagccaagttcccccagctccgaacaggagctctctatcctctctctattacactccgggagaaggaaacgcgggaggaaacccaggcctccacgcgcgaccccttggccctcccctttacctctccacccctcactagacaccctcccctctaggcggggacgaactttcgccctgagagaggcggagcctcagcgtctaccctcgctctcgcgagctttcggaactctcgcgagaccctacgcccgacttgtgcgcccgggaaaccccgtcgttccctttcccctggctggcagcgcggaggccgcacgatgcctggagttactgtaaaagacgtgaaccagcaggagttcgtcagagctctggcagccttcctcaaaaagtccgggaagctgaaagtccccgaatgggtggataccgtcaagctggccaagcacaaagagcttgctccctacgatgagaactggttctacacgcgagctgcttccacagcgcggcacctgtacctccggggtggcgctggggttggctccatgaccaagatctatgggggacgtcagagaaacggcgtcatgcccagccacttcagccgaggctccaagagtgtggcccgccgggtcctccaagccctggaggggctgaaaatggtggaaaaggaccaagatggcggccgcaaactgacacctcagggacaaagagatctggacagaatcgccggacaggtggcagctgccaacaagaagcattagaacaaaccatgctgggttaataaattgcctcattcgt

SEQ ID NO: 26654 - DNA, 2359 bp, Homo sapiens
  source 1..2359: mol_type = unassigned DNA
gtactttcgccatcatagtattctccaccactgttccttccagccacgaacgacgcaaacgaagccaagttcccccagctccgaacaggagctctctatcctctctctattacactccgggagaaggaaacgcgggaggaaacccaggcctccacgcgcgaccccttggccctcccctttacctctccacccctcactagacaccctcccctctaggcggggacgaactttcgccctgagagaggcggagcctcagcgtctaccctcgctctcgcgagctttcggaactctcgcgagaccctacgcccgacttgtgcgcccgggaaaccccgtcgttccctttcccctggctggcagcgcggaggccgcacgatgcctggagttactgtaaaagacgtgaaccagcaggagttcgtcagagctctggcagccttcctcaaaaagtccgggaagctgaaagtccccgaatgggtggataccgtcaagctggccaagcacaaagagcttgctccctacgatgagaactggttctacacgcgagctgcttccacagcgcggcacctgtacctccggggtggcgctggggttggctccatgaccaagatctatgggggacgtcagagaaacggcgtcatgcccagccacttcagccgaggctccaagagtgtggcccgccgggtcctccaagccctggaggggctgaaaatggtggaaaaggaccaagatggcggccgcaaactgacacctcagggacaaagagatctggacagaatcgccggacaggtggcagctgccaacaagaagcattagaacaaaccatgctgggttaataaattgcctcattcgtaatcctggtctgggtctcttttttgagtctcttgctctgtcgcccaggctggagtgcagtggcgccatctcagctcactgcaatctccgccttctgggttcaaatgattctcctgcctcagcctcccaaagtgctgggattacaagtgtgagccactgtgcctggtctggtttgggtctcttgattgttcttcaggggcatgaggaagaggcgcttcctcccttcccttgggtgagggggcccagggtgattgggtggctgtttacccggcagccagtcgggccttcccaggtcaaacagttcccatctgggtttggaggaaggacccaggggcccttgtggctcactcccccacatcctgtctttgcaattgtcagaaagtgagaaacgaaaggatggctgtgagctgtgacctcagctgggcctgggctgcagaggtggcttccgctggagtaaagcaagagggcccagggttcatgctcttccctggaaggtagaaaaggacagaccaccagggagcctccaccgcaaactgacctgtgctgcctacacactaactttcctgggcctggggcctgcacaggctgaatggtccttgagccttcactctgcatctgagcggtcttgggcccgctgagtggcagtggcaggaagtcggtggaagcagatccctgtgcagaagttgaattaccagggcggccacacacgggctgcacaacctttgcagtcgtgcacggcaagtgggatgtggcctccgcccatgattgggcacctggtcaggctgggagatccaaatagcacccagtgggcagctgtccgacccctggaggggcaagccaggaaagaaacttagggcccgctgtgaccagatgtccctcccagttgggaagactaaactggtttggccaatatctcccaggattcccctgtccaaattattcctgggatctgacccatttcctggaaaggggcgagcctgggttttgaagttcaaactagagtttaaatcacaactctgcccctaatcccacgtaaccctgtgcaccttatcctctgagccttcgtctcctcgtgtgtaagcctgctaactcctgagagactggacaagatgccgtggagagccttggctctgagtagctctgctgctggacagttcagttggcagtccccaaacgtaaggcgtaagagtttaagaagtatcggccaggcacagtggctcacacctgtaatctcaacactttgggaggccgagacgggctgatcacctgaggttgggagcttgagaacagcctgaccaacatggagaaaccctgtctctaaaaataccaaaattagttgggcatggtggcgcgcacctgtaatcccagctactcaggaggctgaggcagaagaatcgctcgaaccccggaggcggaggttgcagtgggttgagatcgagcaattgcaatccagcctgggcaacagagcgagactccatttcaaaaaaagaatcaataaaaatgttaaaagcac

SEQ ID NO: 26655 - DNA, 927 bp, Homo sapiens
  source 1..927: mol_type = unassigned DNA
ggcacttccgcccatccccctccggatccctctgttcgggctcgggtttccgccgagacgacagggactgccaggtcggaagtagtgtgaggctcgtgggcggagccaagcgccgccatgtccgccgccctgctgcggcggggcctggagctgctggcggcgtccgaggccccccgggaccctccaggtcaggccaagccgagaggggctccggtgaaacggccccggaagacgaaggcaattcaggcccagaaactgcggaactcggccaagggaaaggtgcccaagtcggcactggacgagtaccggaagcgagagtgtcgagaccacctcagagtaaacctgaagtttctgaccaggacgagaagcaccgtggctgagtctgtgagccagcagattttgcgccagaaccggggccgcaaggcctgtgaccggcctgtggccaagaccaagaagaagaaggctgagggcaccgtgttcaccgaggaagacttccagaagttccagcaggaatacttcggcagctaggctccctggagggcacggtgaagaggccttcaagccctgcagcctccgactcctgctggctccaggaaccggccgtgccgcgcggccagcagatggcgatgcaggaccagcctggctcgaggaagccgcggagctgagccgagtggaggctggaatggagctggtgggccggaagtcctggggaggatttacacacagaccggagctggcttccgcaggcctgggcagagcatctgcacctgccggaaaggaacgtatctgttttgtttgcttttgcccaggtggggcctctgggctgtttgctgtggagcaaggctaattcctgagcccttggggacgacagctccaggagtaggaagaagggtgggcttccaagttacaataaatgtgaacccaaga

SEQ ID NO: 26656 - DNA, 976 bp, Homo sapiens
  source 1..976: mol_type = unassigned DNA
gtgctataaaagctgcttcccagtaggtctcgttcttcttttccgacaaaacaccaaatggcggatgacgccggtgcagcgggggggcccgggggccctggtggccctgggatggggaaccgcggtggcttccgcggaggtttcggcagtggcatccggggccggggtcgcggccgtggacggggccggggccgaggccgcggagctcgcggaggcaaggccgaggataaggagtggatgcccgtcaccaagttgggccgcttggtcaaggacatgaagatcaagtccctggaggagatctatctcttctccctgcctattaaggaatcagagatcattgatttcttcctgggggcctctctcaaggatgaggttttgaagattatgccagtgcagaagcagacccgtgccggccagcgcaccaggttcaaggcatttgttgctatcggggactacaatggccacgtcggtctgggtgttaagtgctccaaggaggtggccaccgccatccgtggggccatcatcctggccaagctctccatcgtccccgtgcgcagaggctactgggggaacaagatcggcaagccccacactgtcccttgcaaggtgacaggccgctgcggctctgtgctggtacgcctcatccctgcacccaggggcactggcatcgtctccgcacctgtgcctaagaagctgctcatgatggctggtatcgatgactgctacacctcagcccggggctgcactgccaccctgggcaacttcgccaaggccacctttgatgccatttctaagacctacagctacctgacccccgacctctggaaggagactgtattcaccaagtctccctatcaggagttcactgaccacctcgtcaagacccacaccagagtctccgtgcagcggactcaggctccagctgtggctacaacatagggtttttatacaagaaaaataaagtgaattaagcgtg

SEQ ID NO: 26657 - DNA, 924 bp, Homo sapiens
  source 1..924: mol_type = unassigned DNA
agtcctgttggtcgctgcagcgggcctctgcgtgggcggcgggaatccgcggacatcgggtcgggtctaggctcccgagtccgcgctcctgggcgggagcccttgtctgggtctcgcggggggctgccagatgcgtaggccacactgactagttccttcttgtcgcttttcccagcaaatggcggatgacgccggtgcagcgggggggcccgggggccctggtggccctgggatggggaaccgcggtggcttccgcggaggtttcggcagtggcatccggggccggggtcgcggccgtggacggggccggggccgaggccgcggagctcgcggaggcaaggccgaggataaggagtggatgcccgtcaccaagttgggccgcttggtcaaggacatgaagatcaagtccctggaggagatctatctcttctccctgcctattaaggaatcagagatcattgatttcttcctgggggcctctctcaaggatgaggttttgaagattatgccagtgcagaagcagacccgtgccggccagcgcaccaggttcaaggtgacaggccgctgcggctctgtgctggtacgcctcatccctgcacccaggggcactggcatcgtctccgcacctgtgcctaagaagctgctcatgatggctggtatcgatgactgctacacctcagcccggggctgcactgccaccctgggcaacttcgccaaggccacctttgatgccatttctaagacctacagctacctgacccccgacctctggaaggagactgtattcaccaagtctccctatcaggagttcactgaccacctcgtcaagacccacaccagagtctccgtgcagcggactcaggctccagctgtggctacaacatagggtttttatacaagaaaaataaagtgaattaagcgtgt

SEQ ID NO: 26658 - DNA, 1030 bp, Homo sapiens
  source 1..1030: mol_type = unassigned DNA
agcaaatggcggatgacgccggtgcagcgggggggcccgggggccctggtggccctgggatggggaaccgcggtggcttccgcggaggtttcggcagtggcatccggggccggggtcgcggccgtggacggggccggggccgaggccgcggagctcgcggaggcaaggccgaggataaggagtggatgcccgtcaccaagttgggccgcttggtcaaggacatgaagatcaagtccctggaggagatctatctcttctccctgcctattaaggaatcagagatcattgatttcttcctgggggcctctctcaaggatgaggttttgaagattatgccagtgcagaagcagacccgtgccggccagcgcaccaggttcaaggtacccggctgtcctggagggggctgcgctgggcttgccgggactctctcggctctgcatagttgcacttggcttcacccgtgtgactttcgtaacggggagagagagaaaagatctcctcaggacctcggatgggccttactgtggcctctctttccttgaggggtgcaacaggccctgggcggtgggcagtgattgggtgtagggccaccagctgcctcacacacatcttttcgcaggctccctcgggcccccgtctcctgactccttccctcaccaggtgacaggccgctgcggctctgtgctggtacgcctcatccctgcacccaggggcactggcatcgtctccgcacctgtgcctaagaagctgctcatgatggctggtatcgatgactgctacacctcagcccggggctgcactgccaccctgggcaacttcgccaaggccacctttgatgccatttctaagacctacagctacctgacccccgacctctggaaggagactgtattcaccaagtctccctatcaggagttcactgaccacctcgtcaagacccacaccagagtctccgtgcagcggactcaggctccagctgtggctacaacatagggtttttatacaagaaaaataaagtgaattaagcgtg

SEQ ID NO: 26659 - DNA, 625 bp, Homo sapiens
  source 1..625: mol_type = unassigned DNA
gtcaccaagttgggccgcttggtcaaggacatgaagatcaagtccctggaggagatctatctcttctccctgcctattaaggcatttgttgctatcggggactacaatggccacgtcggtctgggtgttaagtgctccaaggaggtggccaccgccatccgtggggccatcatcctggccaagctctccatcgtccccgtgcgcagaggctactgggggaacaagatcggcaagccccacactgtcccttgcaaggtgacaggccgctgcggctctgtgctggtacgcctcatccctgcacccaggggcactggcatcgtctccgcacctgtgcctaagaagctgctcatgatggctggtatcgatgactgctacacctcagcccggggctgcactgccaccctgggcaacttcgccaaggccacctttgatgccatttctaagacctacagctacctgacccccgacctctggaaggagactgtattcaccaagtctccctatcaggagttcactgaccacctcgtcaagacccacaccagagtctccgtgcagcggactcaggctccagctgtggctacaacatagggtttttatacaagaaaaataaagtgaattaagcgtg

SEQ ID NO: 26660 - DNA, 626 bp, Homo sapiens
  source 1..626: mol_type = unassigned DNA
ctttttgaggaagacgcggtcgtaagggctgaggatttttggtccgcacgctcctgctcctgactcaccgctgttcgctctcgccgaggaacaagtcggtcaggaagcccgcgcgcaacagccatggcttttaaggataccggaaaaacacccgtggagccggaggtggcaattcaccgaattcgaatcaccctaacaagccgcaacgtaaaatccttggaaaaggtgtgtgctgacttgataagaggcgcaaaagaaaagaatctcaaagtgaaaggaccagttcgaatgcctaccaagactttgagaatcactacaagaaaaactccttgtggtgaaggttctaagacgtgggatcgtttccagatgagaattcacaagcgactcattgacttgcacagtccttctgagattgttaagcagattacttccatcagtattgagccaggagttgaggtggaagtcaccattgcagatgcttaagtcaactattttaataaattgatgaccagttgttaacttctgttggtttttattcagaatactggcagattttaggaatataaaggtgtactatgagacttccacttttcaggtggaatatatgggtatcttagagtggtcta

SEQ ID NO: 26661 - DNA, 1826 bp, Homo sapiens
  source 1..1826: mol_type = unassigned DNA
tttctttttgaggaagacgcggtcgtaagggctgaggatttttggtccgcacgctcctgctcctgactcaccgctgttcgctctcgccgaggaacaagtcggtcaggaagcccgcgcgcaacagccatggcttttaaggataccggaaaaacacccgtggagccggaggtggcaattcaccgaattcgaatcaccctaacaagccgcaacgtaaaatccttggaaaaggtgtgtgctgacttgataagaggcgcaaaagaaaagaatctcaaagtgaaaggaccagttcgaatgcctaccaagactttgagaatcactacaagaaaaactccttgtggtgaaggttctaagacgtgggatcgtttccagatgagaattcacaagcgactcattgacttgcacagtccttctgagattgttaagcagattacttccatcagtattgagccaggagttgagttgatcgaatctacagatgcagaacccatggatacagagggccagcagtacactttgagaagtgtattcgaatccccggggacatgtcctttttaactgcattctcctccgccaaaaaagtgaccaagcagagtctttctctgtcacccaggctggagtgcaatggcgtgatctcagctcactgcaacctctgcctcctgggttcaagtgattctcgtgtctcagcctcctgagtagctgagactacaggtgtgcaccagtgttcccagctgatttttgtattttatgtagagatggggttatgccattttggccaggctagtctcgaactcctgagctcaggtgatacacacacctcagcaaatcttttaaattatacattctgtgatatttccttgactttcttatccagcacttgtattgattatttttcattttgataatgttgggtttttaaaaactcctttatgatggaaaatttcaaacatacacaaaagtagagagagaatggtataataaacccactcagttttaaggattgtcaactaataccagttttatttcatgtatgactccaacaacttccccaaccagccttcagattatttgaaagcaaatttcagacatcgtattttactcatacattttctagtatctaaatctgaaagagactcttttctaacagttctgtagcattaattatactcatactgttgtgcaacaaatatccagaaatcttttgtcttgcgaaactgaacctcttacccattaaacactaactcccttttttttcaccctgaaccattggcaaccacaattttactttctttttctgtgagtttgattacttgatacttcatgtgagtggaatcatataatatttgtctttttgtgactgacattttatttagcttaatgtcttcaagtttgacccataccatatcatgtggcaggatttttccctttttttttttttcagacggagtctcgctctgtcgcccaggctggagtgcagtggcgcgatctcggctcactgcaagctccgcctcccgggttcatgccattctcctgcctcagcctcctgagtagctgggactacaggcgcccaccactaaacccggctaatttttttgtatttttagtagagacagagtttcaccatgttaatgaggatggtctccatctcctgacctcgtgattcgctcgtctcggcctcccaaagtgctgggattacaggcgtgagccaccgcgcccggccatgatttttcttcttttttaaggctgaataatatctcaatgtatgtatatataccactttttaaaaattcattcatctgttggacatttagattgttcccacctcttgg

SEQ ID NO: 26662 - DNA, 650 bp, Homo sapiens
  source 1..650: mol_type = unassigned DNA
ctttctttttgaggaagacgcggtcgtaagggctgaggatttttggtccgcacgctcctgctcctgactcaccgctgttcgctctcgccgaggaacaagtcggtcaggaagcccgcgcgcaacagccatggtgaggcggcagtcggcggcgggcggcgcaacgcagggctcgggcgccggggggaccccggtttcgagttcgtgctcctgagggcagatgccggggcgtgtaggggcggaaaggcgctcctgaaatggcttttaaggataccggaaaaacacccgtggagccggaggtggcaattcaccgaattcgaatcaccctaacaagccgcaacgtaaaatccttggaaaaggtgtgtgctgacttgataagaggcgcaaaagaaaagaatctcaaagtgaaaggaccagttcgaatgcctaccaagactttgagaatcactacaagaaaaactccttgtggtgaaggttctaagacgtgggatcgtttccagatgagaattcacaagcgactcattgacttgcacagtccttctgagattgttaagcagattacttccatcagtattgagccaggagttgaggtggaagtcaccattgcagatgcttaagtcaactattttaataaattgatgaccagttgttaa

SEQ ID NO: 26663 - DNA, 412 bp, Homo sapiens
  source 1..412: mol_type = unassigned DNA
ctcgccgaggcccctccttgcccgccgatatctctgccgggtgactagctgcttcctttctctctcggcgccgcgcggtgactccccaggcgcagcccagcctcgaaatgcagaacgacgccggcgagttcgtggacctgtacgtgccgcggaaatgctccgctagcaatcgcatcatcggtgccaaggaccacgcatccatccagatgaacgtggccgaggttgacaaggtcacaggcaggtttaatggccagtttaaaacttatgctatctgcggggccattcgtaggatgggtgagtcagatgattccattctccgattggccaaggccgatggcatcgtctcaaagaacttttgactggagagaatcacagatgtggaatatttgtcataaataaataatgaaaacct

SEQ ID NO: 26664 - DNA, 340 bp, Homo sapiens
  source 1..340: mol_type = unassigned DNA
cgcggtgtggtggcagcaggcgcagcccagcctcgaaatgcagaacgacgccggcgagttcgtggacctgtacgtgccgcggaaatgctccgctagcaatcgcatcatcggtgccaaggaccacgcatccatccagatgaacgtggccaggttgacaaggtcacaggcaggtttaatggccagtttaaaacttatgctatctgcggggccattcgtaggatgggtgagtcagatgattccattctccgattggccaaggcgatggcatcgtctcaaagaacttttgactggagagaatcacagatgtggaatatttgtcataaataaataatgaaaacct

SEQ ID NO: 26665 - DNA, 395 bp, Homo sapiens
  source 1..395: mol_type = unassigned DNA
cttgcccgccgatatctctgccgggtgactagctgcttcctttctctctcgcgcgcggtgtggtggcagcaggcgcagcccagcctcgaaatgcagaacgacgccggcgagttcgtggacctgtacgtgccgcggaaatgctccgctagcaatcgcatcatcggtgccaaggaccacgcatccatccagatgaacgtggccgaggttgacaaggtcacaggcaggtttaatggccagtttaaaacttatgctatctgcggggccattcgtaggatgggtgagtcagatgattccattctccgattggccaaggccgatggcatcgtctcaaagaacttttgactggagagaatcacagatgtggaatatttgtcataaataaataatgaaaacct

SEQ ID NO: 26666 - DNA, 1002 bp, Homo sapiens
  source 1..1002: mol_type = unassigned DNA
cggcgccgcgcggtgactccccaggcgcagcccagcctcgaaatgcagaacgacgccggcgagttcgtggacctgtacgtgccgcggaaatgctccgctagcaatcgcatcatcggtgccaaggaccacgcatccatccagatgaacgtggccgaggtgagctgggagcccgggaggcgggaaggttgtgatatatgtgcgggaaaggcaggctgtcccattgtggaggagcccctggggtgaaggtacaggcagaggctggctttgaggattggtgtttcccaaacctgggggagtggtttgtgacccttcttctctttctaggttgacaaggtcacaggcaggtttaatggccagtttaaaacttatgctatctgcggggccattcgtaggatggtgagtgtttccctgggctttgctcatcacttcgggacatcgtggactttaccgtgcgcattggagtgtgtgatggtgcctgagtagatctgctggcagagtagtttgagccagctggactgggctggccgcctgccgcttcttgagggtggaagaggggtgctctgagaagacactcaggcagcagactctgcctctcactaggaggtgcccccccgaccccgctccaccatagtcaggctgcaggctgccccgggagaggtggctccccttctgcgcctgtctccattcgctcagcgggggagagacgtgggctggtggcacagctgaccttctgccatctcaggcagccggagtggaaatattcttagtgtgcttttttttttttcttaagggtgagtcagatgattccattctccgattggccaaggccgatggcatcgtctcaaagtaaggttgggggctcacatttgggcagagtgagtggactaggactgctccagaggcgtggtcttaacgttgtccttttcccctggttctaggaacttttgactggagagaatcacagatgtggaatatttgtcataaataaataatgaaaaccta

SEQ ID NO: 26667 - DNA, 494 bp, Homo sapiens
  source 1..494: mol_type = unassigned DNA
ctcgccgaggcccctccttgcccgccgatatctctgccgggtgactagctgcttcctttctctctcggcgccgcgcggtgactccccaggcgcagcccagcctcgaaatgcagaacgacgccggcgagttcgtggacctgtacgtgccgcggaaatgctccgctagcaatcgcatcatcggtgccaaggaccacgcatccatccagatgaacgtggccgaggttgacaaggtcacaggcaggtttaatggccagtttaaaacttatgctatctgcggggccattcgtaggatggtgagtgtttccctgggctttgctcatcacttcgggacatcgtggactttaccgtgcgcattggagtgtgtgatggtgcctgagtagatctgctggcagagtagtttgagccagctggactgggctggccgcctgccgcttcttgagggtggaagaggggtgctctgagaagacactcaggcagcagactctgcctctcac

SEQ ID NO: 26668 - DNA, 418 bp, Homo sapiens
  source 1..418: mol_type = unassigned DNA
caggcgcagcccagcctcgaaatgcagaacgacgccggcgagttcgtggacctgtacgtgccgcggaaatgctccgctagcaatcgcatcatcggtgccaaggaccacgcatccatccagatgaacgtggccgaggttgacaaggtcacaggcaggtttaatggccagtttaaaacttatgctatctgcggggccattcgtaggatgggtgagtcagatgattccattctccgattggccaaggccgatggcatcgtctcaaagtaaggttgggggctcacatttgggcagagtgagtggactaggactgctccagaggcgtggtcttaacgttgtccttttcccctggttctaggaacttttgactggagagaatcacagatgtggaatatttgtcataaataaataatgaaaacct

SEQ ID NO: 26669 - DNA, 3437 bp, Homo sapiens
  source 1..3437: mol_type = unassigned DNA
tcaaaagaaaaagggggaaaaaaaaccatgcaaattagatatctctgaatttcttgcaaattaaataagacgcagattctggctcaggaaagtgatgcaaacgcgtcgttttcaaaggagagaccccagcctcgggtcaggcgcggcgcagacagcggcgcggggtccttggctgggcggggcttgctcgcggtggcttgtggctccttcctgcggtgcttctctctttcgctcaggcccgtggcgccgacaggatgggcaagtgtcgtggacttcgtactgctaggaagctccgtagtcaccgacgagaccagaagtggcatgataaacagtataagaaagctcatttgggcacagccctaaaggccaacccttttggaggtgcttctcatgcaaaaggaatcgtgctggaaaaagtaggagttgaagccaaacagccaaattctgccattaggaagtgtgtaagggtccagctgatcaagaatggcaagaaaatcacagcctttgtacccaatgacggttgcttgaactttattgaggaaaatgatgaagttctggttgctggatttggtcgcaaaggtcatgctgttggtgatattcctggagtccgctttaaggttgtcaaagtagccaatgtttctcttttggccctatacaaaggcaagaaggaaagaccaagatcataaatattaatggtgaaaacactgtagtaataaattttcatatgccaaaaaatgtttgtatcttactgtcccctgttctcaccacgaagatcatgttcattaccaccaccacccccccttattttttttatcctaaaccagcaaacgcaggacctgtaccaattttaggagacaataagacagggttgtttcaggattctctagagttaataacatttgtaacctggcacagtttccctcatcctgtggaataagaaaatgggatagatctggaataaatgtgcagtattgtagtattactttaagaactttaagggaacttcaaaaactcactgaaattctagtgagatactttcttttttattcttggtattttccatatcgggtgcaacacttcagttaccaaatttcattgcacatagattatcttaggtacccttggaaatgcacattcttgtatccatcttacaggggcccaagatgataaatagtaaactcaaaattgctccccactctgtttattatttaaaggtgtcaggatctgtgttgtaatgtgtctacattaatgtgtttaggagaatacaggcattggatcatttagttgatggaagtatatgccaggcaagggagataaggtatacgacaagactgatgttttcagtatcttctcatgaggttgtcagagaccttcatgtcttcaaagactagtcagcaaatgaagtggtttagtgtagagacaagattggttgtgttttgataatttaagctaggtattgagtacatgtggattttgctgtccacaaatacttgtttcagagttttcatggatacagtggcatggttgaaatgaagctgtgagccttctgctttaaatctgatgtaagaaactcctgttaacaaatagtaagtatgggttaattagccctttgatcaaagcctagctttacattgtttaggatctttggaaaacaattggtttggttgcccactttccgtaggatcaagagcagaacctttcacatggcacagaagaacccaggttgcgcttcatacctgcatattccagccttagcctgccatttctctccttggcactttgtgctccagcaacactggtctcagttggtcatcctcaaacttgggttccatatccagcctcaggacctctgttcctgttactatggttccttgcatgtcgcctgctcttactaaagagctcgtgtgttttccagcacacttcggtttatctcttgatgatgatgctagtctctccctccgcaagggcggaaaggctgcctgttggtttgtaccagtgtttcctaacgtgtagctgcagtcagtatttggctaagctgttcccaggggctcaacagatgctttcggatgagccttaactgacccaatcctttgtgatgcgggagagattgctaggcctcgctcacctggccagaaccagggaaagaggccgcggttgcagcgcgattccaggccctgggcgtcaggcgcggggtgggcagctctccccgggcggtggggcccttgtgaccgcgaggcggggcgcaccaggaagggagtgggacagcgcgggcgcccagggatgtggcctggttacctgccttctctgatacgtcaagacaccttcaacaatggcttgcagctgtaccctgttggctgcacccaggacgcccttttcactgctaagcagtcctacctgaggcccaggggctgccagattgacccataaataatctccggcgcctcagatccagaagctgctgagcctgatcttagtgccttctcctttctctgtgtggccccccagcccctttccccactgccttgtgtccaaggccctttccttcatgtatccatggaggagagacaaaaatacacatcaataaaataagatagggaatccataaatagacattcagaagtatggccaacggatttatcttaaaaccaatggaggaagaagagtttcaataaatgttgtggacttccatttgtcaaagaccaaaacaaaggaaccccaaccttacatgtaatacaaacttaactcaaaatggatcatatatctaaatgtaaaatggaaagctataaaactgaaaacagactatctttacaacctaggcgtaggtatagtttttagacattacaccaaaagcacatgccgtaaaagaaaaaatagataaattggtggatttcattaaaattaaaaaactttttctctctgaaaaatcctgttaagctgggcgctgtggttcatgcctgtaatcccagcactttgggaggctgagttgggaagaaattaatagcttgaggccaggagttcaagatcatcctgggcagcaaagtcatacactcttgagggaagagagagaccttctcatattgttttatattgttttatactcagtacctgttttaagaaaaaaacaaggaagtgaaatcaaagacaggcagcccggcaccaggcctgaaaccagccctgggcctgcctggcctaaacctagtagttaaaaatcaacttacgacttagaacctgatgttatccgtagattccaagcattgtataaaaaaattgtgaaactccctgttgtgttctgtaccagtgcatgaaacccctgtcacatatcccctagattgctcaatcaatcacgaccctttcatgtgaaatctttagtgttgtgagcccttaaaagggacagaaattgtgcacttgaggagctcagattttaaggctgtagcttg

SEQ ID NO: 26670 - DNA, 514 bp, Homo sapiens
  source 1..514: mol_type = unassigned DNA
ctgaagatagatcgccatcatgaacgacaccgtaactatccgcactagaaagttcatgaccaaccgactacttcagaggaaacaaatggtcattgatgtccttcaccccgggaaggcgacagtgcctaagacagaaattcgggaaaaactagccaaaatgtacaagaccacaccggatgtcatctttgtatttggattcagaactcattttggtggtggcaagacaactggctttggcatgatttatgattccctggattatgcaaagaaaaatgaacccaaacatagacttgcaagacatggcctgtatgagaagaaaaagacctcaagaaagcaacgaaaggaacgcaagaacagaatgaagaaagtcagggggactgcaaaggccaatgttggtgctggcaaaaagtgagctggagattggatcacagccgaaggagtaaaggtgctgcaatgatgttagctgtggccactgtggatttttcgcaagaacattaataaactaaaaacttca

SEQ ID NO: 26671 - DNA, 510 bp, Homo sapiens
  source 1..510: mol_type = unassigned DNA
cttttcctccttggctgtctgaagatagatcgccatcatgaacgacaccgtaactatccgcactagaaagttcatgaccaaccgactacttcagaggaaacaaatggtcattgatgtccttcaccccgggaaggcgacagtgcctaagacagaaattcgggaaaaactagccaaaatgtacaagaccacaccggatgtcatctttgtatttggattcagaactcattttggtggtggcaagacaactggctttggcatgatttatgattccctggattatgcaaagaaaaatgaacccaaacatagacttgcaagacatggcctgtatgagaagaaaaagacctcaagaaagcaacgaaaggaacgcaagaacagaatgaagaaagtcagggggactgcaaaggccaatgttggtgctggcaaaaagccgaaggagtaaaggtgctgcaatgatgttagctgtggccactgtggatttttcgcaagaacattaataaactaaaaacttca

SEQ ID NO: 26672 - DNA, 557 bp, Homo sapiens
  source 1..557: mol_type = unassigned DNA
cttttcctccttggctgtctgaagatagatcgccatcatgaacgacaccgtaactatccgcactagaaagttcatgaccaaccgactacttcagaggaaacaaatggtcattgatgtccttcaccccgggaaggcgacagtgcctaagacagaaattcgggaaaaactagccaaaatgtacaagaccacaccggatgtcatctttgtatttggattcagaactcattttggtggtggcaagacaactggctttggcatgatttatgattccctggattatgcaaagaaaaatgaacccaaacatagacttgcaagacatggcctgtatgagaagaaaaagacctcaagaaagcaacgaaaggaacgcaagaacagaatgaagaaagtcagggggactgcaaaggccaatgttggtgctggcaaaaagcagaaatgaagtgtctagcagtgagctggagattggatcacagccgaaggagtaaaggtgctgcaatgatgttagctgtggccactgtggatttttcgcaagaacattaataaactaaaaacttcatgtg

SEQ ID NO: 26673 - DNA, 656 bp, Homo sapiens
  source 1..656: mol_type = unassigned DNA
aggcatcggcgcggtcagcctcgtggcgcgcccacgcccccacgccggctcttcccggggtccttccgtgcgcgttgatatgattggccggcgaatcgtggttctcttttcctccttggctgtctgaagatagatcgccatcatgaacgacaccgtaactatccgcactagaaagttcatgaccaaccgactacttcagaggaaacaaatggtcattgatgtccttcaccccgggaaggcgacagtgcctaagacagaaattcgggaaaaactagccaaaatgtacaagaccacaccggatgtcatctttgtatttggattcagaactcattttggtggtggcaagacaactggctttggcatgatttatgattccctggattatgcaaagaaaaatgaacccaaacatagacttgcaagacatggcctgtatgagaagaaaaagacctcaagaaagcaacgaaaggaacgcaagaacagaatgaagaaagtcagggggactgcaaaggccaatgttggtgctggcaaaaagcagtgagctggagattggatcacagccgaaggagtaaaggtgctgcaatgatgttagctgtggccactgtggatttttcgcaagaacattaataaactaaaaacttcatgtgtctggttgtttg

SEQ ID NO: 26674 - DNA, 2814 bp, Homo sapiens
  source 1..2814: mol_type = unassigned DNA
aggcatcggcgcggtcagcctcgtggcgcgcccacgcccccacgccggctcttcccggggtccttccgtgcgcgttgatatgattggccggcgaatcgtggttctcttttcctccttggctgtctgaagatagatcgccatcatgaacgacaccgtaactatccgcactagaaagttcatgaccaaccgactacttcagaggaaacaaatggtcattgatgtccttcaccccgggaaggcgacagtgcctaagacagaaattcgggaaaaactagccaaaatgtacaagaccacaccggatgtcatctttgtatttggattcagaactcattttggtggtggcaagacaactggctttggcatgatttatgattccctggattatgcaaagaaaaatgaacccaaacatagacttgcaagacatggcctgtatgagaagaaaaagacctcaagaaagcaacgaaaggaacgcaagaacagaatgaagaaagtcagggggactgcaaaggccaatgttggtgctggcaaaaagatgagggaattggggcttggagtgcaagcattgggaagaatttcccaggaagagagatgcacagatgtgaagaactcgaaggcaagagaaagccggggggttgtgtggcaggtagaagtgccaggaccgtggagcgtgtggacatgtggcagattgcggaggggctgtggcaagtatttacaggtggccgttacctggaggaagactgaaaacagagaacagtgctgccaggcgtgccttttggagagggcactggtcagaaacggagccttcatgtcgcctgcctcacctgctcctgctggttctccccaccctgtggacggtgacttggtcctccacttgccagaagccttgtcagcaaccttgactctgtcaccccacatccaggccatcaacaagtcttttggccctttctttgaaatccaccaggaatccagctgcttctccccaccttcctgcctctctggtctgggccactaatgtcactgccatggccgccttgctgcatttctgaggatgcttcatctctccaccttcttctccactcagcagccagcagggcactgtggaaatcggagtcacatgagctggcacctctgttcagaaccctccagggctccacatctctctcacccaaatgccaaagacctccccacgcccccacaatcccccacgacctggccactggcctcccaccaccttccagctccagcggctcctaccacatttaaggctttccttcctagttttaatttttcctcgtcagcagttgattttattattttcttgtttattggtattttcccactagaaatgaagctgcgtgaagttagagatttttttttttggtctgtgttcctaattagctcattgctatacccctggcgcccagaacaatgccttggacacagtacgcagtagactaaataaatacttgttgaatgactgactgacggaatgacggctgtgtggggagtggattgggtcgtgaggcagaggctgcggtggaaactcaggcaggaggtgatggtggttcttggggctgcggaatgccaagtttagaagctcttcctctgctgtggcacatgaaccggtcactcgagaaggcttttagatttactttgcctaatcccctcttagtgcatgtggggaaactgaggtacacaaaaggaattccccaccaagttaggggcagaacctagcccccttgtctcccagatggatatcttcttttttttttgagacggagtcttgctctgttgcccaggctggagtgcagtggtaccatcttggctcactgcaacctctgcttcccaggttcaagcgattctcctgcctcagcctcctgagtgtctgcgattacaggtgcacacaaccacgcctggctaatttttgtatttttagtagagacggggtttcaccgtgttggtcagggtgacctcaaactcctgacctcatgatccacccagctcagcctcccaacgtgctgggattacaggcatgagccaccgtgcctggctggacatcttgttattaaagcttcttctctctttgtaggggagggggagatgcctctggtggagaagaccagtgtggcagtgactgtgtctgttagtgaacctggtggctggttgagggtctgtcgtggtgactgaggacacatacaaagtgcttttctcagtggtcaccttggtgttggtgaataagggtcagaagatggctcctgtcctagggcactgccagtcggtttggaagctgaaatgcctgcttagcagtttgaggaaacacagaccttggaggatcttctggttgcctcttcaagaattcattctattccccttctgctccccaaatttgcttttcttggggtgggtcttggttggcctaagccaagaaagtatggcatctactccttccatagcaatagctcaggaataggcagtgacccagacctgaaccaatcagtgcatggaattacccctggccaaagtggttgattgaggctgggtgcaagcagagttgtgagaaggctcccatttggtggttggagagatcgcacttgctccagaggtcataatgtgcagatctgaggcttggaactgctgcagacattttgctaccacaagtgaagccaccctgacgacacagttgacaatttggagcagggcagagctgagagaacagcagggaaacagccagagtcttgctcaagcctccctgaagtatctatacccctggactctagttatgggggctaataaatgttatatactgtttaaggt

SEQ ID NO: 26675 - DNA, 835 bp, Homo sapiens
  source 1..835: mol_type = unassigned DNA
tcctcctcctcctcccgcgccccccgtgcagccacctgctgcacttgcgcactgggagcgacacgctcgggcataagtagtgccggaaagttagctgccgagacctggtggattgcttttcgtttatcagtgcaggaaaacagcgctatagtatgcgtcacaactagcgcagactccggcagtatttaggcggtgcggcttgggaactagaatccacttcctgtcttccgcctcaggctagagggcgagcgcttcgccgtgggacttcttctgcctggctccgccttttgccccggaagtactcacagcggacggtggtttttgggcccgtttctgagcagcgcttcctttttgtccgacatcttgacgaggctgcggtgtctgctgctattctccgagcttcgcaatgccgcctaaggacgacaagaagaagaaggacgctggaaagtcggccaagaaagacaaagacccagtgaacaaatccgggggcaaggccaaaaagaagaagtggtccaaaggcaaagttcgggacaagctcaataacttagtcttgtttgacaaagctacctatgataaactctgtaaggaagttcccaactataaacttataaccccagctgtggtctctgagagactgaagattcgaggctccctggccagggcagcccttcaggagctccttagtaaaggacttatcaaactggtttcaaagcacagagctcaagtaatttacaccagaaataccaagggtggagatgctccagctgctggtgaagatgcatgaataggtccaaccagctgtacatttggaaaaataaaactttattaaatcaaa

SEQ ID NO: 26676 - DNA, 840 bp, Homo sapiens
  source 1..840: mol_type = unassigned DNA
ctgcatcgtccagaattgcttccgagtcggcgcggcgcaaggcttgctgggagacacataacctcgattttcttccgccatccggctaaatagtcccatgtgcactttgttccatggataaataaacactaggaacgcatttccaccctagatttcagcagaaatgctgaatgtaaaggaatatttgagtaaagtgagttgccgttcttgaagcccgtctcctaaggattctcccggtgtccgcgtagggatctcatgctatataggagggccctgccaggcaccgtctcctctctccggtccgtgcctccaagatgacaaagaaaagaaggaacaatggtcgtgccaaaaagggccgcggccacgtgcagcctattcgctgcactaactgtgcccgatgcgtgcccaaggacaaggccattaagaaattcgtcattcgaaacatagtggaggccgcagcagtcagggacatttctgaagcgagcgtcttcgatgcctatgtgcttcccaagctgtatgtgaagctacattactgtgtgagttgtgcaattcacagcaaagtagtcaggaatcgatctcgtgaagcccgcaaggaccgaacacccccaccccgatttagacctgcgggtgctgccccacgtcccccaccaaagcccatgtaaggagctgagttcttaaagactgaagacaggctattctctggagaaaaataaaatggaaattgtacttaatattgcatgttaagtgtatctgtgccagataaggtggggattttgtgtgttagaccaagtgtgaagtgacacacattattttcatggggaagaaagcttattcatgtaa

SEQ ID NO: 26677 - DNA, 623 bp, Homo sapiens
  source 1..623: mol_type = unassigned DNA
ggcttgctgggagacacataacctcgattttcttccgccatccggctaaatagtcccatgtgcactttgttccatggataaataaacactaggaacgcatttccaccctagatttcagcagaaatgctgaatgtaaaggaatatttgagtaaagtgagttgccgttcttgaagcaccgtctcctctctccggtccgtgcctccaagatgacaaagaaaagaaggaacaatggtcgtgccaaaaagggccgcggccacgtgcagcctattcgctgcactaactgtgcccgatgcgtgcccaaggacaaggccattaagaaattcgtcattcgaaacatagtggaggccgcagcagtcagggacatttctgaagcgagcgtcttcgatgcctatgtgcttcccaagctgtatgtgaagctacattactgtgtgagttgtgcaattcacagcaaagtagtcaggaatcgatctcgtgaagcccgcaaggaccgaacacccccaccccgatttagacctgcgggtgctgccccacgtcccccaccaaagcccatgtaaggagctgagttcttaaagactgaagacaggctattctctggagaaaaataaaatggaaattgtacttaa

SEQ ID NO: 26678 - DNA, 350 bp, Homo sapiens
  source 1..350: mol_type = unassigned DNA
gctcctttccggcggtgacgacctacgcacacgagaacatgcctctcgcaaaggatctccttcatccctctccagaagaggagaagaggaaacacaagaagaaacgcctggtgcagagccccaattcctacttcatggatgtgaaatgcccaggatgctataaaatcaccacggtctttagccatgcacaaacggtagttttgtgtgttggctgctccactgtcctctgccagcctacaggaggaaaagcaaggcttacagaaggatgttccttcaggaggaagcagcactaaaagcactctgagtcaagatgagtgggaaaccatctcaataaacacattttggataaa

SEQ ID NO: 26679 - DNA, 625 bp, Homo sapiens
  source 1..625: mol_type = unassigned DNA
cctttccggcggtgacgacctacgcacacgagaacatgcctctcgcaaaggatctccttcatccctctccagaagaggagaagaggaaacacaagaagaaacgcctggtgcagagccccaattcctacttcatggatgtgaaatgcccaggtgaggagacggcttgctgtagtggggaaagcactggacctcaacagttggaaaatgttgtagtgttagctgtctcgtatccttgaagctgtgcagcagcttcagtttcttcgcctgtggaaaatattttccctgatactcttaaaatttgaatgtatgagactggcaaagttttgcatcttaggaggagtgattcatttcaccgtgatctctcatcacatttcacatacaacccctacgtttttttgtgttgggaaacaatgtaatggatgatgagttgggcataagtgcaggaaagacgggtgtaatagaggaaaaaaatgttatctgcttttctttcaggatgctataaaatcaccacggtctttagccatgcacaaacggtagttttgtgtgttggctgctccactgtcctctgccagcctacaggaggaaaagcaaggcttacagaaggtaaatggtttactaatgtgat

SEQ ID NO: 26680 - DNA, 1344 bp, Homo sapiens
  source 1..1344: mol_type = unassigned DNA
ccgggggctgagcggcccgccgggttccggggtggcgccggccccggtggccgcgggcgctccctcgccatggcctaagcccgaggccgctccccagccagattctggcctcaggcactgcagagcccgcggcgctcgccaacaagcccgttagacccacgggacttggcaccctggaacgctcaccatccccgggtcttccctgcgccctggacccgagtaccctgctgcggcgtccccctaccaccgagaggagggcctagagcagacaagcccgccccgccgctcctcccagcagcttctatcccggaagttgatgccgagcgcagatcgcttgcagcttgctagctgtgtgggctgggaggtctggtagggctgagcttgcaagaggatcaacatgcctttggctagagatttactacatccgtccttggaagaggaaaagaaaaaacataaaaagaaacgcctagtacaaagtccaaattcttactttatggatgtaaaatgtccaggttgctacaagatcaccacggttttcagccatgctcagacagtggttctttgtgtaggttgttcaacagtgttgtgccagcctacaggaggaaaggccagactcacagaagggtgttcatttagaagaaagcaacactaatgattcaaacagcttcctgaattttaattttgtgttgtctcacagaaagccttatcataaattccataattctaattaatttaccaagataatgtaattacatttggttttgtaaggtatacagcagtaatctcctattttggtgtcagtttttcaataaagttttgattatgggcaaatcccctctttttctttttttaaaatatatttgagtatgccatacatttatatatatggtgtatatgaatttggtttaaacattttaaaatttattctgattagtttgtgtctttttttttttttttgagagagagagtcctgctctgtcactcaagctggagtgcagtggtgcgatctcggctcactgcaacctccgcctcccaggtccaagcaattctcttgccttgtcctcccaagtagctgggattataggcacacaccaccatgcctggctaatttgtgtctcattttcaagagtagaaaccctaaatattttattttcattccttttccaaattgctatgaatgggattaaaggattacagatgtaaagtctattatttgtgaattctaaatgtagttctgctgttgtacctgtggaaacatcttaaagaagtacatattttgcacgtcctgcacgtgtaccccagaacttaaactataattaaaaagaatagtttcaaaaaaataca

SEQ ID NO: 26681 - DNA, 528 bp, Homo sapiens
  source 1..528: mol_type = unassigned DNA
agaacaaagcaaacctaaggcacagccataccccgcagaaaacttcgaaatctgcgccttgaaaagggaagccaaaaggatacgagcctctttcataatctctctgttggctagagatttactacatccgtccttggaagaggaaaagaaaaaacataaaaagaaacgcctagtacaaagtccaaattcttactttatggatgtaaaatgtccaggttgctacaagatcaccacggttttcagccatgctcagacagtggttctttgtgtaggttgttcaacagtgttgtgccagcctacaggaggaaaggccagactcacagaagggtgttcatttagaagaaagcaacactaatgattcaaacagcttcctgaattttaattttgtgttgtctcacagaaagccttatcataaattccataattctaattaatttaccaagataatgtaattacatttggttttgtaaggtatacagcagtaatctcctattttggtgtcagtttttcaataaagttttgattatg

SEQ ID NO: 26682 - DNA, 923 bp, Homo sapiens
  source 1..923: mol_type = unassigned DNA
aggttgcgcagcgtcttcgcgcgtggcgggcatgtagtgacttgcccggtcaccgcggcgcggctggccctgcaggggcgtgggctgcaattcagaggcggtggctgggaggggaacagttctctgtgtagcttatgagcggtcttggtctttgaggatgcccctgaggttgtgatctttgggtcttttggctttcccagtgattggtgtttctcgccccctctgccttctttcggaagcgatttcctacttgttttccttttttaaaaactgtcctcgttgttgccttatatattaattccgtcaaggacggtcgctcagcaagaattcctgtcagatcagctgttgagccacaggagcaaaaatcacccaggcgctgacgttgtctggtctacttcagcagtttctactctaagcgagtccacagtcggggtcactttctttgcttagcacctcgacttcgcgcagttttcatcgaagacagttcattacgcattggctagagatttactacatccgtccttggaagaggaaaagaaaaaacataaaaagaaacgcctagtacaaagtccaaattcttactttatggatgtaaaatgtccaggttgctacaagatcaccacggttttcagccatgctcagacagtggttctttgtgtaggttgttcaacagtgttgtgccagcctacaggaggaaaggccagactcacagaagggtgttcatttagaagaaagcaacactaatgattcaaacagcttcctgaattttaattttgtgttgtctcacagaaagccttatcataaattccataattctaattaatttaccaagataatgtaattacatttggttttgtaaggtatacagcagtaatctcctattttggtgtcagtttttcaataaagttttgattatgggcaaa

SEQ ID NO: 26683 - DNA, 681 bp, Homo sapiens
  source 1..681: mol_type = unassigned DNA
aggacaaagtttgccttaccatatgtttcctgatcgtgcgaaagcccttttctagggacttggagaacacaagtattatgaaaagtactgatgaaagttattaacaggtttcgaaaaataactttactatctgacgtgttgcttctgccgaggatgaccgttattcctgtttttgcatgtatatttcacgtatggttaaatgtgccagcgttgtggtttaaaactaatagtaataatatgcttctttgttcagttggctagagatttactacatccgtccttggaagaggaaaagaaaaaacataaaaagaaacgcctagtacaaagtccaaattcttactttatggatgtaaaatgtccaggttgctacaagatcaccacggttttcagccatgctcagacagtggttctttgtgtaggttgttcaacagtgttgtgccagcctacaggaggaaaggccagactcacagaagggtgttcatttagaagaaagcaacactaatgattcaaacagcttcctgaattttaattttgtgttgtctcacagaaagccttatcataaattccataattctaattaatttaccaagataatgtaattacatttggttttgtaaggtatacagcagtaatctcctattttggtgtcagtttttcaataaagttttgattatgggcaaa

SEQ ID NO: 26684 - DNA, 380 bp, Homo sapiens
  source 1..380: mol_type = unassigned DNA
ctctccgccagaccgccgccgcgccgccatcatggacaccagccgtgtgcagcctatcaagctggccagggtcaccaaggtcctgggcaggaccggttctcagggacagtgcacgcaggtgcgcgtggaattcatggacgacacgagccgatccatcatccgcaatgtaaaaggccccgtgcgcgagggcgacgtgctcacccttttggagtcagagcgagaagcccggaggttgcgctgagcttggctgctcgctgggtcttggatgtcgggttcgaccacttggccgatgggaatggtctgtcacagtctgctccttttttttgtccgccacacgtaactgagatgctcctttaaataaagcgtttgtgtttcaagtt

SEQ ID NO: 26685 - DNA, 1160 bp, Homo sapiens
  source 1..1160: mol_type = unassigned DNA
ctctccgccagaccgccgccgcgccgccatcatggacaccagccgtgtgcagcctatcaagctggccagggtcaccaaggtcctgggcaggaccggttctcagggacagtgcacgcaggtaatcgggtgggggcatttggccgactgccggcgacctaaaccctgatgtgacctctaccctgccctaacccctgccagccggaatccgggagccgattctcatttcatcacggggttctgatggttccctttaacgatctgtattctggccccgacacgttctctgaattcatatctgcttcccactccgcggtgcctttccgcggcccgcccttacttcttcctccactccggtggggacccgtaggtgcgcgtggaattcatggacgacacgagccgatccatcatccgcaatgtaaaaggccccgtgcgcgagggcgacgtgctcacccttttggagtcagagcgagaagcccggaggttgcgctgagcttggctgctcgctgggtcttggatgtcgggttcgaccacttggccgatgggaatggtctgtcacagtctgctccttttttttgtccgccacacgtaactgagatgctcctttaaataaagcgtttgtgtttcaagttaactcaggttcttgtctgggttatacgactagggtttctccaggtttcttgagtggctcccaggcggtcaccgatcctccgcactctggaaatcctggccgtgcggtcttgccaaacgaagcttttcctttttgaggcggggggtcgtgtttgtcgattgcaccctctaccccaaacaaaacacaagcgtagtaggaatgttttattagcaaagaagtttcagagagtgggtggatcagggctctatcacttggtccccacctcaccttggtggggccagagtgagccccttcctgccacagtcaccccaactgaaattgcctttctcttcggccagtgttagcctctgagcaggggaccctggacccttctgtgcgccaaaggctgaggtgactgacgaggagatctccccacagctaggtgtagtgagccagacgaggcagcttactgaacctgggggttctctccattgtcaccgcattctccttcaccaggtgtggctgtctgggagccagggggtgactcgctctg

SEQ ID NO: 26686 - DNA, 1288 bp, Homo sapiens
  source 1..1288: mol_type = unassigned DNA
ctctccgccagaccgccgccgcgccgccatcatggacaccagccgtgtgcagcctatcaagctggccagggtcaccaaggtcctgggcaggaccggttctcagggacagtgcacgcaggtgcgcgtggaattcatggacgacacgagccgatccatcatccgcaatgtaaaaggccccgtgcgcgagggcgacgtgctcacccttttggagtcagagcgagaagcccggaggttgcgctgagcttggctgctcgctgggtcttggatgtcgggttcgaccacttggccgatgggaatggtctgtcacagtctgctccttttttttgtccgccacacgtaactgagatgctcctttaaataaagcgtttgtgtttcaagttaactcaggttcttgtctgggttatacgactagggtttctccaggtttcttgagtggctcccaggcggtcaccgatcctccgcactctggaaatcctggccgtgcggtcttgccaaacgaagcttttcctttttgaggcggggggtcgtgtttgtcgattgcaccctctaccccaaacaaaacacaagcgtagtaggaatgttttattagcaaagaagtttcagagagtgggtggatcagggctctatcacttggtccccacctcaccttggtggggccagagtgagccccttcctgccacagtcaccccaactgaaattgcctttctcttcggccagtgttagcctctgagcaggggaccctggacccttctgtgcgccaaaggctgaggtgactgacgaggagatctccccacagctaggtgtagtgagccagacgaggcagcttactgaacctgggggttctctccattgtcaccgcattctccttcaccaggtgtggctgtctgggagccagggggtgactcgctctggagagaggggaaaagaggggggcctgctgcaatctccttgaggcaggaaacgtgggattcagccccagcctcacttagtggaggttcttttaccatggacccaggctgcctggtttgtatccaacctctgccccttctgacctggaagaggcgcttgaccttcctcccacatcccttccagtggggtgagtacaggtgttcctcagtttacaatgggttacattccggtgagtacatcataggttgaaagtattgcaagttgaaatgtgtttaatacacctaatctcccaaacatcacagcttagcatggtccatcttaagcttgttcagaacgccttagcctgtagttggggaaactcgtctaacacgaagcctgt

SEQ ID NO: 26687 - DNA, 296 bp, Homo sapiens
  source 1..296: mol_type = unassigned DNA
cttttacctcgttgcactgctgagagcaagatgggtcaccagcagctgtactggagccacccgcgaaaattcggccagggttctcgctcttgtcgtgtctgttcaaaccggcacggtctgatccggaaatatggcctcaatatgtgccgccagtgtttccgtcagtacgcgaaggatatcggtttcattaagttggactaaatgctcttccttcagaggattatccggggcatctactcaatgaaaaaccatgataattctttgtatataaaataaacatttgaaaaaacccttca

SEQ ID NO: 26688 - DNA, 1374 bp, Homo sapiens
  source 1..1374: mol_type = unassigned DNA
cttttacctcgttgcactgctgagagcaagatgggtcaccagcagctgtactggagccacccgcgaaaattcggccagggttctcgctcttgtcgtgtctgttcaaaccggcacggtctgatccggaaatatggcctcaatatgtgccgccagtgtttccgtcagtacgcgaaggatatcggtttcattaagaaagacctgagctgtcttccttggcactgcctatggaggtgacacccatctcctccatcatggccatcctgagaccgctcgcgaagcccaagatcatcaaaaagagcaccaagttcactgggaaccagtcagactgatatgtcaaaattaagggtaactggtggaaacacagaggtattaacaacagggttcatagaaggtttgagggccagatctatgcccaacattggttatgggagaaacaaaaagacaaagcacatactgcccagtggcttctggaagttcctggtccacaacgttaaggagctggaagtactgctggtgagcaacaaatcttactgtgttgagatcactcatgatgtttcttccaagaactgcaaagccatcttggaaagagcagcccaggtggtcatcagagtcaccaatgccaatgccagcctgcacagtgcagaaagtgaatagacagtgaatgtgtttgttttattggggtttaaataaaaccaataaaactgtaaaaacaaaaacaacaaaaaccagagaccctggcttttggacagttgttcgtgtggctaatgcccccaacagttttattttttaaaattttatttatgtattgtttttgagatgaagtcttcctctgactggagtgcagtgatgcaagctcagctctctgcaacttccacctcccaggttcaagtgattcttctgtctcagcctcccaagtggctgggattacaggtgcccactaccacacctgactaatttttgtatttttgtagagatggggtttcatcctcttggccaggctggtttcgaactcctgacctcaagggatcctcccacctcagcttcccaaagtgctgggatcacaggcttgtattagttcattttcacactgctgataaagacatacctaagactgggaagaaaaataggtttattggactcacagttccatgtggctggggatgcctcacaattatggtagaaggcaaaaggcacttcttagatggcagcggcaagcaggaaatgaggaagacatgaaagcagatatcccttataaaaccatcagttctcgtgatacttactcactaccatgagaaagtatgggggaaaccgctcccatgattcagttatctcccaccgggtccctctcacaacatgtggggattatgcgagtac

SEQ ID NO: 26689 - DNA, 907 bp, Homo sapiens
  source 1..907: mol_type = unassigned DNA
gcggagcgcggcggcaagatggcagtgcaaatatccaagaagaggaagtttgtcgctgatggcatcttcaaagctgaactgaatgagtttcttactcgggagctggctgaagatggctactctggagttgaggtgcgagttacaccaaccaggacagaaatcattatcttagccaccagaacacagaatgttcttggtgagaagggccggcggattcgggaactgactgctgtagttcagaagaggtttggctttccagagggcagtgtagagttgaaaataatggtgatggtaacaggatatcccttgcttcctttaaagctttatgctgaaaaggtggccactagaggtctgtgtgccattgcccaggcagagtctctgcgttacaaactcctaggagggcttgctgtgcggagggcctgctatggtgtgctgcggttcatcatggagagtggggccaaaggctgcgaggttgtggtgtctgggaaactccgaggacagagggctaaatccatgaagtttgtggatggcctgatgatccacagcggagaccctgttaactactacgttgacactgctgtgcgccacgtgttgctcagacagggtgtgctgggcatcaaggtgaagatcatgctgccctgggacccaactggtaagattggccctaagaagcccctgcctgaccacgtgagcattgtggaacccaaagatgagatactgcccaccacccccatctcagaacagaagggtgggaagccagagccgcctgccatgccccagccagtccccacagcataacagtttcttacttttgtgctttatttggtttcagggtctccttggcagctgtattctggagtctggatgttgctctctaaagacctttaataaaattttgtacaaagac

SEQ ID NO: 26690 - DNA, 866 bp, Homo sapiens
  source 1..866: mol_type = unassigned DNA
gcaagatggcagtgcaaatatccaagaagaggaagtttgtcgctgatggcatcttcaaagctgaactgaatgagtttcttactcgggagctggctgaagatggctactctggagttgaggtgcgagttacaccaaccaggacagaaatcattatcttagccaccagaacacagaatgttcttggtgagaagggccggcggattcgggaactgactgctgtagttcagaagaggtttggctttccagagggcagtgtagagctttatgctgaaaaggtggccactagaggtctgtgtgccattgcccaggcagagtctctgcgttacaaactcctaggagggcttgctgtgcggagggcctgctatggtgtgctgcggttcatcatggagagtggggccaaaggctgcgaggttgtggtgtctgggaaactccgaggacagagggctaaatccatgaagtttgtggatggcctgatgatccacagcggagaccctgttaactactacgttgacactgctgtgcgccacgtgttgctcagacagggtgtgctgggcatcaaggtgaagatcatgctgccctgggacccaactggtaagattggccctaagaagcccctgcctgaccacgtgagcattgtggaacccaaagatgagatactgcccaccacccccatctcagaacagaagggtgggaagccagagccgcctgccatgccccagccagtccccacagcataacaggtatgtctgcaagggcaggggcctcttggggcataatagggtccttccgagtctttctgttaatacttgtatcccacattctggtaagcgtttggtgaataaaaatttcatttatttgctttatgt

SEQ ID NO: 26691 - DNA, 1306 bp, Homo sapiens
  source 1..1306: mol_type = unassigned DNA
cggagcgcggcggcaagatggcagtgcaaatatccaagaagaggaagtttgtcgctgatggcatcttcaaagctgaactgaatgagtttcttactcgggagctggctgaagatggctactctggagttgaggtgcgagttacaccaaccaggacagaaatcattatcttagccaccagaacacagaatgttcttggtgagaagggccggcggattcgggaactgactgctgtagttcagaagaggtttggctttccagagggcagtgtagagctttatgctgaaaaggtggccactagaggtctgtgtgccattgcccaggcagagtctctgcgttacaaactcctaggagggcttgctgtgcggagggcctgctatggtgtgctgcggttcatcatggagagtggggccaaaggctgcgaggttgtggtgtctgggaaactccgaggacagagggctaaatccatgaagtttgtggatggcctgatgatccacagcggagaccctgttaactactacgttgacactgctgtgcgccacgtgttgctcagacagggtgtgctgggcatcaaggtgaagatcatgctgccctgggacccaactggtaagattggccctaagaagcccctgcctgaccacgtgagcattgtggaacccaaagatgagatactgcccaccacccccatctcagaacagaagggtgggaagccagagccgcctgccatgccccagccagtccccacagcataacagcctcttccatgagtggggagcccgctgcttgtctccagctcctagcagtgagtcctgataatctcaaatttaaggacagtaactttgtctgggatgagtgtgggaaaggatgtgtttgggaacagacgcgagcctgcagaggtgtttgtaaccatctctttctaagtggtgggaagcagacattttattctttaactgttaatatatatagtgtgtgttttttatgcatgaaatattttatagtttttaaaaatgcccacactactattttgaaagtaaatgaggtaatgtatgtgtcagaacccaatacccaaagcgatcgtagtaagaggtggggcctttgggaaggcattaaattgcttagggaatgagggtggaaccctcatgaatgagattagagccttataggagaggttggagggagttgcctggcctccctctcccatgtgaagactcagcaagaaaacattatttaggaagcagagagccctcatcaaacaccagatctgctggccacctgatctggcactttccagccttcagaactgtgagaa

SEQ ID NO: 26692 - DNA, 2097 bp, Homo sapiens
  source 1..2097: mol_type = unassigned DNA
cctttatactcacttccgcccgcgagccacttcctttcctttcagcggagcgcggcggcaagatggcagtgcaaatatccaagaagaggaagtttgtcgctgatggcatcttcaaagctgaactgaatgagtttcttactcgggagctggctgaagatggctactctggagttgaggtgcgagttacaccaaccaggacagaaatcattatcttagccaccagaacacagaatgttcttggtgagaagggccggcggattcgggaactgactgctgtagttcagaagaggtttggctttccagagggcagtgtagagctttatgctgaaaaggtggccactagaggtctgtgtgccattgcccaggcagagtctctgcgttacaaactcctaggagggcttgctgtgcggagggcctgctatggtgtgctgcggttcatcatggagagtggggccaaaggctgcgaggttgtggtgtctgggaaactccgaggacagagggctaaatccatgaagtttgtggatggcctgatgatccacagcggagaccctgttaactactacgttgacactgctgtgcgccacgtgttgctcagacagggtgtgctgggcatcaaggtgaagatcatgctgccctgggacccaactggtaagattggccctaagaagcccctgcctgaccacgtgagcattgtggaacccaaagatgagatactgcccaccacccccatctcagaacagaagggtgggaagccagagccgcctgccatgccccagccagtccccacagcataacagggtctccttggcagctgtattctggagtctggatgttgctctctaaagacctttaataaaattttgtacaaagacacaaggtctgactagactgttcagtattcagactgaggggcatgttggcctctggagcattacatatcttcttggttttaaccatacttgtggtatttgcaagggccagaacagtaagacccaagcagagccaaccagagaaataatatttgtgtgatagagaaggctgatagcaagcaaggcagcaccttgattcgttgtcctgtagttcaggattgtaggtttagaagagggatatgtttgagtttttcctatgcataaggcgatccacgttgcacatagaaagtgaatataaatggccattatattttgtgtcatgctgtgctctaagtgttctttacatatgtactcgttaatcaacctctctaaagtgtaaaggaaatttgcttgcaccactgaaggcacataaggctcagaagtaaatttgcctaagcagtataaagctatcattagaatccacattcctaagttgtgttctcttaggggatcatggaaccagtcattggtactacaggctattatgttctggagaactgtgaagaacatttaaattgtctctgattttatctatcaatgttttgaagtattttctaccagtgtctgtacttcacaagaaattcggcactattttttcaggcaaaactagtgagggacaggttggcttgaaaatcatgagactgttgttaaatcagatgctggttgatcacagaggggacttccagggaaagctgttatcaggtggctgcttcctggtgatgcagcctggctgatgagataaccctggctccacagatggcttagcaggtgctgtgatgatttggttttcttctcaattagactgagctgcacatggtgtttatattgcttggcacatggtaagggcttaatatttgaggtaattatgtagggcgtacactgacaagtatctgacccccccttcctttttgactcataaattggtcatcttaaccatttaagtgtacacttctatagtgacagagttagccctctgtccaagggatttgcatctgtggattcaaccaactttgggtcaaaaataatcaaaaaggatggttgtgtgtgtattgaacatgtagacttatttttcttattttcaaaatactatattttcttgtcacttattttcttgtacactgcagttgtaacagctatgtagcatgtacattaggtattaaaagtaatccagtgaagattgaaagtctaa

SEQ ID NO: 26693 - DNA, 934 bp, Homo sapiens
  source 1..934: mol_type = unassigned DNA
tagacggcgcgccccgcccccgtacgcctaagttctcgcgcgactcccacttccgcccttttggctctctgaccagcaccatggcggttggcaagaacaagcgccttacgaaaggcggcaaaaagggagccaagaagaaagtggttgatccattttctaagaaagattggtatgatgtgaaagcacctgctatgttcaatataagaaatattggaaagacgctcgtcaccaggacccaaggaaccaaaattgcatctgatggtctcaagggtcgtgtgtttgaagtgagtcttgctgatttgcagaatgatgaagttgcatttagaaaattcaagctgattactgaagatgttcagggtaaaaactgcctgactaacttccatggcatggatcttacccgtgacaaaatgtgttccatggtcaaaaaatggcagacaatgattgaagctcacgttgatgtcaagactaccgatggttacttgcttcgtctgttctgtgttggttttactaaaaaacgcaacaatcagatacggaagacctcttatgctcagcaccaacaggtccgccaaatccggaagaagatgatggaaatcatgacccgagaggtgcagacaaatgacttgaaagaagtggtcaataaattgattccagacagcattggaaaagacatagaaaaggcttgccaatctatttatcctctccatgatgtcttcgttagaaaagtaaaaatgctgaagaagcccaagtttgaattgggaaagctcatggagcttcatggtgaaggcagtagttctggaaaagccactggggacgagacaggtgctaaagttgaacgagctgatggatatgaaccaccagtccaagaatctgtttaaagttcagacttcaaatagtggcaaataaaaagtgctatttgtgatggtttgcttctgaa

SEQ ID NO: 26694 - DNA, 1386 bp, Homo sapiens
  source 1..1386: mol_type = unassigned DNA
ccttttggctctctgaccagcaccatggcggttgccaagaagaaagtggttgatccattttctaagaaagattggtatgatgtgaaagcacctgctatgttcaatataagaaatattggaaagacgctcgtcaccaggacccaaggaaccaaaattgcatctgatggtctcaagggtcgtgtgtttgaagtgagtcttgctgatttgcagaatgatgaagttgcatttagaaaattcaagctgattactgaagatgttcagggtaaaaactgcctgactaacttccatggcatggatcttacccgtgacaaaatgtgttccatggtcaaaaaatggcagacaatgattgaagctcacgttgatgtcaagactaccgatggttacttgcttcgtctgttctgtgttggttttactaaaaaacgcaacaatcagatacggaagacctcttatgctcagcaccaacaggtccgccaaatccggaagaagatgatggaaatcatgacccgagaggtgcagacaaatgacttgaaagaagtggtcaataaattgtaagtgtttctttgcttcctcacacaacacaaccttgagtattggattattcctgagatgagagaacgcatatgagacaaggtaaaggtctgttgaaatcctgtctgtgaatccttctagctatatctctttaagtgaaagagtgttaagtactcagtaaatatgattattattactattattatttgagtcagagtcttgctctgttgcccaggctcgagtgcagtattgtgatcctccttggctcactgtaaccactgcttcctgggttcaagcagttcttgagcctcagcctcctgagtatctgggaatacaggggactgccaccatacccagctaatttttttaaatttttagtagagatggggtttcatcatgttggccaggctggtcttgaactcctgacttcaggtgatctgccagtactctaaatgataacagttttttcgtgtttatttattttgaatgaagctgtctcacagtagatggagttgaaggacaggaaatgtttttcccctacttggaaaatacactgaataagttgagtggggtgggatgtgcctggagtcccagctactcaggaggctgaggtggtaggattgtttgagcccaggagtttgaggccagcctgggcaatatagggagaccctgtcccaaaaaataaaaaatatacgtatatatatatacacacacaaagaaaaaatacactgaatagacaaaacctttcatgattaatgatgcacgggaataagtgatgaaaaaagtttcggtcccagatgatggccagtgataacaacatttttctgatgttcccatgcaatatacagttagctaaga

SEQ ID NO: 26695 - DNA, 862 bp, Homo sapiens
  source 1..862: mol_type = unassigned DNA
cgccttacgaaaggcggcaaaaagggagccaagaagaaagttgaaaaatacagtaagaattgatctgcaatggaacttaagcatcttcttaaaatccagggttgatccattttctaagaaagattggtatgatgtgaaagcacctgctatgttcaatataagaaatattggaaagacgctcgtcaccaggacccaaggaaccaaaattgcatctgatggtctcaagggtcgtgtgtttgaagtgagtcttgctgatttgcagaatgatgaagttgcatttagaaaattcaagctgattactgaagatgttcagggtaaaaactgcctgactaacttccatggcatggatcttacccgtgacaaaatgtgttccatggtcaaaaaatggcagacaatgattgaagctcacgttgatgtcaagactaccgatggttacttgcttcgtctgttctgtgttggttttactaaaaaacgcaacaatcagatacggaagacctcttatgctcagcaccaacaggtccgccaaatccggaagaagatgatggaaatcatgacccgagaggtgcagacaaatgacttgaaagaagtggtcaataaattgattccagacagcattggaaaagacatagaaaaggcttgccaatctatttatcctctccatgatgtcttcgttagaaaagtaaaaatgctgaagaagcccaagtttgaattgggaaagctcatggagcttcatggtgaaggcagtagttctggaaaagccactggggacgagacaggtgctaaagttgaacgagctgatggatatgaaccaccagtccaagaatctgtttaaagttcagacttcaaatagtggcaaataaaa

SEQ ID NO: 26696 - DNA, 576 bp, Homo sapiens
  source 1..576: mol_type = unassigned DNA
tccgcccttttggctctctgaccagcaccatggcggttggcaagaacaagcgccttacgaaaggcggcaaaaagggagccaagaagaaagtacaatgattgaagctcacgttgatgtcaagactaccgatggttacttgcttcgtctgttctgtgttggttttactaaaaaacgcaacaatcagatacggaagacctcttatgctcagcaccaacaggtccgccaaatccggaagaagatgatggaaatcatgacccgagaggtgcagacaaatgacttgaaagaagtggtcaataaattgattccagacagcattggaaaagacatagaaaaggcttgccaatctatttatcctctccatgatgtcttcgttagaaaagtaaaaatgctgaagaagcccaagtttgaattgggaaagctcatggagcttcatggtgaaggcagtagttctggaaaagccactggggacgagacaggtgctaaagttgaacgagctgatggatatgaaccaccagtccaagaatctgtttaaagttcagacttcaaatagtggcaaataaaaagtgctatttgtga

SEQ ID NO: 26697 - DNA, 985 bp, Homo sapiens
  source 1..985: mol_type = unassigned DNA
ccttttggctctctgaccagcaccatggcggttggcaagaacaagcgccttacgaaaggcggcaaaaagggagccaagaagaaagtgtaagtcgcgactgtcgtggcgtcttgctttttgggggtctgctggaatcggcgggctggtcctagatcgcggcgtaggccggatggcgaggattccagtcggattgtgcgggccgtggcggggttgatccattttctaagaaagattggtatgatgtgaaagcacctgctatgttcaatataagaaatattggaaagacgctcgtcaccaggacccaaggaaccaaaattgcatctgatggtctcaagggtcgtgtgtttgaagtgagtcttgctgatttgcagaatgatgaagttgcatttagaaaattcaagctgattactgaagatgttcagggtaaaaactgcctgactaacttccatggcatggatcttacccgtgacaaaatgtgttccatggtcaaaaaatggcagacaatgattgaagctcacgttgatgtcaagactaccgatggttacttgcttcgtctgttctgtgttggttttactaaaaaacgcaacaatcagatacggaagacctcttatgctcagcaccaacaggtccgccaaatccggaagaagatgatggaaatcatgacccgagaggtgcagacaaatgacttgaaagaagtggtcaataaattgattccagacagcattggaaaagacatagaaaaggcttgccaatctatttatcctctccatgatgtcttcgttagaaaagtaaaaatgctgaagaagcccaagtttgaattgggaaagctcatggagcttcatggtgaaggcagtagttctggaaaagccactggggacgagacaggtgctaaagttgaacgagctgatggatatgaaccaccagtccaagaatctgtttaaagttcagacttcaaatagtggcaaataaaaagtgctatttgtga

SEQ ID NO: 26698 - DNA, 671 bp, Homo sapiens
  source 1..671: mol_type = unassigned DNA
aagcgccttacgaaaggcggcaaaaagggagccaagaagaaagtggttgatccattttctaagaaagattggtatgatgtgaaagcacctgctatgttcaatataagaaatattggaaagacgctcgtcaccaggacccaaggaaccaaaattgcatctgatggtctcaagggtcgtgtgtttgaaacaatgattgaagctcacgttgatgtcaagactaccgatggttacttgcttcgtctgttctgtgttggttttactaaaaaacgcaacaatcagatacggaagacctcttatgctcagcaccaacaggtccgccaaatccggaagaagatgatggaaatcatgacccgagaggtgcagacaaatgacttgaaagaagtggtcaataaattgattccagacagcattggaaaagacatagaaaaggcttgccaatctatttatcctctccatgatgtcttcgttagaaaagtaaaaatgctgaagaagcccaagtttgaattgggaaagctcatggagcttcatggtgaaggcagtagttctggaaaagccactggggacgagacaggtgctaaagttgaacgagctgatggatatgaaccaccagtccaagaatctgtttaaagttcagacttcaaatagtggcaaataaaaagtgctatttgtga

SEQ ID NO: 26699 - DNA, 1526 bp, Homo sapiens
  source 1..1526: mol_type = unassigned DNA
ggctgagctgggcggagcagctgaaaatccggcgcgcgcagtctccagccccaatttctacgcgcaccggaagacggaggtcctctttccttgcctaacgcagccatggctcgtggtcccaagaagcatctgaagcgggtggcagctccaaagcattggatgctggataaattgaccggtgtgtttgctcctcgtccatccaccggtccccacaagttgagagagtgtctccccctcatcattttcctgaggaacagacttaagtatgccctgacaggagatgaagtaaagaagatttgcatgcagcggttcattaaaatcgatggcaaggtccgaactgatataacctaccctgctggattcatggatgtcatcagcattgacaagacgggagagaatttccgtctgatctatgacaccaagggtcgctttgctgtacatcgtattacacctgaggaggccaagtacaagttgtgcaaagtgagaaagatctttgtgggcacaaaaggaatccctcatctggtgactcatgatgcccgcaccatccgctaccccgatcccctcatcaaggtgaatgataccattcagattgatttggagactggcaagattactgatttcatcaagttcgacactggtaacctgtgtatggtgactggaggtgctaacctaggaagaattggtgtgatcaccaacagagagaggcaccctggatcttttgacgtggttcacgtgaaagatgccaatggcaacagctttgccactcgactttccaacatttttgttattggcaagggcaacaaaccatggatttctcttccccgaggaaagggtatccgcctcaccattgctgaagagagagacaaaagactggcggccaaacagagcagtgggtgaaatgggtccctgggtgacatgtcagatctttgtacgtaattaaaaatattgtggcaggattaatagcattttggttttgtgggttgtttttttttttaattcagtttcctgctattttactgtataacatgaacagtgattaagttctcaggcaggcttaggcagtctgttattggctgggcttagttagtggtgggaagtagaagataccagacttgggaaaggaacagcaactaaccaaggagtagaaagagccaagaaatcccggagtatttatctcccccgccttgacttggccaagaacttctctacacagtggacccctctgccctgttaagttcccttggctttctaaaaatctgccctcattttcttctccagtctgtattgcactagcccatccacaagcctggctcatctgtttttcccactcctgtgcccatcttgccaaacgcaggatgaaaatctccagttgccattaaaggtggtcataaatgggctgttgatgttgcaaagcattgcagttccttggacttagtgcccttattctccagctgccgctgcagtcctcaactctgtttttcagaggacagagatgtagaacataaacttgttcttgcttgtccaaa

SEQ ID NO: 26700 - DNA, 594 bp, Homo sapiens
  source 1..594: mol_type = unassigned DNA
aatttctacgcgcaccggaagacggaggtcctctttccttgcctaacgcagccatggctcgtggtcccaagaagcatctgaagcgggtggcagctccaaagcattggatgctggataaattgaccggtgtgtttgctcctcgtccatccaccggtccccacaagttgagagagtgtctccccctcatcattttcctgaggaacagacttaagtatgccctgacaggagatgaagtaaagaagatttgcatgcagcggttcattaaaatcgatggcaaggtccgaactgatataacctaccctgctggattcatggatgtcatcagcattgacaagacgggagagaatttccgtctgatctatgacaccaagggtcgctttgctgtacatcgtattacacctgaggaggccaagccttgttaacagcagactggagggcacgtccagtgggatctgtgattatttgatttacttcaaggatatcagggagtagagatccaaaattgaaatgctatgtgaagtatttgttgattggatgaactggtaatgtaattgctgtttgtgagacaaaactcagtcgtgatgtacagggagc

SEQ ID NO: 26701 - DNA, 993 bp, Homo sapiens
  source 1..993: mol_type = unassigned DNA
ttccaggatatgaactctacagcggaagaataagaaaccggaactaaacttctcactcatctgacttcctgcggtttacgacaacagactttggttgcaccggaaaagaacagattctcttccgtcgcagagtttcgccatggcccggggccccaagaagcacttaaagcgtgttgcagcgccgaagcattggatgcttgacaaactaacgggtgtatttgcacctcgtccatcgacaggtccccacaagctgagggaatgtcttcctctgatcgtcttcctcaggaatagactcaagtatgcgttgactggagatgaggtaaagaagatatgtatgcaacgtttcatcaaaattgatggcaaggttcgagtggatgtcacataccctgctggattcatggatgtcatcagcatcgagaagacaggtgaacatttccgcctggtctatgacaccaagggccgttttgctgttcaccgcatcacagtggaagaggcaaagtacaagttgtgcaaagtgaggaagattactgtgggagtgaagggaatccctcacctggtgactcatgatgctcgaaccatccgctacccagatcctgtcatcaaggtgaacgatactgtgcagattgatttagggactggcaagataatcaactttatcaaatttgatacaggcaatttgtgtatggtgattggtggagccaacctcggtcgtgttggtgtgatcaccaacagggaaagacatcctggttcttttgatgtggtgcatgtgaaggatgccaatggcaacagctttgccacgaggctttccaacatttttgtcattggcaatggcaataaaccttggatttccctgcccaggggaaagggcattcgacttactgttgctgaagagagagataagaggctggccaccaaacagagcagtggctaaattgcagtagcagcatatctttttttctttgcacaaataaacagtgaattctcgtttcttaa

SEQ ID NO: 26702 - DNA, 811 bp, Homo sapiens
  source 1..811: mol_type = unassigned DNA
gcactgtggacgctctcttgacggatgctagggagacccgccaagttttcaaaggcccggggccccaagaagcacttaaagcgtgttgcagcgccgaagcattggatgcttgacaaactaacgggtgtatttgcacctcgtccatcgacaggtccccacaagctgagggaatgtcttcctctgatcgtcttcctcaggaatagactcaagtatgcgttgactggagatgaggtaaagaagatatgtatgcaacgtttcatcaaaattgatggcaaggttcgagtggatgtcacataccctgctggattcatggatgtcatcagcatcgagaagacaggtgaacatttccgcctggtctatgacaccaagggccgttttgctgttcaccgcatcacagtggaagaggcaaagtacaagttgtgcaaagtgaggaagattactgtgggagtgaagggaatccctcacctggtgactcatgatgctcgaaccatccgctacccagatcctgtcatcaaggtgaacgatactgtgcagattgatttagggactggcaagataatcaactttatcaaatttgatacaggcaatttgtgtatggtgattggtggagccaacctcggtcgtgttggtgtgatcaccaacagggaaagacatcctggttcttttgatgtggtgcatgtgaaggatgccaatggcaacagctttgccacgaggctttccaacatttttgtcattggcaatggcaataaaccttggatttccctgcccaggggaaagggcattcgacttactgttgctgaagagagagata

SEQ ID NO: 26703 - DNA, 792 bp, Homo sapiens
  source 1..792: mol_type = unassigned DNA
atggcccggggccccaagaagcacttgaagcgtgttgcagcgccgaagcattggatgctggataaactaactggtgtatttgcacctcgtccatcgacaggtcctcacaagctgagggaatgtcttcccctgatagtcttcctcaggaatagactcaagtatgcattgactggagatgaggtaaagaagatatgtatgcaacacttcctcaaaattgatggcaaggttcgagtggacatcacataccctgctggattcatagatgtcatcagcattgagaaaacaggtgagcatttccgcctggtctataataccaagggctgttttgctgttcatcgtatcacagtggaagaggcaaagtacaagttgtgcaaagtgaggaagattactgtggggacaaagggaattccacacctggtgactcatgatgctcgaaccattcgctacccagatcctctcatcaaggtgaacgatactgtgcagattgatttagggactgggaagataaccagctttatcaaatttgacacaggcaatgtatgtatggtgattgctggagctaacctcggtcgtgttggtgtgatcacaaacagggaaagacatcctggttcttgcgatgtggtacatgtgaaggatgccaacggcaacagctttgccacaaggatttccaacatttttgtcattggcaatggtaataaaccttggatttccctgcccaggggaaagggcatccgacttactattgctgaagagagagacaagaggctggctgccaaacagagcagtggctaa

SEQ ID NO: 26704 - DNA, 740 bp, Homo sapiens
  source 1..740: mol_type = unassigned DNA
ctcttcctgtctgtaccagggcggcgcgtggtctacgccgagtgacagagacgctcaggctgtgttctcaggatgaccgagtgggagacagcagcaccagcggtggcagagaccccagacatcaagctctttgggaagtggagcaccgatgatgtgcagatcaatgacatttccctgcaggattacattgcagtgaaggagaagtatgccaagtacctgcctcacagtgcagggcggtatgccgccaaacgcttccgcaaagctcagtgtcccattgtggagcgcctcactaactccatgatgatgcacggccgcaacaacggcaagaagctcatgactgtgcgcatcgtcaagcatgccttcgagatcatacacctgctcacaggcgagaaccctctgcaggtcctggtgaacgccatcatcaacagtggtccccgggaggactccacacgcattgggcgcgccgggactgtgagacgacaggctgtggatgtgtcccccctgcgccgtgtgaaccaggccatctggctgctgtgcacaggcgctcgtgaggctgccttccggaacattaagaccattgctgagtgcctggcagatgagctcatcaatgctgccaagggctcctcgaactcctatgccattaagaagaaggacgagctggagcgtgtggccaagtccaaccgctgattttcccagctgctgcccaataaacctgtctgccctttggggcagtcccagcc

SEQ ID NO: 26705 - DNA, 1203 bp, Homo sapiens
  source 1..1203: mol_type = unassigned DNA
gggctgcaacccctcgcgcgggctccccggccgtggaggacacaaggacaaacacgaagggtccccgacctgccgaccccctcctcccggacaccgcgcgtagcctgtaggctacctccgcgctccacccagagacgggtcgcgctgctcccgccgccgcaaccccgggccctcgtgccggcggtctcccctcttccacgggcgagattactgcatagcagaggcgcccacaagacagggcaactacggggtagcggacatccgccaggcacgcttctagggccgcttctgcaactgcgcatgcgcttgggctgcacccattccgtctagcccaaaaggttcctctacaaccttcctccggattggtctatagggacacgatggccttttacgcaagcgtcacccgtgctgacccggaagttttcttcccagttaaaagtgttggcccgcggcgcgcggcctcttcctgtctgtaccagggcggcgcgtggtctacgccgagtgacagagacgctcaggctgtgttctcaggatgaccgagtgggagacagcagcaccagcggtggcagagaccccagacatcaagctctttgggaagtggagcaccgatgatgtgcagatcaatgacatttccctgcaggattacattgcagtgaaggagaagtatgccaagtacctgcctcacagtgcagggcggtatgccgccaaacgcttccgcaaagctcagtgtcccattgtggagcgcctcactaactccatgatgatgcacggccgcaacaacggcaagaagctcatgactgtgcgcatcgtcaagcatgccttcgagatcatacacctgctcacaggcgagaaccctctgcaggtcctggtgaacgccatcatcaacagtggtccccgggaggactccacacgcattgggcgcgccgggactgtgagacgacaggctgtggatgtgtcccccctgcgccgtgtgaaccaggccatctggctgctgtgcacaggcgctcgtgaggctgccttccggaacattaagaccattgctgagtgcctggcagatgagctcatcaatgctgccaagggctcctcgaactcctatgccattaagaagaaggacgagctggagcgtgtggccaagtccaaccgctgattttcccagctgctgcccaataaacctgtctgccctttggggcagtcccagccacc

SEQ ID NO: 26706 - DNA, 863 bp, Homo sapiens
  source 1..863: mol_type = unassigned DNA
aagatgaaggtaggtgatggtggcgagtgttagactgggtttggggaacgtgaatcgagtcccagaacgcggcattgcctcagttccagcactccaggatcctggctttagctgaacatctccttcccagccactggctgccagaaactcattgaagtggacgatgaacgcaaacttcgtactttctatgagaagcgtatggccacagaagttgctgctgacgctctgggtgaagaatggaagggttatgtggtccgaatcagtggtgggaacgacaaacaaggtttccccatgaagcagggtgtcttgacccatggccgtgtccgcctgctactgagtaaggggcattcctgttacagaccaaggagaactggagaaagaaagagaaaatcagttcgtggttgcattgtggatgcaaatctgagcgttctcaacttggttattgtaaaaaaaggagagaaggatattcctggactgactgatactacagtgcctcgccgcctgggccccaaaagagctagcagaatccgcaaacttttcaatctctctaaagaagatgatgtccgccagtatgttgtaagaaagcccttaaataaagaaggtaagaaacctaggaccaaagcacccaagattcagcgtcttgttactccacgtgtcctgcagcacaaacggcggcgtattgctctgaagaagcagcgtaccaagaaaaataaagaagaggctgcagaatatgctaaacttttggccaagagaatgaaggaggctaaggagaagcgccaggaacaaattgcgaagagacgcagactttcctctctgcgagcttctacttctaagtctgaatccagtcagaaataagatttttt

SEQ ID NO: 26707 - DNA, 892 bp, Homo sapiens
  source 1..892: mol_type = unassigned DNA
ctcttttccgtggcgcctcggaggcgttcagctgcttcaagatgaagctgaacatctccttcccagccactggctgccagaaactcattgaagtggacgatgaacgcaaacttcgtactttctatgagaagcgtatggccacagaagttgctgctgacgctctgggtgaagaatggaaggtaaaagttgacaaattgttgcaggtatttaagtcagagacggtaaacgccattggtaactggtatttggaatggggttcagactccgggttctggcttctgacctttggtaagttgcttccgaatgccactttataaagttagaggtattaccttggagggggggacgtagagtaagccataaaatatacgtaaagtttacatcaacataattcttgccctgcatcatgcatttggcaatatgtcacatagctgtcctcataatccccaaagtgccaaaaagggttgtatctgatttgtttgttgctgtttgatattttatcttcttagtgctgttatctctaataaaacatcggttagaaatgcgacttgaaagacatttgataattgaacttgacaagttgggaatatagacaaaactcactgaacagagaaaacgtgcttaagttcaaattggttttcataattatactttctcatataggtgtgttcacagaggtcacaatcctgtactgtataattttggaatagaaatagtaaatgtgtcattcattgtatgctcttgcagggttatgtggtccgaatcagtggtgggaacgacaaacaaggtttccccatgaagcagggtgtcttgacccatggccgtgtccgcctgctactgagtaaggggcattcctgttacagaccaaggagaactggagaaagaaagagaa

SEQ ID NO: 26708 - DNA, 1355 bp, Homo sapiens
  source 1..1355: mol_type = unassigned DNA
gctgcttcaagatgaaggtaggtgatggtggcgagtgttagactgggtttggggaacgtgaatcgagtcccagaacgcggcattgcctcagttccagcactccaggatcctggctttaggtggagaagggtctcaagtaggagaaggctcgcctttctggggcatggagctttttggccgaacggatggcaggcgattgcggctggagccgcggcgggccgggagcgccatggtggcgtccccgcgcccagccgggacggatgcggcgtgttgcccagtttgcggcaggcctgtggtgcggctcttgaccccggctttcttgcttcgggagggtgaacggctgcggagtgccctcgcccccagagtcattccgcggggcttgaggggaaaacgtcctgctgagtgcggcgcttcttgactgctactctgctttcacgtgcttttagtgagtacagtcggcatcttatatttcctgcttgtgtggaggcaacatgaaaggctttttgcagtggaattaactttgtagatggctctacaattacctgtatagatagtttcgtaaactatttccccccttttaatccttagctgaacatctccttcccagccactggctgccagaaactcattgaagtggacgatgaacgcaaacttcgtactttctatgagaagcgtatggccacagaagttgctgctgacgctctgggtgaagaatggaagggttatgtggtccgaatcagtggtgggaacgacaaacaaggtttccccatgaagcagggtgtcttgacccatggccgtgtccgcctgctactgagtaaggggcattcctgttacagaccaaggagaactggagaaagaaagagaaaatcagttcgtggttgcattgtggatgcaaatctgagcgttctcaacttggttattgtaaaaaaaggagagaaggatattcctggactgactgatactacagtgcctcgccgcctgggccccaaaagagctagcagaatccgcaaacttttcaatctctctaaagaagatgatgtccgccagtatgttgtaagaaagcccttaaataaagaaggtaagaaacctaggaccaaagcacccaagattcagcgtcttgttactccacgtgtcctgcagcacaaacggcggcgtattgctctgaagaagcagcgtaccaagaaaaataaagaagaggctgcagaatatgctaaacttttggccaagagaatgaaggaggctaaggagaagcgccaggaacaaattgcgaagagacgcagactttcctctctgcgagcttctacttctaagtctgaatccagtcagaaataagattttttgagtaacaaataaat

SEQ ID NO: 26709 - DNA, 1387 bp, Homo sapiens
  source 1..1387: mol_type = unassigned DNA
gctaagcggaagttggccctcttttccgtggcgcctcggaggcgttcagctgcttcaagatgaagctgaacatctccttcccagccactggctgccagaaactcattgaagtggacgatgaacgcaaacttcgtactttctatgagaagcgtatggccacagaagttgctgctgacgctctgggtgaagaatggaagggttatgtggtccgaatcagtggtgggaacgacaaacaaggtttccccatgaagcagggtgtcttgacccatggccgtgtccgcctgctactgagtaaggggcattcctgttacagaccaaggagaactggagaaagaaagagaaaatcagttcgtggttgcattgtggatgcaaatctgagcgttctcaacttggttattgtaaaaaaaggagagaaggatattcctggactgactgatactacagtgcctcgccgcctgggccccaaaagagctagcagaatccgcaaacttttcaatctctctaaagaagatgatgtccgccagtatgttgtaagaaagcccttaaataaagaaggtaagaaacctaggaccaaagcacccaagattcagcgtcttgttactccacgtgtcctgcagcacaaacggcggcgtattgctctgaagaagcagcgtaccaagaaaaataaagaagaggctgcagaatatgctaaacttttggccaagagaatgaaggaggctaaggagaagcgccaggaacaaattgcgaagagacgcagactttcctctctgcgagcttctacttctaagtctgaatccagtcagaaataagattttttgagtaacaaataaataagatcagactctgatctctgttgacttttcattgctgatagaaaactacataaatgaagagagggaaagttaggtcatagaaaatggggatatgtatatatggtattccaatggtggataaagtcagacctattgtgtgtggtagtggaagacaaggtcagtgtacaggggttcctttcaggggatgggtggcacaggaagggattctgagcataagacacctgcctcttcagaatggcatggaacttaggggaaatgatgaggactattaatcttttttatatagtttatttttgaggaatatagctctttaaagcactatacacaatttaatacatgaaaattgaccttgtgaagatgaacatgtcttttttaaaaggtaacttttaaggcatagttttagtggatacctagttttagtggataccatccactaaatggtttttaagccatttcaaatttgttttaacaaagcttttcaactccagtgaattgttaggctgttcacacactgaaaaggaaatgactaaaaacattcttggatcagtgaaaaa

SEQ ID NO: 26710 - DNA, 786 bp, Homo sapiens
  source 1..786: mol_type = unassigned DNA
gggactctctagcctcctaccgcttctcagtgatgttccggtttccgccctcctcctcgcgctgtttccgcctcttgccttcggacgccggattttgacgtgctctcgcgagatttgggtctcttcctaagccggcgctcggcaagttctcccaggagaaagccatgttcagttcgagcgccaagatcgtgaagcccaatggcgagaagccggacgagttcgagtccggcatctcccaggctcttctggagctggagatgaactcggacctcaaggctcagctcagggagctgaatattacggcagctaaggaaattgaagttggtggtggtcggaaagctatcataatctttgttcccgttcctcaactgaaatctttccagaaaatccaagtccggctagtacgcgaattggagaaaaagttcagtgggaagcatgtcgtctttatcgctcagaggagaattctgcctaagccaactcgaaaaagccgtacaaaaaataagcaaaagcgtcccaggagccgtactctgacagctgtgcacgatgccatccttgaggacttggtcttcccaagcgaaattgtgggcaagagaatccgcgtcaaactagatggcagccggctcataaaggttcatttggacaaagcacagcagaacaatgtggaacacaaggttgaaactttttctggtgtctataagaagctcacgggcaaggatgttaattttgaattcccagagtttcaattgtaaacaaaaatgactaaataaaaagtatatattcacagta

SEQ ID NO: 26711 - DNA, 764 bp, Homo sapiens
  source 1..764: mol_type = unassigned DNA
ctcttcctaagccggcgctcggcaaggtaggttggcggcctgctctccgacagaacttttcttcttgggttgaggaaaacgccttttggagtcaggccctggaggggcgagccttgctcacaggttctcccaggagaaagccatgttcagttcgagcgccaagatcgtgaagcccaatggcgagaagccggacgagttcgagtccggcatctcccaggctcttctggagctggagatgaactcggacctcaaggctcagctcagggagctgaatattacggcagctaaggaaattgaagttggtggtggtcggaaagctatcataatctttgttcccgttcctcaactgaaatctttccagaaaatccaagtccggctagtacgcgaattggagaaaaagttcagtgggaagcatgtcgtctttatcgctcagaggagaattctgcctaagccaactcgaaaaagccgtacaaaaaataagcaaaagcgtcccaggagccgtactctgacagctgtgcacgatgccatccttgaggacttggtcttcccaagcgaaattgtgggcaagagaatccgcgtcaaactagatggcagccggctcataaaggttcatttggacaaagcacagcagaacaatgtggaacacaaggttgaaactttttctggtgtctataagaagctcacgggcaaggatgttaattttgaattcccagagtttcaattgtaaacaaaaatgactaaataaaaagtatatattcacagta

SEQ ID NO: 26712 - DNA, 704 bp, Homo sapiens
  source 1..704: mol_type = unassigned DNA
ggcggcctgctctccgacagaacttttcttcttgggttgaggaaaacgccttttggagtcaggccctggaggggcgagccttgctcacagggagaaagccatgttcagttcgagcgccaagatcgtgaagcccaatggcgagaagccggacgagttcgagtccggcatctcccaggctcttctggagctggagatgaactcggacctcaaggctcagctcagggagctgaatattacggcagctaaggaaattgaagttggtggtggtcggaaagctatcataatctttgttcccgttcctcaactgaaatctttccagaaaatccaagtccggctagtacgcgaattggagaaaaagttcagtgggaagcatgtcgtctttatcgctcagaggagaattctgcctaagccaactcgaaaaagccgtacaaaaaataagcaaaagcgtcccaggagccgtactctgacagctgtgcacgatgccatccttgaggacttggtcttcccaagcgaaattgtgggcaagagaatccgcgtcaaactagatggcagccggctcataaaggttcatttggacaaagcacagcagaacaatgtggaacacaaggttgaaactttttctggtgtctataagaagctcacgggcaaggatgttaattttgaattcccagagtttcaattgtaaacaaaaatgactaaataaa

SEQ ID NO: 26713 - DNA, 685 bp, Homo sapiens
  source 1..685: mol_type = unassigned DNA
tctctttccagccagcgccgagcgatgggcatctctcgggacaactggcacaagcgccgcaaaaccgggggcaagagaaagccctaccacaagaagcggaagtatgagttggggcgcccagctgccaacaccaagattggcccccgccgcatccacacagtccgtgtgcggggaggttgtactcgtaaaacaaggatcatcgatgttgtctacaatgcatctaataacgagctggttcgtaccaagaccctggtgaagaattgcatcgtgctcatcgacagcacaccgtaccgacagtggtacgagtcccactatgcgctgcccctgggccgcaagaagggagccaagctgactcctgaggaagaagagattttaaacaaaaaacgatctaaaaaaattcagaagaaatatgatgaaaggaaaaagaatgccaaaatcagcagtctcctggaggagcagttccagcagggcaagcttcttgcgtgcatcgcttcaaggccgggacagtgtggccgagcagatggctatgtgctagagggcaaagagttggagttctatcttaggaaaatcaaggcccgcaaaggcaaataaatccttgttttgtcttcacccatgtaataaaggtgtttattgttttgttcccacatttatgttgcctgaatatatgactgttttctctgcttta

SEQ ID NO: 26714 - DNA, 881 bp, Homo sapiens
  source 1..881: mol_type = unassigned DNA
ctcctaggctcgtggccctaggcgcggcagctgacacgtaagtctcgtcgcccgacgttgtttcggcgctcagaaacaacgtaaagtaaaggggcggggcagcgttttacaaaccgaaccgtgaatctttgcggtttctctttccagccagcgccgagcgatgggcatctctcgggacaactggcacaagcgccgcaaaaccgggggcaagagaaagccctaccacaagaagcggaagtatgagttggggcgcccagctgccaacaccaagattggcccccgccgcatccacacagtccgtgtgcggggaggtaacaagaaataccgtgccctgaggttggacgtggggaatttctcctggggctcagagtgttgtactcgtaaaacaaggatcatcgatgttgtctacaatgcatctaataacgagctggttcgtaccaagaccctggtgaagaattgcatcgtgctcatcgacagcacaccgtaccgacagtggtacgagtcccactatgcgctgcccctgggccgcaagaagggagccaagctgactcctgaggaagaagagattttaaacaaaaaacgatctaaaaaaattcagaagaaatatgatgaaaggaaaaagaatgccaaaatcagcagtctcctggaggagcagttccagcagggcaagcttcttgcgtgcatcgcttcaaggccgggacagtgtggccgagcagatggctatgtgctagagggcaaagagttggagttctatcttaggaaaatcaaggcccgcaaaggcaaataaatccttgttttgtcttcacccatgtaataaaggtgtttattgttttgttcccacatttatgttgcctgaatatatgactgttttctctgcttta

SEQ ID NO: 26715 - DNA, 829 bp, Homo sapiens
  source 1..829: mol_type = unassigned DNA
tccactgcttctcagccagccaacgcctcttctgattggctctgacgtgcgtggtgcgtgaaaacgtcacgagacgccggcgttactataagagcgcagccgtggcgcttgcgcgcctctttctcagtgaccgggtggtttgcttaggcgcagacggggaagcggagccaacatgccagtggcccggagctgggtttgtcgcaaaacttatgtgaccccgcggagacccttcgagaaatctcgtctcgaccaagagctgaagctgatcggcgagtatgggctccggaacaaacgtgaggtctggagggtcaaatttaccctggccaagatccgcaaggccgcccgggaactgctgacgcttgatgagaaggacccacggcgtctgttcgaaggcaacgccctgctgcggcggctggtccgcattggggtgctggatgagggcaagatgaagctggattacatcctgggcctgaagatagaggatttcttagagagacgcctgcagacccaggtcttcaagctgggcttggccaagtccatccaccacgctcgcgtgctgatccgccagcgccatatcagggtccgcaagcaggtggtgaacatcccgtccttcattgtccgcctggattcccagaagcacatcgacttctctctgcgctctccctacgggggtggccgcccgggccgcgtgaagaggaagaatgccaagaagggccagggtggggctggggctggagacgacgaggaggaggattaagtccacctgtccctcctgggctgctggattgtctcgttttcctgccaaataaacaggatcagcgctttacaa

SEQ ID NO: 26716 - DNA, 772 bp, Homo sapiens
  source 1..772: mol_type = unassigned DNA
ccgggtggtttgcttaggtgaggtgcggcggtgtgctttttctctagggtttgggttggatggtggcccgggccttccgagtttccatgagcgcagacggggaagcggagccaacatgccagtggcccggagctgggtttgtcgcaaaacttatgtgaccccgcggagacccttcgagaaatctcgtctcgaccaagagctgaagctgatcggcgagtatgggctccggaacaaacgtgaggtctggagggtcaaatttaccctggccaagatccgcaaggccgcccgggaactgctgacgcttgatgagaaggacccacggcgtctgttcgaaggcaacgccctgctgcggcggctggtccgcattggggtgctggatgagggcaagatgaagctggattacatcctgggcctgaagatagaggatttcttagagagacgcctgcagacccaggtcttcaagctgggcttggccaagtccatccaccacgctcgcgtgctgatccgccagcgccatatcagggtccgcaagcaggtggtgaacatcccgtccttcattgtccgcctggattcccagaagcacatcgacttctctctgcgctctccctacgggggtggccgcccgggccgcgtgaagaggaagaatgccaagaagggccagggtggggctggggctggagacgacgaggaggaggattaagtccacctgtccctcctgggctgctggattgtctcgttttcctgccaaataaacaggatcagcgctttacaa

SEQ ID NO: 26717 - DNA, 709 bp, Homo sapiens
  source 1..709: mol_type = unassigned DNA
ttacgctcacacttctctcccgcgcaggcgcagacggggaagcggagccaacatgccagtggcccggagctgggtttgtcgcaaaacttatgtgaccccgcggagacccttcgagaaatctcgtctcgaccaagagctgaagctgatcggcgagtatgggctccggaacaaacgtgaggtctggagggtcaaatttaccctggccaagatccgcaaggccgcccgggaactgctgacgcttgatgagaaggacccacggcgtctgttcgaaggcaacgccctgctgcggcggctggtccgcattggggtgctggatgagggcaagatgaagctggattacatcctgggcctgaagatagaggatttcttagagagacgcctgcagacccaggtcttcaagctgggcttggccaagtccatccaccacgctcgcgtgctgatccgccagcgccatatcagggtccgcaagcaggtggtgaacatcccgtccttcattgtccgcctggattcccagaagcacatcgacttctctctgcgctctccctacgggggtggccgcccgggccgcgtgaagaggaagaatgccaagaagggccagggtggggctggggctggagacgacgaggaggaggattaagtccacctgtccctcctgggctgctggattgtctcgttttcctgccaaataaacaggatcagcgctttacaa

SEQ ID NO: 26718 - DNA, 1617 bp, Homo sapiens
  source 1..1617: mol_type = unassigned DNA
ccgggtggtttgcttaggtgaggtgcggcggtgtgctttttctctagggtttgggttggatggtggcccgggccttccgagtttccatgagcgcagacggggaagcggagccaacatgccagtggcccggagctgggtttgtcgcaaaacttatgtgaccccgcggagacccttcgagaaatctcgtctcgaccaagagctgaagctgatcggcgagtatgggctccggaacaaacgtgaggtctggagggtcaaatttaccctggccaagatccgcaaggccgcccgggaactgctgacgcttgatgagaaggacccacggcgtctgttcgaaggcaacgccctgctgcggcggctggtccgcattggggtgctggatgagggcaagatgaagctggattacatcctgggcctgaagatagaggatttcttagagagacgcctgcagacccaggtcttcaagctgggcttggccaagtccatccaccacgctcgcgtgctgatccgccagcgccatatcagccctcggaggtgatgggtgtgaactcacccagagggtacagattcacccttgcacacagctcaccagggagctggggcagcctcttgccccaatagcccagcgcaagggtcactgcggctctagccgtacaccttgtgaaggcctctgccaggcatgtgggcagctggacaggtaacagctcttggtgtccccagtggagggagagaaccagcctcacctcgcttgggtggtgggttcagctgtctcctggctcgcttgtgaagttgattccagaccccgatccatgactgcgttctgggtactcagtgtgccctttctgtaatgtggcaccattgagggggaggagctgtacagaaagagggcaagatgtttgcgtttagaatcttcgccccagcccttcactaaccctgtgagccgtaggcagagccttgtgtgtcaatgctttcgtcggagacgtagcctcgggttgctgtgttattgtgggcattgctgctgcacgtggtaatacagctcagtgtcaggtgtggggttcacgatatttcagactcggaacttgggggctctcacatggccatctcatttgctttgtggtcttaggtgggatactttcagatttctcctataaaatggggttgagaaagtcatctgaagcatttttggggattaaggtgataccctaaaaccccggagggcgcacgtaggatcaggtgcacccttcctgcagcgccttggtgtctgcagccgtggcggcctcacggggtgggtggagaggaaagagtggtgcggtagctggggttagcgtccgtttctcctccagtccacctcaccttgtcgcttcttccagggtccgcaagcaggtggtgaacatcccgtccttcattgtccgcctggattcccagaagcacatcgacttctctctgcgctctccctacgggggtggccgcccgggccgcgtgaagaggaagaatgccaagaagggccagggtggggctggggctggagacgacgaggaggaggattaagtccacctgtccctcctgggctgctggattgtctcgttttcctgccaaataaacaggatcagcgctttacaa

SEQ ID NO: 26719 - DNA, 752 bp, Homo sapiens
  source 1..752: mol_type = unassigned DNA
accgggtggtttgcttaggtgaggcgcagacggggaagcggagccaacatgccagtggcccggagctgggtttgtcgcaaaacttatgtgaccccgcggagacccttcgagaaatctcgtctcgaccaagagctgaagctgatcggcgagtatgggctccggaacaaacgtgaggtctggagggtcaaatttaccctggccaagatccgcaaggccgcccgggaactgctgacgcttgatgagaaggacccacggcgtctgttcgaaggcaacgccctgctgcggcggctggtccgcattggggtgctggatgagggcaagatgaagctggattacatcctgggcctgaagatagaggatttcttagagagacgcctgcagacccaggtcttcaagctgggcttggccaagtccatccaccacgctcgcgtgctgatccgccagcgccatatcagccctcggaggtgatgggtgtgaactcacccagagggtacagattcacccttgcacacagctcaccagggagctggggcagcctcttgccccaatagcccagcgcaagggtcactgcggctctagccgtacaccttgtgaaggcctctgccaggcatgtgggcagctggacagggtccgcaagcaggtggtgaacatcccgtccttcattgtccgcctggattcccagaagcacatcgacttctctctgcgctctccctacgggggtggccgcccgggccgcgtgaagaggaagaatg

SEQ ID NO: 26720 - DNA, 1600 bp, Homo sapiens
  source 1..1600: mol_type = unassigned DNA
gcgcagacggggaagcggagccaacatgccagtggcccggagctgggtttgtcgcaaaacttatgtgaccccgcggagacccttcgagaaatctcgtctcgaccaagagctgaagctgatcggcgagtatgggctccggaacaaacgtgaggtctggagggtcaaatttaccctggccaagatccgcaaggccgcccgggaactgctgacgcttgatgagaaggacccacggcgtctgttcgaaggcaacgccctgctgcggcggctggtccgcattggggtgctggatgagggcaagatgaagctggattacatcctgggcctgaagatagaggatttcttagagagacgcctgcagacccaggtcttcaagctgggcttggccaagtccatccaccacgctcgcgtgctgatccgccagcgccatatcaggtaccacctcggatgggcacctgaatcttcctccacctgcccctctgatggttgccctcactaagcctgctgtccctatctcctatgcagccctcggaggtgatgggtgtgaactcacccagagggtacagattcacccttgcacacagctcaccagggagctggggcagcctcttgccccaatagcccagcgcaagggtcactgcggctctagccgtacaccttgtgaaggcctctgccaggcatgtgggcagctggacaggtaacagctcttggtgtccccagtggagggagagaaccagcctcacctcgcttgggtggtgggttcagctgtctcctggctcgcttgtgaagttgattccagaccccgatccatgactgcgttctgggtactcagtgtgccctttctgtaatgtggcaccattgagggggaggagctgtacagaaagagggcaagatgtttgcgtttagaatcttcgccccagcccttcactaaccctgtgagccgtaggcagagccttgtgtgtcaatgctttcgtcggagacgtagcctcgggttgctgtgttattgtgggcattgctgctgcacgtggtaatacagctcagtgtcaggtgtggggttcacgatatttcagactcggaacttgggggctctcacatggccatctcatttgctttgtggtcttaggtgggatactttcagatttctcctataaaatggggttgagaaagtcatctgaagcatttttggggattaaggtgataccctaaaaccccggagggcgcacgtaggatcaggtgcacccttcctgcagcgccttggtgtctgcagccgtggcggcctcacggggtgggtggagaggaaagagtggtgcggtagctggggttagcgtccgtttctcctccagtccacctcaccttgtcgcttcttccagggtccgcaagcaggtggtgaacatcccgtccttcattgtccgcctggattcccagaagcacatcgacttctctctgcgctctccctacgggggtggccgcccgggccgcgtgaagaggaagaatgccaagaagggccagggtggggctggggctggagacgacgaggaggaggattaagtccacctgtccctcctgggctgctggattgtctcgttttcctgccaaataaaca

SEQ ID NO: 26721 - DNA, 944 bp, Homo sapiens
  source 1..944: mol_type = unassigned DNA
ccgggtggtttgcttaggtgaggtgcggcggtgtgctttttctctagggtttgggttggatggtggcccgggccttccgagtttccatgagcgcagacggggaagcggagccaacatgccagtggcccggagctgggtttgtcgcaaaacttatgtgaccccgcggagacccttcgagaaatctcgtctcgaccaagagctgaagctgatcggcgagtatgggctccggaacaaacgtgaggtctggagggtcaaatttaccctggccaagatccgcaaggccgcccgggaactgctgacgcttgatgagaaggacccacggcgtctgttcgaaggcaacgccctgctgcggcggctggtccgcattggggtgctggatgagggcaagatgaagctggattacatcctgggcctgaagatagaggatttcttagagagacgcctgcagacccaggtcttcaagctgggcttggccaagtccatccaccacgctcgcgtgctgatccgccagcgccatatcagccctcggaggtgatgggtgtgaactcacccagagggtacagattcacccttgcacacagctcaccagggagctggggcagcctcttgccccaatagcccagcgcaagggtcactgcggctctagccgtacaccttgtgaaggcctctgccaggcatgtgggcagctggacagggtccgcaagcaggtggtgaacatcccgtccttcattgtccgcctggattcccagaagcacatcgacttctctctgcgctctccctacgggggtggccgcccgggccgcgtgaagaggaagaatgccaagaagggccagggtggggctggggctggagacgacgaggaggaggattaagtccacctgtccctcctgggctgctggattgtctcgttttcctgccaaataaacaggatcagcgctttacaa

SEQ ID NO: 26722 - DNA, 1257 bp, Homo sapiens
  source 1..1257: mol_type = unassigned DNA
gtctgacgggcgatggcgcagccaatagacaggagcgctatccgcggtttctgattggctactttgttcgcattataaaaggcacgcgcgggcgcgaggcccttctctcgccaggcgtcctcgtggaaggcccgggaccgcgggatgggtgtcggcgtgaccaggcctgagctccctgtctctcctcagtgacatcgtctttaaaccctgcgtggcaatccctgacgcaccgccgtgatgcccagggaagacagggcgacctggaagtccaactacttccttaagatcatccaactattggatgattatccgaaatgtttcattgtgggagcagacaatgtgggctccaagcagatgcagcagatccgcatgtcccttcgcgggaaggctgtggtgctgatgggcaagaacaccatgatgcgcaaggccatccgagggcacctggaaaacaacccagctctggagaaactgctgcctcatatccgggggaatgtgggctttgtgttcaccaaggaggacctcactgagatcagggacatgttgctggccaataaggtgccagctgctgcccgtgctggtgccattgccccatgtgaagtcactgtgccagcccagaacactggtctcgggcccgagaagacctcctttttccaggctttaggtatcaccactaaaatctccaggggcaccattgaaatcctgagtgatgtgcagctgatcaagactggagacaaagtgggagccagcgaagccacgctgctgaacatgctcaacatctcccccttctcctttgggctggtcatccagcaggtgttcgacaatggcagcatctacaaccctgaagtgcttgatatcacagaggaaactctgcattctcgcttcctggagggtgtccgcaatgttgccagtgtctgtctgcagattggctacccaactgttgcatcagtaccccattctatcatcaacgggtacaaacgagtcctggccttgtctgtggagacggattacaccttcccacttgctgaaaaggtcaaggccttcttggctgatccatctgcctttgtggctgctgcccctgtggctgctgccaccacagctgctcctgctgctgctgcagccccagctaaggttgaagccaaggaagagtcggaggagtcggacgaggatatgggatttggtctctttgactaatcaccaaaaagcaaccaacttagccagttttatttgcaaaacaaggaaataaaggcttacttcttt

SEQ ID NO: 26723 - DNA, 912 bp, Homo sapiens
  source 1..912: mol_type = unassigned DNA
ctctcgccaggcgtcctcgtggaagtgacatcgtctttaaaccctgcgtggcaatccctgacgcaccgccgtgatgcccagggaagacagggcgacctggaagtccaactacttccttaagatcatccaactattggatgattatccgaaatgtttcattgtgggagcagacaatgtgggctccaagcagatgcagcagatccgcatgtcccttcgcgggaaggctgtggtgctgatgggcaagaacaccatgatgcgcaaggccatccgagggcacctggaaaacaacccagctctggagaaactgctgcctcatatccgggggaatgtgggctttgtgttcaccaaggaggacctcactgagatcagggacatgttgctggccaataaggtgccagctgctgcccgtgctggtgccattgccccatgtgaagtcactgtgccagcccagaacactggtctcgggcccgagaagacctcctttttccaggctttaggtatcaccactaaaatctccaggggcaccattgaaatcctgggtgtccgcaatgttgccagtgtctgtctgcagattggctacccaactgttgcatcagtaccccattctatcatcaacgggtacaaacgagtcctggccttgtctgtggagacggattacaccttcccacttgctgaaaaggtcaaggccttcttggctgatccatctgcctttgtggctgctgcccctgtggctgctgccaccacagctgctcctgctgctgctgcagccccagctaaggttgaagccaaggaagagtcggaggagtcggacgaggatatgggatttggtctctttgactaatcaccaaaaagcaaccaacttagccagttttatttgcaaaacaaggaaataaaggcttacttctttaaaaa

SEQ ID NO: 26724 - DNA, 1218 bp, Homo sapiens
  source 1..1218: mol_type = unassigned DNA
gtctgacgggcgatggcgcagccaatagacaggagcgctatccgcggtttctgattggctactttgttcgcattataaaaggcacgcgcgggcgcgaggcccttctctcgccaggcgtcctcgtggaagtgacatcgtctttaaaccctgcgtggcaatccctgacgcaccgccgtgatgcccagggaagacagggcgacctggaagtccaactacttccttaagatcatccaactattggatgattatccgaaatgtttcattgtgggagcagacaatgtgggctccaagcagatgcagcagatccgcatgtcccttcgcgggaaggctgtggtgctgatgggcaagaacaccatgatgcgcaaggccatccgagggcacctggaaaacaacccagctctggagaaactgctgcctcatatccgggggaatgtgggctttgtgttcaccaaggaggacctcactgagatcagggacatgttgctggccaataaggtgccagctgctgcccgtgctggtgccattgccccatgtgaagtcactgtgccagcccagaacactggtctcgggcccgagaagacctcctttttccaggctttaggtatcaccactaaaatctccaggggcaccattgaaatcctgagtgatgtgcagctgatcaagactggagacaaagtgggagccagcgaagccacgctgctgaacatgctcaacatctcccccttctcctttgggctggtcatccagcaggtgttcgacaatggcagcatctacaaccctgaagtgcttgatatcacagaggaaactctgcattctcgcttcctggagggtgtccgcaatgttgccagtgtctgtctgcagattggctacccaactgttgcatcagtaccccattctatcatcaacgggtacaaacgagtcctggccttgtctgtggagacggattacaccttcccacttgctgaaaaggtcaaggccttcttggctgatccatctgcctttgtggctgctgcccctgtggctgctgccaccacagctgctcctgctgctgctgcagccccagctaaggttgaagccaaggaagagtcggaggagtcggacgaggatatgggatttggtctctttgactaatcaccaaaaagcaaccaacttagccagttttatttgcaaaacaaggaaataaaggcttacttctttaaaaagtctctggactcttaa

SEQ ID NO: 26725 - DNA, 1344 bp, Homo sapiens
  source 1..1344: mol_type = unassigned DNA
aggcgtcctcgtggaaggttcgtgtgctagttagatgggcgccaggggtcgccggcgggaagcatggaggggtctttgggggcctttgggaacatggagtcctattctgttccgcctggggcctcggtggcggcttgcacgccccgagatgacggccgctgccctaggcagggccggcgggcgattgcgcgtgtcctgctcctcttaggcccgggaccgcgggatgggtgtcggcgtgaccaggcctgagctccctgtctctcctcagtgacatcgtctttaaaccctgcgtggcaatccctgacgcaccgccgtgatgcccagggaagacagggcgacctggaagtccaactacttccttaagatcatccaactattggatgattatccgaaatgtttcattgtgggagcagacaatgtgggctccaagcagatgcagcagatccgcatgtcccttcgcgggaaggctgtggtgctgatgggcaagaacaccatgatgcgcaaggccatccgagggcacctggaaaacaacccagctctggagaaactgctgcctcatatccgggggaatgtgggctttgtgttcaccaaggaggacctcactgagatcagggacatgttgctggccaataaggtgccagctgctgcccgtgctggtgccattgccccatgtgaagtcactgtgccagcccagaacactggtctcgggcccgagaagacctcctttttccaggctttaggtatcaccactaaaatctccaggggcaccattgaaatcctgagtgatgtgcagctgatcaagactggagacaaagtgggagccagcgaagccacgctgctgaacatgctcaacatctcccccttctcctttgggctggtcatccagcaggtgttcgacaatggcagcatctacaaccctgaagtgcttgatatcacagaggaaactctgcattctcgcttcctggagggtgtccgcaatgttgccagtgtctgtctgcagattggctacccaactgttgcatcagtaccccattctatcatcaacgggtacaaacgagtcctggccttgtctgtggagacggattacaccttcccacttgctgaaaaggtcaaggccttcttggctgatccatctgcctttgtggctgctgcccctgtggctgctgccaccacagctgctcctgctgctgctgcagccccagctaaggttgaagccaaggaagagtcggaggagtcggacgaggatatgggatttggtctctttgactaatcaccaaaaagcaaccaacttagccagttttatttgcaaaacaaggaaataaaggcttacttctttaaaaagtc

SEQ ID NO: 26726 - DNA, 919 bp, Homo sapiens
  source 1..919: mol_type = unassigned DNA
tggacacataagaggctgcgtataggcgcgagagcccctttcctcagctgccgccaaggtgctcggtccttccgaggaagctaaggctgcgttggggtgaggccctcacttcatccggcgactagcaccgcgtccggcagcgccagccctacactcgcccgcgccatggcctctgtctccgagctcgcctgcatctactcggccctcattctgcacgacgatgaggtgacagtcacggaggataagatcaatgccctcattaaagcagccggtgtaaatgttgagcctttttggcctggcttgtttgcaaaggccctggccaacgtcaacattgggagcctcatctgcaatgtaggggccggtggacctgctccagcagctggtgctgcaccagcaggaggtcctgccccctccactgctgctgctccagctgaggagaagaaagtggaagcaaagaaagaagaatccgaggagtctgatgatgacatgggctttggtctttttgactaaacctcttttataacatgttcaataaaaagctgaactttactgctgttggtcttgtccatagttttggaatgtgctctgcaaaaatggtctgttttgtaatgttggctttcagcctattctgccatgacacaggctggattttccctgccaccattgccggatgtgagatttagacaatcctgatgctaacaagaaggcacctcatggtacagtgttgaaaactgcactggggtggcaggaggaaggatcagagcagatgctttgtccaggttacctgtgtaaacttgatgattataaggtgtgtcccctacactgggggtggagggtaatacagaccagctttagaaagcctcctgggtatttaccctatacaaccctgcctaagaacgaactttgacgtatgctgaat

SEQ ID NO: 26727 - DNA, 445 bp, Homo sapiens
  source 1..445: mol_type = unassigned DNA
agagcccctttcctcagctgccgccaaggtgctcggtccttccgaggaagctaaggctgcgttggggtgaggccctcacttcatccggcgactagcaccgcgtccggcagcgccagccctacactcgcccgcgccatggcctctgtctccgagctcgcctgcatctactcggccctcattctgcacgacgatgaggtgacagtcacggccctggccaacgtcaacattgggagcctcatctgcaatgtaggggccggtggacctgctccagcagctggtgctgcaccagcaggaggtcctgccccctccactgctgctgctccagctgaggagaagaaagtggaagcaaagaaagaagaatccgaggagtctgatgatgacatgggctttggtctttttgactaaacctcttttataacatgttcaataaaaagctgaactttac

SEQ ID NO: 26728 - DNA, 5088 bp, Homo sapiens
  source 1..5088: mol_type = unassigned DNA
cgccgccgccttctgtgcagtcgcggcccgggcggacggtggctggctgctccgcagcgctcggctggctgcagcggcaccgcgggttgcgcggccggggatgctccagcgggcgcgatggcccccgccatgcagccggccgagatccaatttgcccagcggctggcgtccagcgagaagggcatccgggaccgagcggtgaagaagctgcgccagtacatcagcgtgaagacgcagagggagacaggaggtttcagtcaggaagaacttctgaaaatctggaaggggctcttctactgcatgtgggtgcaggatgaaccccttctacaggaagagctcgccaacaccattgcacagctagtccatgctgttaacaactcagcggctcaacacctgttcattcagaccttttggcaaaccatgaatcgagaatggaaaggaatagacaggctacgcctggacaaatactatatgctgattcgtctggtcctgaggcagtcctttgaagtcttgaagcgaaatggctgggaagaaagccgaatcaaggttttcttggatgtcctgatgaaggaggtcctgtgtcctgagagtcagtctcctaatggagtgagattccacttcattgatatttacctggatgaactctccaaagtcggggggaaggagcttttagcagatcagaatctcaagtttatcgatccattctgcaaaattgctgcgaagacgaaggaccacaccctggtacagaccatagctcggggtgtcttcgaagctatcgtagatcagtctccttttgtgcctgaagagacgatggaggaacagaagacaaaagtgggtgatggtgacctctctgctgaggagatacctgaaaatgaggtatccttgagaagagctgtcagtaaaaagaagacagcactgggcaaaaaccattccagaaaagatggactcagtgatgaaagaggaagagatgactgtggaacctttgaggacacagggccccttctccagtttgactataaggctgttgctgatcgactcctggaaatgaccagcaggaagaacacgccccacttcaacaggaagcgcctctccaaactcatcaagaaattccaagacctttctgaaggaagcagtatatctcaactcagttttgcggaggacatttctgctgatgaagatgaccaaatcctcagtcaaggaaagcataagaagaaaggaaataaacttttagagaaaactaacttggaaaaggagaaaggaagcagagtcttttgtgtagaggaagaggacagtgaaagcagtcttcaaaagagaagaaggaagaagaagaagaagcaccacctgcagcctgaaaatccaggcccagggggtgcagccccatccctggaacagaaccggggcagggagcccgaggcctctgggctgaaagccctgaaggcacgtgtggccgagccaggtgcagaggccacgtccagcactggggaggagagtggctccgagcatcctccagccgtccccatgcacaataaaaggaaacggccacggaagaagagcccgagggcccacagggaaatgttggaatcagcagtgttgcccccagaggacatgtctcagagtggcccgagtggcagtcatcctcagggacctagagggtccccgacaggtggagcccaactcctaaaaaggaagcggaaacttggagttgtgcccgtcaatggcagtggcctgtccacgccggcctggcctccattgcagcaggaaggccctcccacaggccccgcagagggggcgaacagccacaccacgctgccccagcgcaggaggctgcagaaaaagaaggcagggcccggcagcctggagctctgtggcctgcccagccagaaaacagcaagtttgaaaaagaggaagaaaatgagagtgatgtcaaacttggtggagcacaacggggtgctggagtccgaagctgggcaaccccaggctctgggaagcagtgggacttgcagttccctgaagaagcagaagctgagggcagagagcgactttgtgaagtttgacacccccttcttaccaaagcccctgttcttcagaagagccaagagcagcactgccacccaccctccaggccctgccgtccagctaaacaagacaccatccagctccaagaaagtcacctttgggctgaacagaaacatgactgccgaattcaagaagacagacaagagtatcttggtcagtcccacgggcccttctcgagtggccttcgaccctgaacagaagcccctccacggggtgctgaagacccccaccagctcacctgccagctcacccctggtggccaagaagcccctgaccaccacaccaaggagaaggcccagggctatggatttcttctgaggagcagcagagtcccttgtaaaagactgcttttgtacagaatgcgctataaattatacctttaagaatgtggggccttttttatgattttgtaagttcccataagttgtgtgcacgaggttctgagagtgcccgcaggctgctgcgtcctggcccctctgtagtggctgcgggcgtcttggttgaatcttttgctacaaaccatgtttgcgtttgagctctccaggattttacatttttgggtaacctcagtgattcccattggtgtaggaaatgagaccctctctgaagctgaggagagcacgttgatctgaactttaaatcaatcagtgctgctggcacaatgaaaggtggaactgcacttctgttgagctctcagttctgcggaatttggtactcattaccgtattcgccgtactaagttggtttctgttagtcttaacagtctgttttcttttaaaagcatgtagggcttcattgccatgttctgtgggtgtttggcaggttaccgatggggaagattcttgtcacagaatcagcaataccatagtttttctacatgtgctcagctgggggtgtggacaggtaggggtggggaaagaagaggctctgcgttctgggggctttttcttctcctccccctacccggtttccctccctgttttcctacctctacggcaagcccaaagtgtcttcccgggagcccagcgcagcccccggctcttacccaggaccccgccccgtgctgagccttctgctgaggtccttgcgtggagcacactcattcctccaagcccttgcgctcccgtttctctctctctccgtccacgttccagccgagtcactgcctgaccggctccatggcagctccccatcttccctagaggctgcctgcgcatctggagcctgcgctccggctcagcgacctttcctctcaaatgcggaagcgtgcacttacagttcagaccgttctcctgtaagttcattacaaacacgggcggaaggcactcaggctttcgttggagaaacagaaataaggccttcttttgagcagcgattgctggatcattgatctgtttgaggaagtgtctgacctgggcctgagagctggagaaggtgcagattcaaagtgagcggctcctgaggagagccgccaaggctgctcgccttctccgtggcttccgcagctaccgtctgcacggtgagagggcacgggcacacggttcgggctggcgtgcagctctcccagccagccacgctctgctcaggcctggaagtgaaagccgcctccttcccgttatgccccccatacaggagcctcggtttttcagcaaaacgcggccagtccccttctccactgctgcctcccagcagagggccccaggatctccaaggtcccagctatggctttggacaacgtggcttcggcccctggggttgcagagcttgcattgggtttacctcggtctcattcattcatggagccaagggtggggtttcacctgcgaacatcagactgacttgctggcgtcaagagcagttgactcactgatgaaggccctggtgaggagaaagcactctgttcttcgcctactctgtaatcgttttgtcataatgagccatgaaaaaagtaatgaacttgtgctgttaatcgtcactgtaatgagaagtcttacgtacaacatagctgtggtggcttaatggctgcattagataggatcctcacatcccattcagaaccaaaactgatacagtgaaacaattaaggtgagcaaatagttttaacttttcttttttttttttaagtttcattcttcctagaatatttttctaacaatttttatttcagctttaaagatgggtcatatagccaaacgggccatataatccaacattgttgagatgtcttaggacatctaaggcaaaactggcacatttgttctgcagactattgcaggaatgttttttcctagcatttctatattatctgtccattctgaggaaccagtgaatgtcctataaatgcacctcctgtcaaaaccatgcctgagaggtcccggctgggagtgacagggtgcttcttagattctattggtccttctctcattctccgaacttactcctttttatgggtaagtcaactaggtttacagtcccttatttttaatgcctaagttttgacagcaggaagaaaacaattttttaaaaattctcattacatagacgcacaagaatatgtcacataaagaaaatgtgtttagaatactggttttctatttacgcatgatattttcctaagtaaaattgccaagtggacttggaagtccagaaaggaaaataatttaaattaatgctggtgatcttaacaatattttgtaaaatgatgcttcccccttctccatggtctagtcaattttgtacaattaggtatctgactttacaagtttgttatcctttctaatttttactgaactgaaagcacaaagaagactacacagaaaatctggaaacagttgcaggtgttgggaggaagatgaaatcgagctgtcttttaacttttgtatgtgttttatcagaatttgctggactatgctggcaaggactttgtttacgatcaaattgtactagtgtctgcagggtttgtcagtactcgtcaaagccaagtccaattaaaaaaaaaagtctttgccctcc

SEQ ID NO: 26729 - DNA, 1159 bp, Homo sapiens
  source 1..1159: mol_type = unassigned DNA
ctgccagctgatgccgggagctaactaccgcgccggggccggggccggggccggggcccgacgtccccgcggggcccgggaccgcgaggaggacggcgggggcctggagcccgcggccgtggcccgcgacctattgaggggcacatctaacatgtcatttgaggagctgttggaattgcagagccaagtggggactaagacgtacaaacaattggtagctggaaatagtcctaagaaacaagcttctagaccacctatccaaaatgcatgtgttgcagataagcacaggcctctggaaatgtcagccaagatccgagtaccatttttacgtcaggttgttcccattagtaaaaaggtagcccgggaccctcgctttgatgatctgtcaggggaatataatcctgaggtgtttgacaaaacataccaattcttgaatgacatccgagcgaaagagaaagagcttgtgaaaaaacagttgaagaagcacctttcaggagaggagcatgagaaactgcagcaactgcttcagcgaatggagcagcaagaaatggcacagcaggaacgaaagcaacagcaggagctgcacctggccctgaagcaagaacgtcgggctcaggcccagcagggccatcggccatacttcctgaaaaaatctgagcagcgccagttggcactagctgagaagttcaaggagctgaaacgcagcaagaaattggagaacttcttgagtcgaaagaggcgacgaaatgcaggcaaggacaggagacatctccctttgagcaaagagtaataaggaactatcctctgctctgccactgccccagggagacatggatctgtgaggacagatttggccacggctggtttccgttcaagggcaaggatcacagctgcccttgaatctcattgcctcagagaagactagagggctcttggactatccctagggctacacaagaatagttcagccttctgccatgccacacagcctcagcttgaatctggttcattgcgtcctcgtgttcttctctcatccttgccttaaaccagggattctgataccgaagaagaggggccaatgaaaaccatggagtctgttcgtgactcccagggctgggacattatgtaggagccacttcataaacattctctttactca

SEQ ID NO: 26730 - DNA, 4737 bp, Homo sapiens
  source 1..4737: mol_type = unassigned DNA
atggatatttacgacactcaaaccttgggggttgtggtctttggaggattcatggttgtttctgccattggcatcttcctggtgtcgactttctccatgaaggaaacgtcatatgaagaagccctagccaaccagcgcaaggagatggcgaaaactcaccaccagaaagtcgagaagaaaaagaaggagaaaacagtggagaagaaaggaaagaccaagaaaaaggaagagaaacctaatgggaagatacctgatcatgatccagcccccaatgtgactgtcctccttcgagaaccagtgcgggctcctgctgtggctgtggctccaaccccagtgcagccccccattatcgttgctcctgtcgccacagttccagccatgccccaggagaagctggcctcctcccccaaggacaaaaagaagaaggagaaaaaagtggcaaaagtggaaccagctgtcagctctgtagtgaattccatccaggttctcacttcgaaggctgccatcttggaaactgctcccaaggaggtgccgatggtggtggtgcccccagtgggtgccaagggcaacacaccagccactggcactactcagggcaaaaaggcggaggggactcagaatcaaagcaaaaaggctgaaggagccccaaaccagggcagaaaggcagagggaaccccaaaccagggcaaaaagacagagggaaccccaaaccaagggaaaaaggcagagggaaccccaaaccaaggcaaaaaggcagaaggaaccccaaaccaaggcaaaaaggcggagggggcccagaaccagggtaaaaaggtagatacaaccccaaaccaggggaaaaaggtggagggggccccaacccagggcagaaaggccgagggggctcagaaccaggccaaaaaggtagaaggggcccagaaccagggcaaaaaggcagagggggcccagaatcagggcaaaaagggagagggggcccagaaccagggcaagaaggccgagggggcccagaatcagggcaagaaggccgagggggcccagaatcagggcaagaaggccgagggggcccagaatcagggcaagaaggccgagggggcccagaatcagggcaagaaggctgagggggctcagaaccagggcaaaaagtccgagggggctcagaaccagggcaaaaaagtagaaggggcccagaaccagggcaagaaggctgagggtgcccagaaccagggcaaaaaggccgagggggcccagaatcagggcaaaaaggccgagggggcccagaaccagggcaagaaggccgagggggcccagaaccagggcaagaaggccgagggggcccagaaccagggcaagaaggccgagggggcccagaaccagggcaagaaggccgagggtgctcagaaccagggcaaaaaagtagaaggggcccagaaccagggcaagaaggctgagggggcccagaaccagggcaagaaggccgagggggctcagaaccagggcaaaaaggccgagggagcccagaaccagggccaaaaaggagagggagcccagaatcagggtaaaaagacagaaggggctcagggcaaaaaggcagaaaggagtcccaaccaaggcaaaaaaggagagggagctcccatccagggcaaaaaggcagattcggttgctaatcagggcacaaaggtagagggtattacaaaccaggggaaaaaagcagaagggtcccccagtgaaggcaaaaaggcagaagggtcccccaaccaaggcaaaaaggcagacgcagctgccaatcagggtaaaaagacagagtcagcttctgtccagggcagaaatacagatgtggcccagagcccagaggcaccaaagcaagaggctcctgccaagaagaagtctggttcaaagaaaaaaggtgagcctgggcccccagatgccgacggccctctctacctcccctacaagacgctggtctccacggttgggagcatggtgttcaacgagggcgaggcccagcggctcatcgagatcctgtctgagaaggctggcatcattcaggacacctggcacaaggccactcagaagggtgaccctgtggcgattctgaaacgccagctggaagagaaggaaaaactgctggccacagaacaggaagatgcggctgtcgccaagagcaaactgagggagctcaacaaggagatggcagcagaaaaggccaaagcagcagccggggaggccaaagtgaaaaagcagctggtggcccgggagcaggagatcacggctgtgcaggcacgcatgcaggccagctaccgggagcacgtgaaggaggtgcagcagctgcagggcaagatccggactcttcaggagcagctggagaatggccccaacacgcagctggcccgcctgcagcaggagaactccatcctgcgggatgccttgaaccaggccacgagccaggtggagagcaagcagaacgcagagctggccaagcttcggcaggagctcagcaaggtcagcaaagagctggtggagaagtcagaggctgtgcggcaagatgagcagcagcggaaagctctggaagccaaggcagctgccttcgagaagcaggtcctgcagctgcaggcgtcccacagggagagtgaggaggccctgcagaagcgcctggacgaggtcagccgggagctgtgccacacgcagagcagccacgccagcctccgggcggatgccgagaaggcccaggagcaacagcagcagatggccgagctgcacagcaagttacagtcctccgaggcggaggtgcgcagcaaatgcgaggagctgagtggcctccacgggcagctccaggaggccagggcggagaactcccagctcacagagagaatccgttccattgaggccctgctggaggcgggccaggcgcgggatgcccaggacgtccaggccagccaggcggaggctgaccagcagcagactcgcctcaaggagctggagtcccaggtgtcgggtctggagaaggaggccatcgagctcagggaggccgtcgagcagcagaaagtgaagaacaatgacctccgggagaagaactggaaggccatggaggcactggccacggccgagcaggcctgcaaggagaagctgctctccctgacccaggccaaggaggaatcggagaagcagctctgtctgattgaggcgcagaccatggaggccctgctggctctgctcccagaactctctgtcttggcacaacagaattacaccgagtggctgcaggatctcaaagagaaaggccccacgctgctgaagcacccgccagctcccgcggagccctcctcggacctggcctccaagttgagggaggccgaggagacgcagagcacactgcaggccgagtgtgaccagtaccgcagcatcctggcggagacggagggcatgctcagagacctgcagaagagcgtggaggaggaggagcaggtgtggagggccaaggtgggcgccgcagaggaggagctccagaagtcccgggtcacagtgaagcatctcgaagagattgtagagaagctaaaaggagaacttgaaagttcggaccaggtgagggagcacacgtcgcatttggaggcagagctggaaaagcacatggcggccgccagcgccgagtgccagaactacgccaaggaggtggcagggctgaggcaacttctcctagaatctcaatctcagctcgatgccgccaagagcgaagcccagaaacagagcgatgagcttgccctggtcaggcagcagttgagtgaaatgaagagccacgtagaggatggtgacatagctggggccccagcttcctccccagaggcgcccccagccgagcaggaccccgttcagctgaagacgcagctggagtggacagaagccatcctggaggatgagcagacacagcggcagaagctcacggccgagtttgaggaggctcagacctcggcatgtcggttacaagaagaattggagaagctccgcacagccggccccctagagtcttcagaaacagaggaggcctcacagctgaaggagagactagaaaaagagaagaagttaacaagtgacctggggcgcgccgccacgagactgcaggagcttctgaagacgacccaggagcagctggcaagggagaaggacacggtgaagaagctgcaggaacagctggaaaaggcagaggacggcagcagctcaaaggagggcacctctgtctgagtttcctctttggaaaaagaagttactgttcaacttaccaaaatgccttacacattccttacaaataaaccaaccaacctacacagcgttatccaggcccaacttccggtagctccgagagaagccatgagagacaagtctcttagagccacagaagtagaccttccagagccccagtttgtaaatgaacctgtgtcacatttgataaacactatcctgggcgcagccccgggccaccgccgagtgacgccaaagccctggttgactctgacagccccgtgggtgtgtgggaggccgggcgctctggggtctgtctgtcagtgcaatcgtttagtgttttttcagtggggcggggcgggaagcgggtgggaccgggcagccagttctcaaaggctgtggggccgactggaggccacagcccctcacccctagacgttgccaaccagaactgacgtgtgacctcctgggtgttgatgccattaaaaccaacgttggtgcccggtg

SEQ ID NO: 26731 - DNA, 3727 bp, Homo sapiens
  source 1..3727: mol_type = unassigned DNA
gaaggcaggaggcggcgatcccggcggagggggccgttcgccagctctgaggcagaaagtgccacgactccacacgcgcgcacgcagccagcgagcggccggagcggacggcagacggggcgggcggcgtcagggtcgcagcgtctacagctgctcgggggcggtttcttggcggaggcttggccggctcctctctcccggctccgcggcggctgcgaaggcggcggctcctgccctctcgctttccctctcgcgtctctggctgcaggtgaaaggaaagcaagccaggatggatatttacgacactcaaaccttgggggttgtggtctttggaggattcatggttgtttctgccattggcatcttcctggtgtcgactttctccatgaaggaaacgtcatatgaagaagccctagccaaccagcgcaaggagatggcgaaaactcaccaccagaaagtcgagaagaaaaagaaggagaaaacagtggagaagaaaggaaagaccaagaaaaaggaagagaaacctaatgggaagatacctgatcatgatccagcccccaatgtgactgtcctccttcgagaaccagtgcgggctcctgctgtggctgtggctccaaccccagtgcagccccccattatcgttgctcctgtcgccacagttccagccatgccccaggagaagctggcctcctcccccaaggacaaaaagaagaaggagaaaaaagtggcaaaagtggaaccagctgtcagctctgtagtgaattccatccaggttctcacttcgaaggctgccatcttggaaactgctcccaaggagggcagaaatacagatgtggcccagagcccagaggcaccaaagcaagaggctcctgccaagaagaagtctggttcaaagaaaaaagggcccccagatgccgacggccctctctacctcccctacaagacgctggtctccacggttgggagcatggtgttcaacgagggcgaggcccagcggctcatcgagatcctgtctgagaaggctggcatcattcaggacacctggcacaaggccactcagaagggtgaccctgtggcgattctgaaacgccagctggaagagaaggaaaaactgctggccacagaacaggaagatgcggctgtcgccaagagcaaactgagggagctcaacaaggagatggcagcagaaaaggccaaagcagcagccggggaggccaaagtgaaaaagcagctggtggcccgggagcaggagatcacggctgtgcaggcacgcatgcaggccagctaccgggagcacgtgaaggaggtgcagcagctgcagggcaagatccggactcttcaggagcagctggagaatggccccaacacgcagctggcccgcctgcagcaggagaactccatcctgcgggatgccttgaaccaggccacgagccaggtggagagcaagcagaacgcagagctggccaagcttcggcaggagctcagcaaggtcagcaaagagctggtggagaagtcagaggctgtgcggcaagatgagcagcagcggaaagctctggaagccaaggcagctgccttcgagaagcaggtcctgcagctgcaggcgtcccacagggagagtgaggaggccctgcagaagcgcctggacgaggtcagccgggagctgtgccacacgcagagcagccacgccagcctccgggcggatgccgagaaggcccaggagcaacagcagcagatggccgagctgcacagcaagttacagtcctccgaggcggaggtgcgcagcaaatgcgaggagctgagtggcctccacgggcagctccaggaggccagggcggagaactcccagctcacagagagaatccgttccattgaggccctgctggaggcgggccaggcgcgggatgcccaggacgtccaggccagccaggcggaggctgaccagcagcagactcgcctcaaggagctggagtcccaggtgtcgggtctggagaaggaggccatcgagctcagggaggccgtcgagcagcagaaagtgaagaacaatgacctccgggagaagaactggaaggccatggaggcactggccacggccgagcaggcctgcaaggagaagctgctctccctgacccaggccaaggaggaatcggagaagcagctctgtctgattgaggcgcagaccatggaggccctgctggctctgctcccagaactctctgtcttggcacaacagaattacaccgagtggctgcaggatctcaaagagaaaggccccacgctgctgaagcacccgccagctcccgcggagccctcctcggacctggcctccaagttgagggaggccgaggagacgcagagcacactgcaggccgagtgtgaccagtaccgcagcatcctggcggagacggagggcatgctcagagacctgcagaagagcgtggaggaggaggagcaggtgtggagggccaaggtgggcgccgcagaggaggagctccagaagtcccgggtcacagtgaagcatctcgaagagattgtagagaagctaaaaggagaacttgaaagttcggaccaggtgagggagcacacgtcgcatttggaggcagagctggaaaagcacatggcggccgccagcgccgagtgccagaactacgccaaggaggtggcagggctgaggcaacttctcctagaatctcaatctcagctcgatgccgccaagagcgaagcccagaaacagagcgatgagcttgccctggtcaggcagcagttgagtgaaatgaagagccacgtagaggatggtgacatagctggggccccagcttcctccccagaggcgcccccagccgagcaggaccccgttcagctgaagacgcagctggagtggacagaagccatcctggaggatgagcagacacagcggcagaagctcacggccgagtttgaggaggctcagacctcggcatgtcggttacaagaagaattggagaagctccgcacagccggccccctagagtcttcagaaacagaggaggcctcacagctgaaggagagactagaaaaagagaagaagttaacaagtgacctggggcgcgccgccacgagactgcaggagcttctgaagacgacccaggagcagctggcaagggagaaggacacggtgaagaagctgcaggaacagctggaaaaggcagaggacggcagcagctcaaaggagggcacctctgtctgagtttcctctttggaaaaagaagttactgttcaacttaccaaaatgccttacacattccttacaaataaaccaaccaacctacacagcgttatccaggcccaacttccggtagctccgagagaagccatgagagacaagtctcttagagccacagaagtagaccttccagagccccagtttgtaaatgaacctgtgtcacatttgataaacactatcctgggcgcagccccgggccaccgccgagtgacgccaaagccctggttgactctgacagccccgtgggtgtgtgggaggccgggcgctctggggtctgtctgtcagtgcaatcgtttagtgttttttcagtggggcggggcgggaagcgggtgggaccgggcagccagttctcaaaggctgtggggccgactggaggccacagcccctcacccctagacgttgccaaccagaactgacgtgtgacctcctgggtgttgatgccattaaaaccaacgttggtgcccggtg

SEQ ID NO: 26732 - DNA, 3792 bp, Homo sapiens
  source 1..3792: mol_type = unassigned DNA
cggcgatcccggcggagggggccgttcgccagctctgaggcagaaagtgccacgactccacacgcgcgcacgcagccagcgagcggccggagcggacggcagacggggcgggcggcgtcagggtcgcagcgtctacagctgctcgggggcggtttcttggcggaggcttggccggctcctctctcccggctccgcggcggctgcgaaggcggcggctcctgccctctcgctttccctctcgcgtctctggctgcagaaagaagcttccggttctgaggtcctggaggtgccatttccctctctgttgaagcaaaggccggggcagacctcctagtgaaaggaaagcaagccaggatggatatttacgacactcaaaccttgggggttgtggtctttggaggattcatggttgtttctgccattggcatcttcctggtgtcgactttctccatgaaggaaacgtcatatgaagaagccctagccaaccagcgcaaggagatggcgaaaactcaccaccagaaagtcgagaagaaaaagaaggagaaaacagtggagaagaaaggaaagaccaagaaaaaggaagagaaacctaatgggaagatacctgatcatgatccagcccccaatgtgactgtcctccttcgagaaccagtgcgggctcctgctgtggctgtggctccaaccccagtgcagccccccattatcgttgctcctgtcgccacagttccagccatgccccaggagaagctggcctcctcccccaaggacaaaaagaagaaggagaaaaaagtggcaaaagtggaaccagctgtcagctctgtagtgaattccatccaggttctcacttcgaaggctgccatcttggaaactgctcccaaggagggcagaaatacagatgtggcccagagcccagaggcaccaaagcaagaggctcctgccaagaagaagtctggttcaaagaaaaaagggcccccagatgccgacggccctctctacctcccctacaagacgctggtctccacggttgggagcatggtgttcaacgagggcgaggcccagcggctcatcgagatcctgtctgagaaggctggcatcattcaggacacctggcacaaggccactcagaagggtgaccctgtggcgattctgaaacgccagctggaagagaaggaaaaactgctggccacagaacaggaagatgcggctgtcgccaagagcaaactgagggagctcaacaaggagatggcagcagaaaaggccaaagcagcagccggggaggccaaagtgaaaaagcagctggtggcccgggagcaggagatcacggctgtgcaggcacgcatgcaggccagctaccgggagcacgtgaaggaggtgcagcagctgcagggcaagatccggactcttcaggagcagctggagaatggccccaacacgcagctggcccgcctgcagcaggagaactccatcctgcgggatgccttgaaccaggccacgagccaggtggagagcaagcagaacgcagagctggccaagcttcggcaggagctcagcaaggtcagcaaagagctggtggagaagtcagaggctgtgcggcaagatgagcagcagcggaaagctctggaagccaaggcagctgccttcgagaagcaggtcctgcagctgcaggcgtcccacagggagagtgaggaggccctgcagaagcgcctggacgaggtcagccgggagctgtgccacacgcagagcagccacgccagcctccgggcggatgccgagaaggcccaggagcaacagcagcagatggccgagctgcacagcaagttacagtcctccgaggcggaggtgcgcagcaaatgcgaggagctgagtggcctccacgggcagctccaggaggccagggcggagaactcccagctcacagagagaatccgttccattgaggccctgctggaggcgggccaggcgcgggatgcccaggacgtccaggccagccaggcggaggctgaccagcagcagactcgcctcaaggagctggagtcccaggtgtcgggtctggagaaggaggccatcgagctcagggaggccgtcgagcagcagaaagtgaagaacaatgacctccgggagaagaactggaaggccatggaggcactggccacggccgagcaggcctgcaaggagaagctgctctccctgacccaggccaaggaggaatcggagaagcagctctgtctgattgaggcgcagaccatggaggccctgctggctctgctcccagaactctctgtcttggcacaacagaattacaccgagtggctgcaggatctcaaagagaaaggccccacgctgctgaagcacccgccagctcccgcggagccctcctcggacctggcctccaagttgagggaggccgaggagacgcagagcacactgcaggccgagtgtgaccagtaccgcagcatcctggcggagacggagggcatgctcagagacctgcagaagagcgtggaggaggaggagcaggtgtggagggccaaggtgggcgccgcagaggaggagctccagaagtcccgggtcacagtgaagcatctcgaagagattgtagagaagctaaaaggagaacttgaaagttcggaccaggtgagggagcacacgtcgcatttggaggcagagctggaaaagcacatggcggccgccagcgccgagtgccagaactacgccaaggaggtggcagggctgaggcaacttctcctagaatctcaatctcagctcgatgccgccaagagcgaagcccagaaacagagcgatgagcttgccctggtcaggcagcagttgagtgaaatgaagagccacgtagaggatggtgacatagctggggccccagcttcctccccagaggcgcccccagccgagcaggaccccgttcagctgaagacgcagctggagtggacagaagccatcctggaggatgagcagacacagcggcagaagctcacggccgagtttgaggaggctcagacctcggcatgtcggttacaagaagaattggagaagctccgcacagccggccccctagagtcttcagaaacagaggaggcctcacagctgaaggagagactagaaaaagagaagaagttaacaagtgacctggggcgcgccgccacgagactgcaggagcttctgaagacgacccaggagcagctggcaagggagaaggacacggtgaagaagctgcaggaacagctggaaaaggcagaggacggcagcagctcaaaggagggcacctctgtctgagtttcctctttggaaaaagaagttactgttcaacttaccaaaatgccttacacattccttacaaataaaccaaccaacctacacagcgttatccaggcccaacttccggtagctccgagagaagccatgagagacaagtctcttagagccacagaagtagaccttccagagccccagtttgtaaatgaacctgtgtcacatttgataaacactatcctgggcgcagccccgggccaccgccgagtgacgccaaagccctggttgactctgacagccccgtgggtgtgtgggaggccgggcgctctggggtctgtctgtcagtgcaatcgtttagtgttttttcagtggggcggggcgggaagcgggtgggaccgggcagccagttctcaaaggctgtggggccgactggaggccacagcccctcacccctagacgttgccaaccagaactgacgtgtgacctcctgggtgttgatgccattaaaaccaacgttggtgcccggtg

SEQ ID NO: 26733 - DNA, 5041 bp, Homo sapiens
  source 1..5041: mol_type = unassigned DNA
cacgactccacacgcgcgcacgcagccagcgagcggccggagcggacggcagacggggcgggcggcgtcagggtcgcagcgtctacagctgctcgggggcggtttcttggcggaggcttggccggctcctctctcccggctccgcggcggctgcgaaggcggcggctcctgccctctcgctttccctctcgcgtctctggctgcagaaagaagcttccggttctgaggtcctggaggtgccatttccctctctgttgaagcaaaggccggggcagacctcctagtgaaaggaaagcaagccaggatggatatttacgacactcaaaccttgggggttgtggtctttggaggattcatggttgtttctgccattggcatcttcctggtgtcgactttctccatgaaggaaacgtcatatgaagaagccctagccaaccagcgcaaggagatggcgaaaactcaccaccagaaagtcgagaagaaaaagaaggagaaaacagtggagaagaaaggaaagaccaagaaaaaggaagagaaacctaatgggaagatacctgatcatgatccagcccccaatgtgactgtcctccttcgagaaccagtgcgggctcctgctgtggctgtggctccaaccccagtgcagccccccattatcgttgctcctgtcgccacagttccagccatgccccaggagaagctggcctcctcccccaaggacaaaaagaagaaggagaaaaaagtggcaaaagtggaaccagctgtcagctctgtagtgaattccatccaggttctcacttcgaaggctgccatcttggaaactgctcccaaggaggtgccgatggtggtggtgcccccagtgggtgccaagggcaacacaccagccactggcactactcagggcaaaaaggcggaggggactcagaatcaaagcaaaaaggctgaaggagccccaaaccagggcagaaaggcagagggaaccccaaaccagggcaaaaagacagagggaaccccaaaccaagggaaaaaggcagagggaaccccaaaccaaggcaaaaaggcagaaggaaccccaaaccaaggcaaaaaggcggagggggcccagaaccagggtaaaaaggtagatacaaccccaaaccaggggaaaaaggtggagggggccccaacccagggcagaaaggccgagggggctcagaaccaggccaaaaaggtagaaggggcccagaaccagggcaaaaaggcagagggggcccagaatcagggcaaaaagggagagggggcccagaaccagggcaagaaggccgagggggcccagaatcagggcaagaaggccgagggggcccagaatcagggcaagaaggccgagggggcccagaatcagggcaagaaggccgagggggcccagaatcagggcaagaaggctgagggggctcagaaccagggcaaaaagtccgagggggctcagaaccagggcaaaaaagtagaaggggcccagaaccagggcaagaaggctgagggtgcccagaaccagggcaaaaaggccgagggggcccagaatcagggcaaaaaggccgagggggcccagaaccagggcaagaaggccgagggggcccagaaccagggcaagaaggccgagggggcccagaaccagggcaagaaggccgagggggcccagaaccagggcaagaaggccgagggtgctcagaaccagggcaaaaaagtagaaggggcccagaaccagggcaagaaggctgagggggcccagaaccagggcaagaaggccgagggggctcagaaccagggcaaaaaggccgagggagcccagaaccagggccaaaaaggagagggagcccagaatcagggtaaaaagacagaaggggctcagggcaaaaaggcagaaaggagtcccaaccaaggcaaaaaaggagagggagctcccatccagggcaaaaaggcagattcggttgctaatcagggcacaaaggtagagggtattacaaaccaggggaaaaaagcagaagggtcccccagtgaaggcaaaaaggcagaagggtcccccaaccaaggcaaaaaggcagacgcagctgccaatcagggtaaaaagacagagtcagcttctgtccagggcagaaatacagatgtggcccagagcccagaggcaccaaagcaagaggctcctgccaagaagaagtctggttcaaagaaaaaaggtgagcctgggcccccagatgccgacggccctctctacctcccctacaagacgctggtctccacggttgggagcatggtgttcaacgagggcgaggcccagcggctcatcgagatcctgtctgagaaggctggcatcattcaggacacctggcacaaggccactcagaagggtgaccctgtggcgattctgaaacgccagctggaagagaaggaaaaactgctggccacagaacaggaagatgcggctgtcgccaagagcaaactgagggagctcaacaaggagatggcagcagaaaaggccaaagcagcagccggggaggccaaagtgaaaaagcagctggtggcccgggagcaggagatcacggctgtgcaggcacgcatgcaggccagctaccgggagcacgtgaaggaggtgcagcagctgcagggcaagatccggactcttcaggagcagctggagaatggccccaacacgcagctggcccgcctgcagcaggagaactccatcctgcgggatgccttgaaccaggccacgagccaggtggagagcaagcagaacgcagagctggccaagcttcggcaggagctcagcaaggtcagcaaagagctggtggagaagtcagaggctgtgcggcaagatgagcagcagcggaaagctctggaagccaaggcagctgccttcgagaagcaggtcctgcagctgcaggcgtcccacagggagagtgaggaggccctgcagaagcgcctggacgaggtcagccgggagctgtgccacacgcagagcagccacgccagcctccgggcggatgccgagaaggcccaggagcaacagcagcagatggccgagctgcacagcaagttacagtcctccgaggcggaggtgcgcagcaaatgcgaggagctgagtggcctccacgggcagctccaggaggccagggcggagaactcccagctcacagagagaatccgttccattgaggccctgctggaggcgggccaggcgcgggatgcccaggacgtccaggccagccaggcggaggctgaccagcagcagactcgcctcaaggagctggagtcccaggtgtcgggtctggagaaggaggccatcgagctcagggaggccgtcgagcagcagaaagtgaagaacaatgacctccgggagaagaactggaaggccatggaggcactggccacggccgagcaggcctgcaaggagaagctgctctccctgacccaggccaaggaggaatcggagaagcagctctgtctgattgaggcgcagaccatggaggccctgctggctctgctcccagaactctctgtcttggcacaacagaattacaccgagtggctgcaggatctcaaagagaaaggccccacgctgctgaagcacccgccagctcccgcggagccctcctcggacctggcctccaagttgagggaggccgaggagacgcagagcacactgcaggccgagtgtgaccagtaccgcagcatcctggcggagacggagggcatgctcagagacctgcagaagagcgtggaggaggaggagcaggtgtggagggccaaggtgggcgccgcagaggaggagctccagaagtcccgggtcacagtgaagcatctcgaagagattgtagagaagctaaaaggagaacttgaaagttcggaccaggtgagggagcacacgtcgcatttggaggcagagctggaaaagcacatggcggccgccagcgccgagtgccagaactacgccaaggaggtggcagggctgaggcaacttctcctagaatctcaatctcagctcgatgccgccaagagcgaagcccagaaacagagcgatgagcttgccctggtcaggcagcagttgagtgaaatgaagagccacgtagaggatggtgacatagctggggccccagcttcctccccagaggcgcccccagccgagcaggaccccgttcagctgaagacgcagctggagtggacagaagccatcctggaggatgagcagacacagcggcagaagctcacggccgagtttgaggaggctcagacctcggcatgtcggttacaagaagaattggagaagctccgcacagccggccccctagagtcttcagaaacagaggaggcctcacagctgaaggagagactagaaaaagagaagaagttaacaagtgacctggggcgcgccgccacgagactgcaggagcttctgaagacgacccaggagcagctggcaagggagaaggacacggtgaagaagctgcaggaacagctggaaaaggcagaggacggcagcagctcaaaggagggcacctctgtctgagtttcctctttggaaaaagaagttactgttcaacttaccaaaatgccttacacattccttacaaataaaccaaccaacctacacagcgttatccaggcccaacttccggtagctccgagagaagccatgagagacaagtctcttagagccacagaagtagaccttccagagccccagtttgtaaatgaacctgtgtcacatttgataaacactatcctgggcgcagccccgggccaccgccgagtgacgccaaagccctggttgactctgacagccccgtgggtgtgtgggaggccgggcgctctggggtctgtctgtcagtgcaatcgtttagtgttttttcagtggggcggggcgggaagcgggtgggaccgggcagccagttctcaaaggctgtggggccgactggaggccacagcccctcacccctagacgttgccaaccagaactgacgtgtgacctcctgggtgttgatgccattaaaaccaacgttggtgcccggtg

SEQ ID NO: 26734 - DNA, 1191 bp, Homo sapiens
  source 1..1191: mol_type = unassigned DNA
gaaggcaggaggcggcgatcccggcggagggggccgttcgccagctctgaggcagaaagtgccacgactccacacgcgcgcacgcagccagcgagcggccggagcggacggcagacggggcgggcggcgtcagggtcgcagcgtctacagctgctcgggggcggtttcttggcggaggcttggccggctcctctctcccggctccgcggcggctgcgaaggcggcggctcctgccctctcgctttccctctcgcgtctctggctgcaggtgaaaggaaagcaagccaggatggatatttacgacactcaaaccttgggggttgtggtctttggaggattcatggttgtttctgccattggcatcttcctggtgtcgactttctccatgaaggaaacgtcatatgaagaagccctagccaaccagcgcaaggagatggcgaaaactcaccaccagaaagtcgagaagaaaaagaaggagaaaacagtggagaagaaaggaaagaccaagaaaaaggaagagaaacctaatgggaagatacctgatcatgatccagcccccaatgtgactgtcctccttcgagaaccagtgcgggctcctgctgtggctgtggctccaaccccagtgcagccccccattatcgttgctcctgtcgccacagttccagccatgccccaggagaagctggcctcctcccccaaggacaaaaagaagaaggagaaaaaagtggcaaaagtggaaccagctgtcagctctgtagtgaattccatccaggttctcacttcgaaggctgccatcttggaaactgctcccaaggaggtgccgatggtggtggtgcccccagtgggtgccaagggcaacacaccagccactggcactactcagggcaaaaaggcggaggggactcagaatcaaagcaaaaaggctgaaggagccccaaaccagggcagaaaggcagagggaaccccaaaccagggcaaaaagacagagggaaccccaaaccaagggaaaaaggcagagggaaccccaaaccaaggcaaaaaggcagaaggaaccccaaaccaaggcaaaaaggcggagggggcccagaaccagggtaaaaaggtagatacaaccccaaaccaggggaaaaaggtggagggggccccaacccagggcagaaaggccgagggggctcagaaccaggccaaaaa

SEQ ID NO: 26735 - DNA, 2485 bp, Homo sapiens
  source 1..2485: mol_type = unassigned DNA
ctctcgctttccctctcgcgtctctggctgcagaaagaagcttccggttctgaggtcctggaggtgccatttccctctctgttgaagcaaaggccggggcagacctcctaggcccccagatgccgacggccctctctacctcccctacaagacgctggtctccacggttgggagcatggtgttcaacgagggcgaggcccagcggctcatcgagatcctgtctgagaaggctggcatcattcaggacacctggcacaaggccactcagaagggtgaccctgtggcgattctgaaacgccagctggaagagaaggaaaaactgctggccacagaacaggaagatgcggctgtcgccaagagcaaactgagggagctcaacaaggagatggcagcagaaaaggccaaagcagcagccggggaggccaaagtgaaaaagcagctggtggcccgggagcaggagatcacggctgtgcaggcacgcatgcaggccagctaccgggagcacgtgaaggaggtgcagcagctgcagggcaagatccggactcttcaggagcagctggagaatggccccaacacgcagctggcccgcctgcagcaggagaactccatcctgcgggatgccttgaaccaggccacgagccaggtggagagcaagcagaacgcagagctggccaagcttcggcaggagctcagcaaggtcagcaaagagctggtggagaagtcagaggctgtgcggcaagatgagcagcagcggaaagctctggaagccaaggcagctgccttcgagaagcaggtcctgcagctgcaggcgtcccacagggagagtgaggaggccctgcagaagcgcctggacgaggtcagccgggagctgtgccacacgcagagcagccacgccagcctccgggcggatgccgagaaggcccaggagcaacagcagcagatggccgagctgcacagcaagttacagtcctccgaggcggaggtgcgcagcaaatgcgaggagctgagtggcctccacgggcagctccaggaggccagggcggagaactcccagctcacagagagaatccgttccattgaggccctgctggaggcgggccaggcgcgggatgcccaggacgtccaggccagccaggcggaggctgaccagcagcagactcgcctcaaggagctggagtcccaggtgtcgggtctggagaaggaggccatcgagctcagggaggccgtcgagcagcagaaagtgaagaacaatgacctccgggagaagaactggaaggccatggaggcactggccacggccgagcaggcctgcaaggagaagctgctctccctgacccaggccaaggaggaatcggagaagcagctctgtctgattgaggcgcagaccatggaggccctgctggctctgctcccagaactctctgtcttggcacaacagaattacaccgagtggctgcaggatctcaaagagaaaggccccacgctgctgaagcacccgccagctcccgcggagccctcctcggacctggcctccaagttgagggaggccgaggagacgcagagcacactgcaggccgagtgtgaccagtaccgcagcatcctggcggagacggagggcatgctcagagacctgcagaagagcgtggaggaggaggagcaggtgtggagggccaaggtgggcgccgcagaggaggagctccagaagtcccgggtcacagtgaagcatctcgaagagattgtagagaagctaaaaggagaacttgaaagttcggaccaggtgagggagcacacgtcgcatttggaggcagagctggaaaagcacatggcggccgccagcgccgagtgccagaactacgccaaggaggtggcagggctgaggcaacttctcctagaatctcaatctcagctcgatgccgccaagagcgaagcccagaaacagagcgatgagcttgccctggtcaggcagcagttgagtgaaatgaagagccacgtagaggatggtgacatagctggggccccagcttcctccccagaggcgcccccagccgagcaggaccccgttcagctgaagacgcagctggagtggacagaagccatcctggaggatgagcagacacagcggcagaagctcacggccgagtttgaggaggctcagacctcggcatgtcggttacaagaagaattggagaagctccgcacagccggccccctagagtcttcagaaacagaggaggcctcacagctgaaggagagactagaaaaagagaagaagttaacaagtgacctggggcgcgccgccacgagactgcaggagcttctgaagacgacccaggagcagctggcaagggagaaggacacggtgaagaagctgcaggaacagctggaaaaggcagaggacggcagcagctcaaaggagggcacctctgtctgagtttcctctttggaaaaagaagttactgttcaacttaccaaaatgccttacaca

SEQ ID NO: 26736 - DNA, 2415 bp, Homo sapiens
  source 1..2415: mol_type = unassigned DNA
atggcgtcgggctgcaagattggcccgtccatcctcaacagcgacctggccaatttaggggccgagtgcctccggatgctagactctggggccgattatctgcacctggacgtaatggacgggtacatgcacatgatggtgtccaagccagaacagtgggtaaagccaatggctgtagcaggagccaatcagtacacctttcatctcgaggctactgagaacccaggggctttgattaaagacattcgggagaatgggatgaagtcttgctctgtcacccaggctgaagtgcagtggcacagtcagggcccattgcaggttggccttgccatcaaaccaggaacctcagttgagtatttggcaccatgggctaatcagatagatatggccttggttatgacagtggaaccggggtttggagggcagaaattcatggaagatatgatgccaaaggttcactggttgaggacccagttcccatctttggatatagaggtcgatggtggagtaggtcctgacactgtccataaatgtgcagaggcaggagctaacatgattgtgtctggcagtgctattatgaggagtgaagaccccagatctgtgatcaatctattaagaaatgtttgctcagaagctgctcagaaacgttctcttgatcggtgaaaccataaggagcccagtgttcctgttcatgaaatctcccttttactggaaaacaggaatattgactaccaaatcacaatgcaattgaagccgtactgcttttttgagcagttattcattccagtgattaaaactgattgtgcagaatattctaagaggtcagaaattggtgtgtataactacatttttagtgatgcaatttattgattagtgagtaagatactgtttttattgagagatttgatttttataaagtaaaaatacggctgcattagggttacaaacagaaaagtgtcttaatgtctaaggagggcatattagctacactacaaaaacaaattttgtctgtacttctgaaaagaattttgttgtttctcagctgttttccaaaagcaaaggaagtctttatggtttttttctatttcatgttattgtgatttgtttataagtttgggtggggtgcataccatattcttggttcttaaaatctatcacttttcaccttacacttgatgtgtgaaaactataaaaacaatgtgtgaaacccaggggttctaaaatacaagcatagattttatcagggtgttttgtcaaagcaggttattcagtgattcctccccaccattcttaagaacgttaaataatgctgttgtgttagctctgagtagaaaggaaaaagtaaaacctctgtttggaggtaatattgggttgaattctgactgcccctttctagctggacctttaacaaatcacccaatcttttttgtgtttctctaaagtcatttatacattaaatgtaattatagcaactgtggggttctgttgagaattaagagctaacactatatatgtaaagtttccagtactagtcccagaatttagaatatgctcaacacaaagtaaacagcattatataagtttatatttttgtgagttataaagtactttgatatattctcattaaatctgtaaatcacctctataagtaagtggtaataataaagcagatatttttgtccccatttaaaaaatgaagaaattaatgcttaatagggtggtaccctggaaaggatctgggaagtggtagaatttctggtctgtacttttacaaatggagcccttgggaggtgggttaggtaaaagaagctttttacttaacgttgtcttatttccagtctaattttacgctgtagcagaaccagatggctgagaaaattctggaactatggatcttgaccccaaggatatattattttattccaagaaagatcaggtaggcgaaaagatgacaggatacagagtcaatccataaactaaatatttataactgttctgaattatacagagtctaaaaatatgtgtcagctacttcattcctgtaaatactcttgctgtgttataaatatggcaagaaataaacatgaccaatatcaatagacttcttgaggctactataagttttgagaaataaggttcaaaaaataagaatgctaacacttaagcacagactagagcttgcttgggtttcttcctgcattacaaggtaaaaatttgttaatgtttgtttttattcagcttgggaaagctttgtgccatgaatacgtcgcatttaataacaagcaacacacggcatatagaaataactttaattaaaaaacttacatagaagattataatatcagacgtgacaaagatttgagtttatttgcctggacaacttgggtttgtctggcttttgttttctttttcttt

SEQ ID NO: 26737 - DNA, 2569 bp, Homo sapiens
  source 1..2569: mol_type = unassigned DNA
acggagaaggggcggggccaaaactgcgcgcccaatcggggtgacgctctagccttgccggggactcgtgggtaacttgcttttgggagccagcggtatggcgtcgggctgcaagattggcccgtccatcctcaacagcgacctggccaatttaggggccgagtgcctccggatgctagactctggggccgattatctgcacctggacgtaatggacgggcattttgttcccaacatcacctttggtcaccctgtggtagaaagccttcgaaagcagctaggccaggaccctttctttgacatgcacatgatggtgtccaagccagaacagtgggtaaagccaatggctgtagcaggagccaatcagtacacctttcatctcgaggctactgagaacccaggggctttgattaaagacattcgggagaatgggatgaaggttggccttgccatcaaaccaggaacctcagttgagtatttggcaccatgggctaatcagatagatatggccttggttatgacagtggaaccggggtttggagggcagaaattcatggaagatatgatgccaaaggttcactggttgaggacccagttcccatctttggatatagaggtcgatggtggagtaggtcctgacactgtccataaatgtgcagaggcaggagctaacatgattgtgtctggcagtgctattatgaggagtgaagaccccagatctgtgatcaatctattaagaaatgtttgctcagaagctgctcagaaacgttctcttgatcggtgaaaccataaggagcccagtgttcctgttcatgaaatctcccttttactggaaaacaggaatattgactaccaaatcacaatgcaattgaagccgtactgcttttttgagcagttattcattccagtgattaaaactgattgtgcagaatattctaagaggtcagaaattggtgtgtataactacatttttagtgatgcaatttattgattagtgagtaagatactgtttttattgagagatttgatttttataaagtaaaaatacggctgcattagggttacaaacagaaaagtgtcttaatgtctaaggagggcatattagctacactacaaaaacaaattttgtctgtacttctgaaaagaattttgttgtttctcagctgttttccaaaagcaaaggaagtctttatggtttttttctatttcatgttattgtgatttgtttataagtttgggtggggtgcataccatattcttggttcttaaaatctatcacttttcaccttacacttgatgtgtgaaaactataaaaacaatgtgtgaaacccaggggttctaaaatacaagcatagattttatcagggtgttttgtcaaagcaggttattcagtgattcctccccaccattcttaagaacgttaaataatgctgttgtgttagctctgagtagaaaggaaaaagtaaaacctctgtttggaggtaatattgggttgaattctgactgcccctttctagctggacctttaacaaatcacccaatcttttttgtgtttctctaaagtcatttatacattaaatgtaattatagcaactgtggggttctgttgagaattaagagctaacactatatatgtaaagtttccagtactagtcccagaatttagaatatgctcaacacaaagtaaacagcattatataagtttatatttttgtgagttataaagtactttgatatattctcattaaatctgtaaatcacctctataagtaagtggtaataataaagcagatatttttgtccccatttaaaaaatgaagaaattaatgcttaatagggtggtaccctggaaaggatctgggaagtggtagaatttctggtctgtacttttacaaatggagcccttgggaggtgggttaggtaaaagaagctttttacttaacgttgtcttatttccagtctaattttacgctgtagcagaaccagatggctgagaaaattctggaactatggatcttgaccccaaggatatattattttattccaagaaagatcaggtaggcgaaaagatgacaggatacagagtcaatccataaactaaatatttataactgttctgaattatacagagtctaaaaatatgtgtcagctacttcattcctgtaaatactcttgctgtgttataaatatggcaagaaataaacatgaccaatatcaatagacttcttgaggctactataagttttgagaaataaggttcaaaaaataagaatgctaacacttaagcacagactagagcttgcttgggtttcttcctgcattacaaggtaaaaatttgttaatgtttgtttttattcagcttgggaaagctttgtgccatgaatacgtcgcatttaataacaagcaacacacggcatatagaaataactttaattaaaaaacttacatagaagattataatatcagacgtgacaaagatttgagtttatttgcctggacaacttgggtttgtctggcttttgttttctttttctttaaaaataaatgtacagtaaaactacaagcaaaa

SEQ ID NO: 26738 - DNA, 2511 bp, Homo sapiens
  source 1..2511: mol_type = unassigned DNA
actcgtgggtaacttgcttttgggagccagcggtatggcgtcgggctgcaagattggcccgtccatcctcaacagcgacctggccaatttaggggccgagtgcctccggatgctagactctggggccgattatctgcacctggacgtaatggacgggcaccctgctcttcagggaggtcagttttttacatgcacatgatggtgtccaagccagaacagtgggtaaagccaatggctgtagcaggagccaatcagtacacctttcatctcgaggctactgagaacccaggggctttgattaaagacattcgggagaatgggatgaagtcttgctctgtcacccaggctgaagtgcagtggcacagtcagggcccattgcaggttggccttgccatcaaaccaggaacctcagttgagtatttggcaccatgggctaatcagatagatatggccttggttatgacagtggaaccggggtttggagggcagaaattcatggaagatatgatgccaaaggttcactggttgaggacccagttcccatctttggatatagaggtcgatggtggagtaggtcctgacactgtccataaatgtgcagaggcaggagctaacatgattgtgtctggcagtgctattatgaggagtgaagaccccagatctgtgatcaatctattaagaaatgtttgctcagaagctgctcagaaacgttctcttgatcggtgaaaccataaggagcccagtgttcctgttcatgaaatctcccttttactggaaaacaggaatattgactaccaaatcacaatgcaattgaagccgtactgcttttttgagcagttattcattccagtgattaaaactgattgtgcagaatattctaagaggtcagaaattggtgtgtataactacatttttagtgatgcaatttattgattagtgagtaagatactgtttttattgagagatttgatttttataaagtaaaaatacggctgcattagggttacaaacagaaaagtgtcttaatgtctaaggagggcatattagctacactacaaaaacaaattttgtctgtacttctgaaaagaattttgttgtttctcagctgttttccaaaagcaaaggaagtctttatggtttttttctatttcatgttattgtgatttgtttataagtttgggtggggtgcataccatattcttggttcttaaaatctatcacttttcaccttacacttgatgtgtgaaaactataaaaacaatgtgtgaaacccaggggttctaaaatacaagcatagattttatcagggtgttttgtcaaagcaggttattcagtgattcctccccaccattcttaagaacgttaaataatgctgttgtgttagctctgagtagaaaggaaaaagtaaaacctctgtttggaggtaatattgggttgaattctgactgcccctttctagctggacctttaacaaatcacccaatcttttttgtgtttctctaaagtcatttatacattaaatgtaattatagcaactgtggggttctgttgagaattaagagctaacactatatatgtaaagtttccagtactagtcccagaatttagaatatgctcaacacaaagtaaacagcattatataagtttatatttttgtgagttataaagtactttgatatattctcattaaatctgtaaatcacctctataagtaagtggtaataataaagcagatatttttgtccccatttaaaaaatgaagaaattaatgcttaatagggtggtaccctggaaaggatctgggaagtggtagaatttctggtctgtacttttacaaatggagcccttgggaggtgggttaggtaaaagaagctttttacttaacgttgtcttatttccagtctaattttacgctgtagcagaaccagatggctgagaaaattctggaactatggatcttgaccccaaggatatattattttattccaagaaagatcaggtaggcgaaaagatgacaggatacagagtcaatccataaactaaatatttataactgttctgaattatacagagtctaaaaatatgtgtcagctacttcattcctgtaaatactcttgctgtgttataaatatggcaagaaataaacatgaccaatatcaatagacttcttgaggctactataagttttgagaaataaggttcaaaaaataagaatgctaacacttaagcacagactagagcttgcttgggtttcttcctgcattacaaggtaaaaatttgttaatgtttgtttttattcagcttgggaaagctttgtgccatgaatacgtcgcatttaataacaagcaacacacggcatatagaaataactttaattaaaaaacttacatagaagattataatatcagacgtgacaaagatttgagtttatttgcctggacaacttgggtttgtctggcttttgttttctttttctttaaaaataaatgtacagtaaaactacaagcaaaa

SEQ ID NO: 26739 - DNA, 1128 bp, Homo sapiens
  source 1..1128: mol_type = unassigned DNA
aaaactgcgcgcccaatcggggtgacgctctagccttgccggggactcgtgggtaacttgcttttgggagccagcggtatggcgtcgggctgcaagattggcccgtccatcctcaacagcgacctggccaatttaggggccgagtgcctccggatgctagactctggggccgattatctgcacctggacgtaatggacgggcattttgttcccaacatcacctttggtcaccctgtggtagaaagccttcgaaagcagctaggccaggaccctttctttgacatgcacatgatggtgtccaagccagaacagtgggtaaagccaatggctgtagcaggagccaatcagtacacctttcatctcgaggctactgagaacccaggggctttgattaaagacattcgggagaatgggatgaagtcttgctctgtcacccaggctgaagtgcagtggcacagtcagggcccattgcaggttggccttgccatcaaaccaggaacctcagttgagtatttggcaccatgggctaatcagatagatatggccttggttatgacagtggaaccggggtttggagggcagaaattcatggaagatatgatgccaaaggttcactggttgaggacccagttcccatctttggatatagaggtcgatggtggagtaggtcctgacactgtccataaatgtgcagaggcaggagctaacatgattgtgtctggcagtgctattatgaggagtgaagaccccagatctgtgatcaatctattaagaaatgtttgctcagaagctgctcagaaacgttctcttgatcggtgaaaccataaggagcccagtgttcctgttcatgaaatctcccttttactggaaaacaggaatattgactaccaaatcacaatgcaattgaagccgtactgcttttttgagcagttattcattccagtgattaaaactgattgtgcagaatattctaagaggtcagaaattggtgtgtataactacatttttagtgatgcaatttattgattagtgagtaagatactgtttttattgagagatttgatttttataaagtaaaaatacggctgcattagggttacaaacagaaaagtgtcttaatgtctaagg

SEQ ID NO: 26740 - DNA, 546 bp, Homo sapiens
  source 1..546: mol_type = unassigned DNA
gggtaacttgcttttgggagccagcggtatggcgtcgggctgcaagattggcccgtccatcctcaacagcgacctggccaatttaggggccgagtgcctccggatgctagactctggggccgattatctgcacctggacgtaatggacgggcaccctgctcttcagggaggtcagttttttgcattttgttcccaacatcacctttggtcaccctgtggtagaaagccttcgaaagcagctaggccaggaccctttctttgacatgcacatgatggtgtccaagccagaacagtgggtaaagccaatggctgtagcaggagccaatcagtacacctttcatctcgaggctactgagaacccaggggctttgattaaagacattcgggagaatgggatgaagtcttgctctgtcacccaggctgaagtgcagtggcacagtcagggcccattgcaggttggccttgccatcaaaccaggaacctcagttgagtatttggcaccatgggctaatcagatagatatggccttggttatgacagtggaac

SEQ ID NO: 26741 - DNA, 2130 bp, Homo sapiens
  source 1..2130: mol_type = unassigned DNA
actcgtgggtaacttgcttttgggagccagcggtatggcgtcgggctgcaagattggcccgtccatcctcaacagcgacctggccaatttaggggccgagtgcctccggatgctagactctggggccgattatctgcacctggacgtaatggacggacatgcacatgatggtgtccaagccagaacagtgggtaaagccaatggctgtagcaggagccaatcagtacacctttcatctcgaggctactgagaacccaggggctttgattaaagacattcgggagaatgggatgaagtcttgctctgtcacccaggctgaagtgcagtggcacagtcagggcccattgcaggttggccttgccatcaaaccaggaacctcagttgagtatttggcaccatgggctaatcagatagatatggccttggttatgacagtggaaccggggtttggagggcagaaattcatggaagatatgatgccaaaggttcactggttgaggacccagttcccatctttggatatagaggtcgatggtggagtaggtcctgacactgtccataaatgtgcagaggcaggagctaacatgattgtgtctggcagtgctattatgaggagtgaagaccccagatctgtgatcaatctattaagaaatgtttgctcagaagctgctcagaaacgttctcttgatcggtgaaaccataaggagcccagtgttcctgttcatgaaatctcccttttactggaaaacaggaatattgactaccaaatcacaatgcaattgaagccgtactgcttttttgagcagttattcattccagtgattaaaactgattgtgcagaatattctaagaggtcagaaattggtgtgtataactacatttttagtgatgcaatttattgattagtgagtaagatactgtttttattgagagatttgatttttataaagtaaaaatacggctgcattagggttacaaacagaaaagtgtcttaatgtctaaggagggcatattagctacactacaaaaacaaattttgtctgtacttctgaaaagaattttgttgtttctcagctgttttccaaaagcaaaggaagtctttatggtttttttctatttcatgttattgtgatttgtttataagtttgggtggggtgcataccatattcttggttcttaaaatctatcacttttcaccttacacttgatgtgtgaaaactataaaaacaatgtgtgaaacccaggggttctaaaatacaagcatagattttatcagggtgttttgtcaaagcaggttattcagtgattcctccccaccattcttaagaacgttaaataatgctgttgtgttagctctgagtagaaaggaaaaagtaaaacctctgtttggaggtaatattgggttgaattctgactgcccctttctagctggacctttaacaaatcacccaatcttttttgtgtttctctaaagtcatttatacattaaatgtaattatagcaactgtggggttctgttgagaattaagagctaacactatatatgtaaagtttccagtactagtcccagaatttagaatatgctcaacacaaagtaaacagcattatataagtttatatttttgtgagttataaagtactttgatatattctcattaaatctgtaaatcacctctataagtaagtggtaataataaagcagatatttttgtccccatttaaaaaatgaagaaattaatgcttaatagggtggtaccctggaaaggatctgggaagtggtagaatttctggtctgtacttttacaaatggagcccttgggaggtgggttaggtaaaagaagctttttacttaacgttgtcttatttccagtctaattttacgctgtagcagaaccagatggctgagaaaattctggaactatggatcttgaccccaaggatatattattttattccaagaaagatcaggtaggcgaaaagatgacaggatacagagtcaatccataaactaaatatttataactgttctgaattatacagagtctaaaaatatgtgtcagctacttcattcctgtaaatactcttgctgtgttataaatatggcaagaaataaacatgaccaatatcaat

SEQ ID NO: 26742 - DNA, 1343 bp, Homo sapiens
  source 1..1343: mol_type = unassigned DNA
aacttgcttttgggagccagcggtatggcgtcgggctgcaagattggcccgtccatcctcaacagcgacctggccaatttaggggccgagtgcctccggatgctagactctggggccgattatctgcacctggacgtaatggacgggcattttgttcccaacatcacctttggtcaccctgtggtagaaagccttcgaaagcagctaggccaggaccctttctttgacatgcacatgatggtgtccaagccagaacagtgggtaaagccaatggctgtagcaggagccaatcagtacacctttcatctcgaggctactgagaacccaggggctttgattaaagacattcgggagaatgggatgaaggttggccttgccatcaaaccaggaacctcagttgagtatttggcaccatgggctaatcagatagatatggccttggttatgacagtggaaccggggtttggagggcagaaattcatggaagatatgatgccaaaggcaggagctaacatgattgtgtctggcagtgctattatgaggagtgaagaccccagatctgtgatcaatctattaagaaatgtttgctcagaagctgctcagaaacgttctcttgatcggtgaaaccataaggagcccagtgttcctgttcatgaaatctcccttttactggaaaacaggaatattgactaccaaatcacaatgcaattgaagccgtactgcttttttgagcagttattcattccagtgattaaaactgattgtgcagaatattctaagaggtcagaaattggtgtgtataactacatttttagtgatgcaatttattgattagtgagtaagatactgtttttattgagagatttgatttttataaagtaaaaatacggctgcattagggttacaaacagaaaagtgtcttaatgtctaaggagggcatattagctacactacaaaaacaaattttgtctgtacttctgaaaagaattttgttgtttctcagctgttttccaaaagcaaaggaagtctttatggtttttttctatttcatgttattgtgatttgtttataagtttgggtggggtgcataccatattcttggttcttaaaatctatcacttttcaccttacacttgatgtgtgaaaactataaaaacaatgtgtgaaacccaggggttctaaaatacaagcatagattttatcagggtgttttgtcaaagcaggttattcagtgattcctccccaccattcttaagaacgttaaataatgctgttgtgttagctctgagtagaaaggaaaaagtaaaacctctgtttggaggtaatattgggttgaattctga

SEQ ID NO: 26743 - DNA, 6321 bp, Homo sapiens
  source 1..6321: mol_type = unassigned DNA
atgcaggccttcccacaagggcccggcagcatgacaaggtgaaggcagagtatgtgcatctcaaccatccgctcaccctcgtgaccagagagcgcgatttggccgtgaaggagaaacaccagctccaagccaagctggagaacctagaacaggtcctgaagcatatgcgagaggcggctgaacggcggcagcagctgcagttggagcatgaccaggccctggctgttctcagtgccaagcagcaggaaattgaccttctgcagaagtccaaggttcgagagctggaagagaaatgccggactcaaagtgagcagttcaacctgctgtcccgggacctggagaagttccggcagcacgctggcaagattgacctgctgggtggcagcgcggtggcccccctggacatctccacggcccccagcaagcctttcccacagttcatgaatggcctagccacctccctcggcaaaggtcaggagagcgctattggaggcagctctgcgatcggtgaatatatccggccccttccgcagcctggtgacaggccggagcctctgtccgccaagcccaccttcctgtcgagatccggtagcgcaagatgcagatctgagtcagacatggagaatgaacggaattccaatacctccaagcagagatactcggggaaggtccacctctgtgttgcccgctatagttacaaccccttcgatggaccgaacgagaaccccgaagctgagctgcccctcacggcgggaaaatacctctacgtctatggagacatggatgaggatgggttctatgaaggagagctcctcgatggccagaggggtctggtgccctccaacttcgtggactttgtgcaggacaacgagtcgcggttggcaagcacgctggggaacgagcaggatcagaacttcatcaaccattccggcatcggcctggagggagagcacatcctggacctccactccccaacccacatagatgcgggcatcaccgacaacagtgccgggaccctggacgtgaacatcgacgacatcggagaagacatcgtgccttaccctagaaaaatcaccctcatcaaacaactcgccaaaagtgttattgtgggctgggagcccccggcggtgccaccaggatggggaacggtgagcagctacaacgtcctggtggacaaggagacacgcatgaacctcacgctggggagcagaactaaagccctcatcgagaagctcaacatggcagcctgcacctaccgcatctccgtgcagtgcgtcaccagcaggggcagctcggatgagctgcagtgcacgctgctggtgggcaaggacgtggtggtggccccctcccacctgcgggtggacaacatcacgcagatctccgcccagctctcctggctacccaccaacagcaactacagccacgtcatcttcctcaacgaggaggagttcgacatcgtcaaggccgccaggtacaagtaccagttcttcaatctcaggcccaacatggcctataaggtgaaggttctggccaaaccccaccagatgccgtggcagctcccgctggagcaaagggagaagaaggaggcctttgtggagttctccacgttgcctgcaggacccccagcacccccacaagatgttaccgtccaggctggggtgacccccgccaccatccgggtctcctggagaccacctgtgctgacgcccaccgggctgtccaatggcgcaaacgttaccggctacggcgtgtatgccaaagggcagagggtggctgaagtcatcttccccacggcagacagcacggccgtggagcttgtgcggctgcggagcctggaggccaagggcgtgaccgtgcggaccctctccgcccagggcgagtccgtggactctgcagttgctgccgttccccccgagctcctggtgcctcctaccccccacccgagacctgcaccccaatcaaagccattagcaagttctggagtccccgaaaccaaagacgagcacctgggtccccacgccaggatggatgaggcctgggagcagagccgtgcacctggccctgtgcatgggcacatgctggagccgcccgtgggccccggaaggcggtcgccctcacccagccgcatcctgccacagccacagggcaccccggtgtccaccaccgtcgccaaggccatggcccgggaggccgcgcagagggtggccgagagcagcaggttagagaaaaggagcgtcttcctagagagaagcagcgcggggcagtacgccgcctcagacgaggaggacgcctatgactctccagacttcaagaggaggggcgcctcggtggacgacttcctgaaaggctctgaacttggcaagcagccgcactgttgccatggagacgagtaccacacagagagcagccgggggtctgacctctcagacatcatggaggaggacgaggaggagctgtattctgaaatgcagctggaagatgggggaaggaggcggcccagcggcacgtcccacaatgccctcaagattttagggaacccagcctctgcaggacgggtggatcacatgggccggaggtttccccgtggcagcgctggtcctcagaggtcccggcccgtgacagtcccatccatcgacgattacgggcgagaccgcctttctccagacttctatgaagagtcagaaactgaccctggtgccgaagagctcccggcccggatctttgtggctctctttgactacgacccgctcaccatgtccccaaacccagatgctgcagaggaggagcttccctttaaagaaggccagatcatcaaggtttatggtgataaagacgctgatggattctaccgtggggaaacctgtgcccggcttggccttattccttgtaacatggtctctgagatacaagcagatgatgaggagatgatggatcagcttcttagacagggctttctccctctgaatacacctgtggagaaaatagagagaagcaggagaagtggcaggcgtcattcggtatcgacgcggagaatggtggccctgtatgactacgaccccagagaaagctcgcccaacgtcgatgtcgaggccgaacttacattttgcacaggagatattattacagtttttggtgaaattgatgaagatggattttattatggggagctgaatgggcagaaaggccttgtgccctcaaacttcttggaagaagtgcctgatgacgtagaagtctatctttctgatgctccatcccactactctcaagatacgccaatgcgctcaaaggcaaaaaggaagaagagtgttcatttcacaccttaatcaggcaatgtagccttcacgtaagtgagcaactgaagataccgataaagataccaacttaagctaccttaaccgggccagtgtggtagacttaaggcttcattgtggggttaaaaaaaaaaaaagatacaaagaaatatgtctcaaaaaactattggacctaaataattagaatattacttggtctcagttgtaaagcaactgaatttatagtgaagcaaatcatctttaataatcatttcctactatttgcattaagaatatttgaaaggccaacattgggaacatatttcttaacaagctaactgtgtgtttacatagagagagctgcatattgcattgttagccactcttggaaaaagcacaacctaacaaacatgtttactataggaagctttactttagaaacttaacccaaggtcaagcagatgagtagtgaacacaggtgatcgagtgttggctctgaacactccaaacactggctcgagtggccagaacgtgttttccttaagtaaccctgcctctaccttacgagagagctatgctcctcctcaaagcacaatcatcctgtgacagaagttgctgcaacacgcgtttgttgttggtataccaatgcaatactaagttgatgaagcacgcagctcaaatgatcacattagatggaatagatggtatcttcaggtgtactttgggatgctttactaggtgttttccattagaattagaccttgattttaaatccaagcaagcttgaagccccttggcttacagcatttgcctgctgaatactaaacactcacatggcaagagttgctctggagaggtagggccagaggaatgctgctgcactgccaactcaggcacatgcttagctgtaaagggaagcgaggtgaagtcgtcctgcagcgtattagagtaaaagtctacccctctgaagcactattaagcgcttaacgtatatttaaatactaccatgtgctatctactgaggaagattcatgttcaattatttggaaataatgcaagcatccactaagggcctttaagctttctttgattataattaaggttcattttagtttttttttttctttcaaccagtgtgccatctccaatatttctatagtataccaaccaccccaggaatgcactttaacaatatcaggattttatataaccaaatagtttcaaatacaacaaaattccctttatgaactttcgctttttaagactactgatgggtactcggccaactttactatcaacctaatttcagatcatgtctcccctgcccttagtcttcatttatgaagtgaattattacctgccttagctttgccaaagcaacggccaccccgcactccctcgagacagagaaacggaacccacacatttatgtctggggcctctctctggcgtgctgtgggagaggacctttgcttctcatggcatacttcaacaactgaaagaacaaatgaacccccctgacctttcctggtgggaaacggggacagtacgatgttaccaagtgaattctgttgttggcgctcacacactcaataaactgtaacactgtacctactaggttcctcctgagggttcaggtacagcaaggagagctccatcccccacagtccatctccattcggggtcacctacgtcatctatgggttctggtagtcctgggagaggcagggaaatgtcctcgaaaaagaaaaaggggctgctttccaaaggcaagaaactgctgaaaaagctgggtgcagtgaaatgattcatgtgcttccggacaactgccaaatctatgtaattttctttaattccaaactagggctttcatgactcaagtacttcctaaaaaaacccaatcttctcccctgacaccagtagagaaatgcacttttgcactaccaaccactttaaaccaaccacgagaacaaagaggagcggttgctctctgtcaccgctggcagtctgctctcattgtccaagctctgatttgggaggtgggaggggacgtcttattaacaaacgggggcgcatagctatcacctgtagctccctccctacctgtaattccagtctttgtgcatttgtcatctgcccttaaaggaatgattttcaacctttctcccttctcaaaatgcttgcctcataatgcataactttcactttgactctggtcttgaaattcctagtttaattcgccttgatgttctgccttataaatgcacaatgatttgtactgtctaataaaaacagtgtatactttgtatgtgtcgtgcattcagtggtcttcatcctgacacagtggtttgagatcaagttgtacaggctgtgcattttaagatactagtttcagtctttcaaagccagccaggctacacacagaaaatgtttactcaatcattcaaaaaagagaaaaggagagaaagtaactttgtttggtaaagcaccagtactccaaccttccagaaagccgattatcttcattgcttttaatgttctattctgtggcatatggttttctgttactttcgttgtcaaaatgccatacccaaatacacagcaatgaatggcacacaagtaatccacataatgcataagccacaccaaaaccagactcaatttaaatctgctccaaatgagtccatacccatcttcatcattggcatttgaacaaaagacttacttacaaagttgctggcagatgtatttgatggttactcttttgtaattcttgtccacttgtaaattgtttttactctttatacatacttttcagactgcctttcttttgtaatttatggacggtttataaatgaatgacaaagctttccccattgtgtcttcaaaaacgctattataaattgtaatataatagtatgtggtagatttattattaaaggaaatccatgtgtggttaagctctgtgtgggtgtgtgcatgtgcacagttagtgtaaaatattttctagaaataaaatttgttattttat

SEQ ID NO: 26744 - DNA, 2375 bp, Homo sapiens
  source 1..2375: mol_type = unassigned DNA
atgcaggccttcccacaagggcccggcagcatgacaaggtgaaggcagagtatgtgcatctcaaccatccgctcaccctcgtgaccagagagcgcgatttggccgtgaaggagaaacaccagctccaagccaagctggagaacctagaacaggtcctgaagcatatgcgagaggcggctgaacggcggcagcagctgcagttggagcatgaccaggccctggctgttctcagtgccaagcagcaggaaattgaccttctgcagaagtccaaggttcgagagctggaagagaaatgccggactcaaagtgagcagttcaacctgctgtcccgggacctggagaagttccggcagcacgctggcaagattgacctgctgggtggcagcgcggtggcccccctggacatctccacggcccccagcaagcctttcccacagttcatgaatggcctagccacctccctcggcaaaggtcaggagagcgctattggaggcagctctgcgatcggtgaatatatccggccccttccgcagcctggtgacaggccggagcctctgtccgccaagcccaccttcctgtcgagatccggtagcgcaagatgcagatctgagtcagacatggagaatgaacggaattccaatacctccaagcagagatactcggggaaggtccacctctgtgttgcccgctatagttacaaccccttcgatggaccgaacgagaaccccgaagctgagctgcccctcacggcgggaaaatacctctacgtctatggagacatggatgaggatgggttctatgaaggagagctcctcgatggccagaggggtctggtgccctccaacttcgtggactttgtgcaggacaacgagtcgcggttggcaagcacgctggggaacgagcaggatcagaacttcatcaaccattccggcatcggcctggagggagagcacatcctggacctccactccccaacccacatagatgcgggcatcaccgacaacagtgccgggaccctggacgtgaacatcgacgacatcggagaagacatcgtgccttaccctagaaaaatcaccctcatcaaacaactcgccaaaagtgttattgtgggctgggagcccccggcggtgccaccaggatggggaacggtgagcagctacaacgtcctggtggacaaggagacacgcatgaacctcacgctggggagcagaactaaagccctcatcgagaagctcaacatggcagcctgcacctaccgcatctccgtgcagtgcgtcaccagcaggggcagctcggatgagctgcagtgcacgctgctggtgggcaaggacgtggtggtggccccctcccacctgcgggtggacaacatcacgcagatctccgcccagctctcctggctacccaccaacagcaactacagccacgtcatcttcctcaacgaggaggagttcgacatcgtcaaggccgccaggtacaagtaccagttcttcaatctcaggcccaacatggcctataaggtgaaggttctggccaaaccccaccagatgccgtggcagctcccgctggagcaaagggagaagaaggaggcctttgtggagttctccacgttgcctgcaggacccccagcacccccacaagatgttaccgtccaggctggggtgacccccgccaccatccgggtctcctggagaccacctgtgctgacgcccaccgggctgtccaatggcgcaaacgttaccggctacggcgtgtatgccaaagggcagagggtggctgaagtcatcttccccacggcagacagcacggccgtggagcttgtgcggctgcggagcctggaggccaagggcgtgaccgtgcggaccctctccgcccagggcgagtccgtggactctgcagttgctgccgttccccccgagctcctggtgcctcctaccccccacccgagacctgcaccccaatcaaagccattagcaagttctggagtccccgaaaccaaagacgagcacctgggtccccacgccaggatggatgaggcctgggagcagagccgtgcacctggccctgtgcatgggcacatgctggagccgcccgtgggccccggaaggcggtcgccctcacccagccgcatcctgccacagccacagggcaccccggtgtccaccaccgtcgccaaggccatggcccgggaggccgcgcagagggtggccgagagcagcaggttagagaaaaggagcgtcttcctagagagaagcagcgcggggcagtacgccgcctcagacgaggaggacgcctatgactctccagacttcaagaggaggggcgcctcggtggacgacttcctgaaaggctctgaacttggcaagcagatggcgtct

SEQ ID NO: 26745 - DNA, 3868 bp, Homo sapiens
  source 1..3868: mol_type = unassigned DNA
gtacactgcagttgtctccgaggtgaacctccggagccttggcacagctcgcttctaaagcttggaaatgacccgccacacctgaagcctgcaggtgctgaggccacattcgatcagacccaagctttgggagaccgctggggaaatttcccacttcctctcctgagaccaggaactcagcagagaaactttgtggaaaatgaactgaaggatgccacccagggagagtatctcctgagatcccatcatgcaggccttcccacaagggcccggcagcatgacaaggtgaaggcagagtatgtgcatctcaaccatccgctcaccctcgtgaccagagagcgcgatttggccgtgaaggagaaacaccagctccaagccaagctggagaacctagaacaggtcctgaagcatatgcgagaggcggctgaacggcggcagcagctgcagttggagcatgaccaggccctggctgttctcagtgccaagcagcaggaaattgaccttctgcagaagcctcagaaaaccaacctccagtgtccgcactttaggaagtgtcccatgctttcacagttgacgatgacgttcgttagcactcttggtttcaagcgacagaaaacccaaacaggaaattgtttttgtgcccatcactgaaaatgtggcttcagacatggctagatccagggctcaaatctgctggcctcagacccagtagaatccaaggcctccccgacatcaccaggacttggctgctctctgccctcctctggatcagcttcagccttggtttccctgtggagacccccagccactccagccctgaccctcctggtggcaaagtggctgcagcctcacctcctcccaagccaaagtccaatagaaaggggcttccctctcccgcagcattctcaggcagaggcccattgccctccgtaggccccacaccacccaggtcaccagtcgctgagggttcagactgtgcttggcacaggggaggtccagaccccagccagtccagaggttcttcccaggagaggagctcctgacgctggaggaagaggcctgaggaacaggcctgttacccagaggatccgctatccaggaggctcaggttgaggctaagaaggagcatgaaggcgcagtgcggctgctagagtccaaggttcgagagctggaagagaaatgccggactcaaagtgagcagttcaacctgctgtcccgggacctggagaagttccggcagcacgctggcaagattgacctgctgggtggcagcgcggtggcccccctggacatctccacggcccccagcaagcctttcccacagttcatgaatggcctagccacctccctcggcaaaggtcaggagagcgctattggaggcagctctgcgatcggtgaatatatccggccccttccgcagcctggtgacaggccggagcctctgtccgccaagcccaccttcctgtcgagatccggtagcgcaagatgcagatctgagtcagacatggagaatgaacggaattccaatacctccaagcagagatactcggggaaggtccacctctgtgttgcccgctatagttacaaccccttcgatggaccgaacgagaaccccgaagctgagctgcccctcacggcgggaaaatacctctacgtctatggagacatggatgaggatgggttctatgaaggagagctcctcgatggccagaggggtctggtgccctccaacttcgtggactttgtgcaggacaacgagtcgcggttggcaagcacgctggggaacgagcaggatcagaacttcatcaaccattccggcatcggcctggagggagagcacatcctggacctccactccccaacccacatagatgcgggcatcaccgacaacagtgccgggaccctggacgtgaacatcgacgacatcggagaagacatcgtgccttaccctagaaaaatcaccctcatcaaacaactcgccaaaagtgttattgtgggctgggagcccccggcggtgccaccaggatggggaacggtgagcagctacaacgtcctggtggacaaggagacacgcatgaacctcacgctggggagcagaactaaagccctcatcgagaagctcaacatggcagcctgcacctaccgcatctccgtgcagtgcgtcaccagcaggggcagctcggatgagctgcagtgcacgctgctggtgggcaaggacgtggtggtggccccctcccacctgcgggtggacaacatcacgcagatctccgcccagctctcctggctacccaccaacagcaactacagccacgtcatcttcctcaacgaggaggagttcgacatcgtcaaggccgccaggtacaagtaccagttcttcaatctcaggcccaacatggcctataaggtgaaggttctggccaaaccccaccagatgccgtggcagctcccgctggagcaaagggagaagaaggaggcctttgtggagttctccacgttgcctgcaggacccccagcacccccacaagatgttaccgtccaggctggggtgacccccgccaccatccgggtctcctggagaccacctgtgctgacgcccaccgggctgtccaatggcgcaaacgttaccggctacggcgtgtatgccaaagggcagagggtggctgaagtcatcttccccacggcagacagcacggccgtggagcttgtgcggctgcggagcctggaggccaagggcgtgaccgtgcggaccctctccgcccagggcgagtccgtggactctgcagttgctgccgttccccccgagctcctggtgcctcctaccccccacccgagacctgcaccccaatcaaagccattagcaagttctggagtccccgaaaccaaagacgagcacctgggtccccacgccaggatggatgaggcctgggagcagagccgtgcacctggccctgtgcatgggcacatgctggagccgcccgtgggccccggaaggcggtcgccctcacccagccgcatcctgccacagccacagggcaccccggtgtccaccaccgtcgccaaggccatggcccgggaggccgcgcagagggtggccgagagcagcaggttagagaaaaggagcgtcttcctagagagaagcagcgcggggcagtacgccgcctcagacgaggaggacgcctatgactctccagacttcaagaggaggggcgcctcggtggacgacttcctgaaaggctctgaacttggcaagcagatggtctcctaacagagctggaattagattgaaccgaggcctgaagaagacctgtttccacgcctttccccatgtgccacgttctcctcacctatccaggagtgaatcatcaccttccctgcaatctgctcagattacaaacccggaggaaaggctggagcacttgttctctgggtgaaggacccatacccccactggtttttgagatcggcattcagcgctgtcttatggcagccacagccccaggtggccccagagcccttgacatgtggccacctggggctgagtgtgactgaggccctgaatttttacttctataaaattagttccagattagtttacattctaattagtttacatgtaaacagccacacgtggctggtggccaccagtgctgacgcccagctctggatgaccacacctgctacaagagatgacttttctagagaagagtagaaacacagcggcagaaacacagctctgcacttccgagggcctcccactccttctgatgagactgcagaggaagtctgtttggccaagcatgctattaacacgttttcctgcttgttttgttttttaacagagcaaacaggtctgtttctattaaaattt

SEQ ID NO: 26746 - DNA, 5728 bp, Homo sapiens
  source 1..5728: mol_type = unassigned DNA
gagacccccagggggcgccggaaggggcgcgccgggcggtcggcggcggccgttggcgagctgaggcctgccaggcgaagtctggagaccagccgggccgcggccgcaatggccaaggactcgcccagccccttgggcgcgtcgcccaagaagccgggctgctccagcccggcggcggcagtgctggagaaccagaggcgggagctggagaagctacgggcggagctggaggcggagcgggcaggctggcgggcggaacggcggcgcttcgctgcccgggagcgccagctgcgtgaggaggccgagcgggagcggcgacagctggctgaccgtctgcgctccaagtgggaggcacagcgcagccgggagttgcggcagctgcaagaggagatgcagcgggaacgcgaggccgagatccggcagctgctgcgctggaaggaggccgagcagcggcagctgcagcagctgctgcaccgggagcgcgatggcgtggtgcgccaagcccgggagctgcagcgccagctggccgaggagctggtgaaccgcggccactgtagccgcccgggggcgtccgaggtttccgcggcgcagtgccgctgtcgcctgcaggaagtgttggcgcagcttcgctggcagactgacggcgagcaggcggcgcgcatccgctatctgcaggcggcgctggaggtggagcgccagctcttcctcaagtacatcctggcgcacttccgcgggcacccggctttgtcgggatcaccggacccccaagctgtgcattccttggaagaaccgctgccccagacctccagcggctcttgccacgcccccaaacccgcctgccaactcggatctctagacagcctgagtgctgaagtcggtgtgcgctcccgctcgctaggcctggtgtcctctgcgtgctccagctccccagacggcctgctctccacgcacgccagctcccttgattgcttcgcacctgcgtgttcccgctcgcttgacagcacccggagcctccccaaggcctccaaatccgaggagcggccctcctcaccagacacctccacccctggctcccggaggctctcgccgccaccatcgccactcccgccgccaccaccaccgtcagcccacaggaaactcagcaacccgcggggaggagaaggctctgagagccagccctgcgaagtcctgactccctcacccccgggcctgggccaccacgagctgataaagctgaactggctgctggccaaggcgttgtgggtgctggcgcgccgctgttataccctgcaagcggagaacaagcagctgcggcgtgcaggctgcccctaccaggcagacgagaaggtgaagcggctcaaggtaaagcgcgcggagctgaccgggctcgcgcggcgcctagctgaccgcgcccgcaagctgcaggagaccaacctccgggccgtgagcgcgcctatacccggcgagagttgcgccggcctggagctgtgccaagtctttgcccgccagcgcgctcgggacctgtcggagcaggcgagcgcgccgctggccaaggacaagcagatcgaagagctgcggcaggagtgccacctcctgcaggcgcgtgtcgcctcgggtccctgcagcgacctgcatactggaaggggcggcccctgcacccagtggctcaacgtcagagacttagaccgcctgcagcgcgagtcccagcgggaagtgctgcgcctgcagaggcagttgatgcttcagcagggcaacggtggcgcttggcccgaggcgggcggccagagcgcaacctgcgaggaggtgcgacggcagatgctggcgctggagcgcgagctggaccagcggcggcgcgagtgccaggagctgggcgcgcaggcggccccggcgcggcgacgtggcgaggaggccgagacacagctgcaggcggcgctgctcaaaaacgcctggctggcggaggagaatgggcggctgcaggccaagaccgactgggtgcggaaggtggaggctgagaatagcgaagtgcgcggccacctgggccgcgcgtgtcaagagcgcgatgcctccggcttgatcgccgaacagctgctgcagcaggcggcgcgcgggcaggacaggcagcagcagctgcaacgcgacccgcagaaggccctgtgtgacctccatccttcctggaaggagatacaggcgctccagtgtcggcctggtcaccctcctgaacagccctgggagaccagtcaaatgccggagtcccaagttaaaggtagcagaaggcccaagttccacgcacggcctgaagactacgcagtgtcacagcccaacagagacatacaggagaaaagggaagcctccctcgaggagagcccagttgcccttggggagtcagccagtgtcccccaagtttcagagacagtccctgccagccaacctctgtccaagaaaaccagctcccagtcaaactcctcctctgaggggtcgatgtgggccaccgtgccgtcctcccctactctggacagggacacagccagtgaggtggatgacctggagcctgacagcgtgtccctggccctggaaatggggggctcggcggctcctgctgcccccaagctcaagatcttcatggctcagtataactacaacccatttgaggggcccaatgatcaccctgagggtgagctgcccctcacagctggggactacatatatatcttcggggacatggatgaggatggcttctatgagggggagcttgaggatggccggcgggggctggtgccctccaacttcgtggagcagattccggacagctacatcccaggctgcctgcctgccaaatcccctgatcttggccccagtcaactcccagcggggcaggatgaagctctggaggaagacagcttattatctgggaaagcccagggagtggtggacagagggctgtgccagatggtcagggtgggctccaagacagaagtagcaacagagatcctggataccaagacggaagcctgccagctgggcttgctgcagagcatggggaagcagggcctctccagaccccttctggggaccaaaggggtgctccgtatggctcccatgcagctacacctgcagaatgtcacagccacatcagccaacatcacctgggtctacagcagccaccgccacccccatgtggtatatcttgatgaccgagagcatgccctgaccccagcgggcgtgagctgctacaccttccagggcctgtgccccggcacgcactaccgggcgcgggtggaggtgcggctgccacgggacttgctgcaggtgtattggggaactatgtcctccaccgtcaccttcgacacactcttggcaggacctccctacccaccgctggatgtgctggtggagcgccatgcctcgccaggtgtcctggtggtcagctggctccctgtgaccattgactcagctgggtcctccaatggagtccaggtcaccggttatgctgtgtatgcagatgggcttaaggtttgtgaggtcgccgatgccactgctgggagcaccctattggaattctcccagctacaggtgcccctcacgtggcagaaggtctcagtgagaaccatgtcactctgtggtgagtccctggattcagtgcctgctcagatccccgaggacttcttcatgtgtcaccgatggccagagactccaccctttagctacacttgtggcgacccatccacctacagagtcaccttccccgtctgcccccagaagctgtcactggctcctccgagtgccaaggccagcccccacaaccctggaagctgcggggagccccaggccaagttcctagaagcattctttgaagaacccccaaggaggcaatccccagtgtccaacctgggctcagaaggagaatgtccgagttcaggggctggcagccaagcccaggagcttgcagaggcctgggagggctgtagaaaggacctgctctttcagaagagtccccagaaccacaggccaccttcagtcagtgaccagcctggggagaaggaaaattgctcccagcacatgggcaccagcaaaagccctgctccaggattcatccatctacgcaccgagtgtgggcccaggaaagaaccgtgtcaggaaaaggctgcccttgagagggtacttcggcaaaagcaagatgcccaagggttcacacctccccagctgggcgccagccaacagtatgcatctgacttccataacgttttgaaggaggagcaggaggcactgtgcttggatctgtggggcacagagaggcgagaggagaggagggagcctgagccccacagcaggcaaggacaagctctgggggtgaagagagggtgccagctccatgagcccagctcggcactgtgtccagctccatccgccaaagtcatcaagatgcccaggggtggcccccaacagctggggacgggggccaacactccagccagggtctttgtggccctctctgattacaaccccctggtgatgtctgccaacctcaaggctgcagaggaggagctggtcttccagaaaaggcagttgctaagagtgtggggctctcaggacacccatgatttctacctcagcgagtgcaacaggcaagtgggcaatatccccgggcgcctagtggctgagatggaggtggggacagagcagactgataggaggtggcgttctccggcccaagggaacctgccttctgtggcccacctcgaggactttcaggggctcaccatcccccagggttcctccctggtgctccaggggaactccaagagactcccactgtggactccaaagatcatgatagcagctctggactatgatcctggggatgggcaaatggggggccaggggaagggcaggctggcgctgagggcaggagacgtggtcatggtttacgggcccatggatgaccaaggattctattatggagagttgggcggccacaggggcctggttcctgcccacctgctggatcacatgtccctccatggacactgagcaagcatccttgcccaggtagtggcctctggctgctcacaccctgccagaggagaagcaagcgttcagaccctcacaccagcacccctcctcaccaccataagtagcatgtgctccaagtgccactgtgttaaactgatggtagtccttaagcgtcccctaggctctgaaagtagcaggacttaagcctgagttatttgcaaaagcaaacacaacaagccaacccctgagagtctgagaagccatttcaaagttgctgataactatggcaggtatacggagaagcgcctttttctgtggccaatgtgtgttttctctgggaggttaaggttatctgtccattgccttgtacgaaagtctcaagaaaagtctacatcttaaaaaagaaaaagcaatctgagtgttatttttgggatgtgagggtgatctggctgcgacatgtgtcaccccattgatcatcagggttgattcggctgatctggctgactaggcgggtatccccttcctccctcaccactccatgtgcgtccctccagaagctgtgtgctcaatggaagaggatgaccatccccgatagaggacgatcggtcttcagtcaagagtataagagtagctgcgctcccctgctagaacctccaaacgagctctcagaatgttatttttctgtcttatgtccaacccctcattaaaatgttcatag

SEQ ID NO: 26747 - DNA, 5784 bp, Homo sapiens
  source 1..5784: mol_type = unassigned DNA
ccagccacctgacccaaatacaccacctgaacccacgaccaggtatgcccacaccccatgggtggccttaacacacacaccctgcccctttctccaagtacaggagcagcagcccagacttccctcggggcaccgcggcctgcttgggactgcacagtgcctgggagggtgcctggggagggtcacaagggacttggtgctagaagcaggaaaagtgtagggaccggaaaagcccccgtgcatcctggaagggacatgggccagtttgagcaggggtgtgggagtccagccctggccttgccaggtggagaggcgcctgggccagacatccgcggcaggaggcgggggaacatgccaagaggcggaaggggcacgcggagacccccagggggcgccggaaggggcgcgccgggcggtcggcggcggccgttggcgagctgaggcctgccaggcgaagtctggagaccagccgggccgcggccgcaatggccaaggactcgcccagccccttgggcgcgtcgcccaagaagccgggctgctccagcccggcggcggcagtgctggagaaccagaggcgggagctggagaagctacgggcggagctggaggcggagcgggcaggctggcgggcggaacggcggcgcttcgctgcccgggagcgccagctgcgtgaggaggccgagcgggagcggcgacagctggctgaccgtctgcgctccaagtgggaggcacagcgcagccgggagttgcggcagctgcaagaggagatgcagcgggaacgcgaggccgagatccggcagctgctgcgctggaaggaggccgagcagcggcagctgcagcagctgctgcaccgggagcgcgatggcgtggtgcgccaagcccgggagctgcagcgccagctggccgaggagctggtgaaccgcggccactgtagccgcccgggggcgtccgaggtttccgcggcgcagtgccgctgtcgcctgcaggaagtgttggcgcagcttcgctggcagactgacggcgagcaggcggcgcgcatccgctatctgcaggcggcgctggaggtggagcgccagctcttcctcaagtacatcctggcgcacttccgcgggcacccggctttgtcgggatcaccggacccccaagctgtgcattccttggaagaaccgctgccccagacctccagcggctcttgccacgcccccaaacccgcctgccaactcggatctctagacagcctgagtgctgaagtcggtgtgcgctcccgctcgctaggcctggtgtcctctgcgtgctccagctccccagacggcctgctctccacgcacgccagctcccttgattgcttcgcacctgcgtgttcccgctcgcttgacagcacccggagcctccccaaggcctccaaatccgaggagcggccctcctcaccagacacctccacccctggctcccggaggctctcgccgccaccatcgccactcccgccgccaccaccaccgtcagcccacaggaaactcagcaacccgcggggaggagaaggctctgagagccagccctgcgaagtcctgactccctcacccccgggcctgggccaccacgagctgataaagctgaactggctgctggccaaggcgttgtgggtgctggcgcgccgctgttataccctgcaagcggagaacaagcagctgcggcgtgcaggctgcccctaccaggcagacgagaaggtgaagcggctcaaggtaaagcgcgcggagctgaccgggctcgcgcggcgcctagctgaccgcgcccgcaagctgcaggagaccaacctccgggccgtgagcgcgcctatacccggcgagagttgcgccggcctggagctgtgccaagtctttgcccgccagcgcgctcgggacctgtcggagcaggcgagcgcgccgctggccaaggacaagcagatcgaagagctgcggcaggagtgccacctcctgcaggcgcgtgtcgcctcgggtccctgcagcgacctgcatactggaaggggcggcccctgcacccagtggctcaacgtcagagacttagaccgcctgcagcgcgagtcccagcgggaagtgctgcgcctgcagaggcagttgatgcttcagcagggcaacggtggcgcttggcccgaggcgggcggccagagcgcaacctgcgaggaggtgcgacggcagatgctggcgctggagcgcgagctggaccagcggcggcgcgagtgccaggagctgggcgcgcaggcggccccggcgcggcgacgtggcgaggaggccgagacacagctgcaggcggcgctgctcaaaaacgcctggctggcggaggagaatgggcggctgcaggccaagaccgactgggtgcggaaggtggaggctgagaatagcgaagtgcgcggccacctgggccgcgcgtgtcaagagcgcgatgcctccggcttgatcgccgaacagctgctgcagcaggcggcgcgcgggcaggacaggcagcagcagctgcaacgcgacccgcagaaggccctgtgtgacctccatccttcctggaaggagatacaggcgctccagtgtcggcctggtcaccctcctgaacagccctgggagaccagtcaaatgccggagtcccaagttaaaggtagcagaaggcccaagttccacgcacggcctgaagactacgcagtgtcacagcccaacagagacatacaggagaaaagggaagcctccctcgaggagagcccagttgcccttggggagtcagccagtgtcccccaagtttcagagacagtccctgccagccaacctctgtccaagaaaaccagctcccagtcaaactcctcctctgaggggtcgatgtgggccaccgtgccgtcctcccctactctggacagggacacagccagtgaggtggatgacctggagcctgacagcgtgtccctggccctggaaatggggggctcggcggctcctgctgcccccaagctcaagatcttcatggctcagtataactacaacccatttgaggggcccaatgatcaccctgagggtgagctgcccctcacagctggggactacatatatatcttcggggacatggatgaggatggcttctatgagggggagcttgaggatggccggcgggggctggtgccctccaacttcgtggagcagattccggacagctacatcccaggctgcctgcctgccaaatcccctgatcttggccccagtcaactcccagcggggcaggatgaagctctggaggaagacagcttattatctgggaaagcccagggagtggtggacagagggctgtgccagatggtcagggtgggctccaagacagaagtagcaacagagatcctggataccaagacggaagcctgccagctgggcttgctgcagagcatggggaagcagggcctctccagaccccttctggggaccaaaggggtgctccgtatggctcccatgcagctacacctgcagaatgtcacagccacatcagccaacatcacctgggtctacagcagccaccgccacccccatgtggtatatcttgatgaccgagagcatgccctgaccccagcgggcgtgagctgctacaccttccagggcctgtgccccggcacgcactaccgggcgcgggtggaggtgcggctgccacgggacttgctgcaggtgtattggggaactatgtcctccaccgtcaccttcgacacactcttggcaggacctccctacccaccgctggatgtgctggtggagcgccatgcctcgccaggtgtcctggtggtcagctggctccctgtgaccattgactcagctgggtcctccaatggagtccaggtcaccggttatgctgtgtatgcagatgggcttaaggtttgtgaggtcgccgatgccactgctgggagcaccctattggaattctcccagctacaggtgcccctcacgtggcagaaggtctcagtgagaaccatgtcactctgtggtgagtccctggattcagtgcctgctcagatccccgaggacttcttcatgtgtcaccgatggccagagactccaccctttagctacacttgtggcgacccatccacctacagagtcaccttccccgtctgcccccagaagctgtcactggctcctccgagtgccaaggccagcccccacaaccctggaagctgcggggagccccaggccaagttcctagaagcattctttgaagaacccccaaggaggcaatccccagtgtccaacctgggctcagaaggagaatgtccgagttcaggggctggcagccaagcccaggagcttgcagaggcctgggagggctgtagaaaggacctgctctttcagaagagtccccagaaccacaggccaccttcagtcagtgaccagcctggggagaaggaaaattgctcccagcacatgggcaccagcaaaagccctgctccaggattcatccatctacgcaccgagtgtgggcccaggaaagaaccgtgtcaggaaaaggctgcccttgagagggtacttcggcaaaagcaagatgcccaagggttcacacctccccagctgggcgccagccaacagtatgcatctgacttccataacgttttgaaggaggagcaggaggcactgtgcttggatctgtggggcacagagaggcgagaggagaggagggagcctgagccccacagcaggcaaggacaagctctgggggtgaagagagggtgccagctccatgagcccagctcggcactgtgtccagctccatccgccaaagtcatcaagatgcccaggggtggcccccaacagctggggacgggggccaacactccagccagggtctttgtggccctctctgattacaaccccctggtgatgtctgccaacctcaaggctgcagaggaggagctggtcttccagaaaaggcagttgctaagagtgtggggctctcaggacacccatgatttctacctcagcgagtgcaacaggcaagtgggcaatatccccgggcgcctagtggctgagatggaggtggggacagagcagactgataggaggtggcgttctccggcccaagggaacctgccttctgtggcccacctcgaggactttcaggggctcaccatcccccagggttcctccctggtgctccaggggaactccaagagactcccactgtggactccaaagatcatgatagcagctctggactatgatcctggggatgggcaaatggggggccaggggaagggcaggctggcgctgagggcaggagacgtggtcatggtttacgggcccatggatgaccaaggattctattatggagagttgggcggccacaggggcctggttcctgcccacctgctggatcacatgtccctccatggacactgagcaagcatccttgcccaggtagtggcctctggctgctcacaccctgccagaggagaagcaagcgttcagaccctcacaccagcacccctcctcaccaccataagtagcatgtgctccaagtgccactgtgttaaactgatggtagtccttaagcgtcccctaggctctgaaagtagcaggacttaagcctgagttatttgcaaaagcaaacacaacaagccaacccctgagagtctgagaagccatttcaaagttgctgataactatggcaggtatacggagaagcgcctttttctgtggccaatgtgtgttttctctgggaggttaaggttatctgtccattgccttgtacgaaagtctcaagaaaagtctacatctt

SEQ ID NO: 26748 - DNA, 5475 bp, Homo sapiens
  source 1..5475: mol_type = unassigned DNA
cggaacggcggcgcttcgctgcccgggagcgccagctgcgtgaggaggccgagcgggagcggcggcagctggctgaccgtctgcgctccaagtgggaggcacagcgcagccgggagttgcggcagctgcaagaggagatgcagcgggaacgcgaggccgagatccggcagctgctgcgctggaaggaggccgagcagcggcagctgcagcagctgctgcaccgggagcgcgatggcgtggtgcgccaagcccgggagctgcagcgccagctggccgaggagctggtgaaccgcggccactgtagccgcccgggggcgtccgaggtttccgcggcgcagtgccgctgtcgcctgcaggaagtgttggcgcagcttcgctggcagactgacggcgagcaggcggcgcgcatccgctatctgcaggcggcgctggaggtggagcgccagctcttcctcaagtacatcctggcgcacttccgcgggcacccggctttgtcgggatcaccggacccccaagctgtgcattccttggaagaaccgctgccccagacctccagcggctcttgccacgcccccaaacccgcctgccaactcggatctctagacagcctgagtgctgaagtcggtgtgcgctcccgctcgctaggcctggtgtcctctgcgtgctccagctccccagacggcctgctctccacgcacgccagctcccttgattgcttcgcacctgcgtgttcccgctcgcttgacagcacccggagcctccccaaggcctccaaatccgaggagcggccctcctcaccagacacctccacccctggctcccggaggctctcgccgccaccatcgccactcccgccgccaccaccaccgtcagcccacaggaaactcagcaacccgcggggaggagaaggctctgagagccagccctgcgaagtcctgactccctcacccccgggcctgggccaccacgagctgataaagctgaactggctgctggccaaggcgttgtgggtgctggcgcgccgctgttataccctgcaagaggagaacaagcagctgcggcgtgcaggctgcccctaccaggcagacgagaaggtgaagcggctcaaggtaaagcgcgcggagctgaccgggctcgcgcggcgcctagctgaccgcgcccgcgagctgcaggagaccaacctccgggccgtgagcgcgcctatacccggcgagagttgcgccggcctggagctgtgccaagtctttgcccgccagcgcgctcgggacctgtcggagcaggcgagcgcgccgctggccaaggacaagcagatcgaagagctgcggcaggagtgccacctcctgcaggcgcgtgtcgcctcgggtccctgcagcgacctgcatactggaaggggcggcccctgcacccagtggctcaacgtcagagacttagaccgcctgcagcgcgagtcccagcgggaagtgctgcgcctgcagaggcagttgatgcttcagcagggcaacggtggcgcttggcccgaggcgggcggccagagcgcaacctgcgaggaggtgcgacggcagatgctggcgctggagcgcgagctggaccagcggcggcgcgagtgccaggagctgggcacgcaggcggccccggcgcggcgacgtggcgaggaggccgagacacagctgcaggcggcgctgctcaaaaacgcctggctggcggaggagaatgggcggctgcaggccaagaccgactgggtgcggaaggtggaggctgagaatagcgaagtgcgcggccacctgggccgcgcgtgtcaagagcgcgatgcctccggcttgatcgccgaacagctgctgcagcaggcggcgcgcgggcaggacaggcagcagcagctgcaacgcgacccgcagaaggccctgtgtgacctccatccttcctggaaggagatacaggcgctccagtgtcggcctggtcaccctcctgaacagccctgggagaccagtcaaatgccggagtcccaagttaaaggtagcagaaggcccaagttccacgcacggcctgaagactacgcagtgtcacagcccaacagagacatacaggagaaaagggaagcctccctcgaggagagcccagttgcccttggggagtcagccagtgtcccccaagtttcagagacagtccctgccagccaacctctgtccaagaaaaccagctcccagtcaaactcctcctctgaggggtcgatgtgggccaccgtgccgtcctcccctactctggacagggacacagccagtgaggtggatgacctggagcctgacagcgtgtccctggccctggaaatggggggctcggcggctcctgctgcccccaagctcaagatcttcatggctcagtataactacaacccatttgaggggcccaatgatcaccctgagggtgagctgcccctcacagctggggactacatatatatcttcggggacatggatgaggatggcttctatgagggggagcttgacgatggccggcgggggctggtgccctccaacttcgtggagcagattccggacagctacatcccaggctgcctgcctgccaaatcccctgatcttggccccagtcaactcccagcggggcaggatgaagctctggaggaagacagcttattatctgggaaagcccagggaatggtggacagagggctgtgccagatggtcagggtgggctccaagacagaagtagcaacagagatcctggataccaagacggaagcctgccagctgggcttgctgcagagcatggggaagcagggcctctccagaccccttctggggaccaaaggggtgctccgtatggctcccatgcagctacacctgcagaatgtcacagccacatcagccaacatcacctgggtctacagcagccaccgccacccccatgtggtatatcttgatgaccgagagcatgccctgaccccagcgggcgtgagctgctacaccttccagggcctgtgccccggcacgcactaccgggtgcgggtggaggtgcggctgccatgggacttgctgcaggtgtattggggaactatgtcctccaccgtcaccttcgacacactcttggcaggacctccctacccaccgctggaggtgctggtggagcgccatgcctcgccaggtgtcctggtggtcagctggctccctgtgaccattgactcagctgggtcctccaatggagtccaggtcaccggttatgctgtgtatgcagatgggcttaaggtttgtgaggtcgccgatgccactgctgggagcaccgtattggaattctcccagctacaggtgcccctcacgtggcagaaggtctcagtgagaaccatgtcactctgtggtgagtccctggattcagtgcctgctcagatccccgaggacttcttcatgtgtcaccgatggccagagactccaccctttagctacacttgtggcgacccatccacctacagagtcaccttccccgtctgcccccagaagctgtcactggctcctccgagtgccaaggccagcccccacaaccctggaagctgcggggagccccaggccaagttcctagaagcattctttgaagaacccccaaggaggcaatccccagtgtccaacctgggctcagaaggagaatgtccgagttcaggggctggcagccaagcccaggagcttgcagaggcctgggagggctgtagaaaggacctgctctttcagaagagtccccagaaccacaggccaccttcagtcagtgaccagcctggggagaaggaaaattgctaccagcacatgggcaccagcaaaagccctgctccaggattcatccatctacgcaccgagtgtgggcccaggaaagaaccgtgtcaggaaaaggctgcccttgagagggtacttcggcaaaagcaagatgcccaagggttcacacctccccagctgggcgccagccaacagtatgcatctgacttccataacgttttgaaggaggagcaggaggcactgtgcttggatctgcggggcacagagaggcgagaggagaggagggagcctgagccccacagcaggcaaggacaagctctgggggtgaagagagggtgccagctccatgagcccagctcggcactgtgtccagctccatccgccaaagtcatcaagatgcccaggggtggcccccaacagctggggacgggggccaacactccagccagggtctttgtggccctctctgattacaaccccctggtgatgtctgccaacctcaaggctgcagaggaggagctggtcttccagaaaaggcagttgctaagagtgtggggctctcaggacacccatgatttctacctcagcgagtgcaacaggcaagtgggcaatatccccgggcgcctagtggctgagatggaggtggggacagagcagactgataggaggtggcgttctccggcccaagggcacctgccttctgtggcccacctcgaggactttcaggggctcaccatcccccagggttcctccctggtgctccaggggaactccaagagactcccactgtggactccaaagatcatgatagcagctctggactatgatcctggggatgggcaaatggggggccaggggaagggcaggctggcgctgagggcaggagacgtggtcatggtttacgggcccatggatgaccaaggattctattatggagagttgggcggccacaggggcctggttcctgcccacctgctggatcacatgtccctccatggacactgagcaagcatccttgcccaggtagtggcctctggctgctcacaccctgccagaggagaagcaagcgttcagaccctcacaccagcacccctcctcaccaccataagtagcatgtgctccaagtgccactgtgttaaactgatggtagtccttaagcgtcccctaggctctgaaagtagcaggacttaagcctgagttatttgcaaaagcaaacacaacaagccaacccctgagagtctgagaagccatttcaaagttgctgataactatggcaggtatacggagaagcgcctttttctgtggccaatgtgtgttttctctgggaggttaaggttatctgtccattgccttgtacgaaagtctcaagaaaagtctacatcttaaaaaagaaaaagcaatctgagtgttatttttgggatgtgagggtgatctggctgcgacatgtgtcaccccattgatcatcagggttgattcggctgatctggctgactaggcgggtatccccttcctccctcaccactccatgtgcgtccctccagaagctgtgtgctcaatggaagaggatgaccatccccgatagaggacgatcggtcttcagtcaagagtataagagtagctgcgctcccctgctagaacctccaaacgagctctcagaatgttatttttctgtcttatgtccaacccctcattaaaatgttcatag

SEQ ID NO: 26749 - DNA, 5784 bp, Homo sapiens
  source 1..5784: mol_type = unassigned DNA
ccagccacctgacccaaatacaccacctgaacccacgaccaggtatgcccacaccccatgggtggccttaacacacacaccctgcccctttctccaagtacaggagcagcagcccagacttccctcggggcaccgcggcctgcttgggactgcacagtgcctgggagggtgcctggggagggtcacaagggacttggtgctagtagcaggaaaagtgtagggaccggaaaagcccccgtgcatcctggaagggacatgggccagtttgagcaggggtgtgggagtccagccctggccttgccaggtggagaggcgcctgggccagacatccgcggcaggaggcgggggaacatgccaagaggcggaaggggcacgcggagacccccagggggcgccggaaggggcgcgccgggcggtcggcggcggccgttggcgagctgaggcctgccaggcgaagtctggagaccagccgggccgcggccgcaatggccaaggactcgcccagccccttgggcgcgtcgcccaagaagccgggctgctccagcccggcggcggcagtgctggagaaccagaggcgggagctggagaagctacgggcggagctggaggcggagcgggcaggctggcgggcggaacggcggcgcttcgctgcccgggagcgccagctgcgtgaggaggccgagcgggagcggcggcagctggctgaccgtctgcgctccaagtgggaggcacagcgcagccgggagttgcggcagctgcaagaggagatgcagcgggaacgcgaggccgagatccggcagctgctgcgctggaaggaggccgagcagcggcagctgcagcagctgctgcaccgggagcgcgatggcgtggtgcgccaagcccgggagctgcagcgccagctggccgaggagctggtgaaccgcggccactgtagccgcccgggggcgtccgaggtttccgcggcgcagtgccgctgtcgcctgcaggaagtgttggcgcagcttcgctggcagactgacggcgagcaggcggcgcgcatccgctatctgcaggcggcgctggaggtggagcgccagctcttcctcaagtacatcctggcgcacttccgcgggcacccggctttgtcgggatcaccggacccccaagctgtgcattccttggaagaaccgctgccccagacctccagcggctcttgccacgcccccaaacccgcctgccaactcggatctctagacagcctgagtgctgaagtcggtgtgcgctcccgctcgctaggcctggtgtcctctgcgtgctccagctccccagacggcctgctctccacgcacgccagctcccttgattgcttcgcacctgcgtgttcccgctcgcttgacagcacccggagcctccccaaggcctccaaatccgaggagcggccctcctcaccagacacctccacccctggctcccggaggctctcgccgccaccatcgccactcccgccgccaccaccaccgtcagcccacaggaaactcagcaacccgcggggaggagaaggctctgagagccagccctgcgaagtcctgactccctcacccccgggcctgggccaccacgagctgataaagctgaactggctgctggccaaggcgttgtgggtgctggcgcgccgctgttataccctgcaagaggagaacaagcagctgcggcgtgcaggctgcccctaccaggcagacgagaaggtgaagcggctcaaggtaaagcgcgcggagctgaccgggctcgcgcggcgcctagctgaccgcgcccgcgagctgcaggagaccaacctccgggccgtgagcgcgcctatacccggcgagagttgcgccggcctggagctgtgccaagtctttgcccgccagcgcgctcgggacctgtcggagcaggcgagcgcgccgctggccaaggacaagcagatcgaagagctgcggcaggagtgccacctcctgcaggcgcgtgtcgcctcgggtccctgcagcgacctgcatactggaaggggcggcccctgcacccagtggctcaacgtcagagacttagaccgcctgcagcgcgagtcccagcgggaagtgctgcgcctgcagaggcagttgatgcttcagcagggcaacggtggcgcttggcccgaggcgggcggccagagcgcaacctgcgaggaggtgcgacggcagatgctggcgctggagcgcgagctggaccagcggcggcgcgagtgccaggagctgggcacgcaggcggccccggcgcggcgacgtggcgaggaggccgagacacagctgcaggcggcgctgctcaaaaacgcctggctggcggaggagaatgggcggctgcaggccaagaccgactgggtgcggaaggtggaggctgagaatagcgaagtgcgcggccacctgggccgcgcgtgtcaagagcgcgatgcctccggcttgatcgccgaacagctgctgcagcaggcggcgcgcgggcaggacaggcagcagcagctgcaacgcgacccgcagaaggccctgtgtgacctccatccttcctggaaggagatacaggcgctccagtgtcggcctggtcaccctcctgaacagccctgggagaccagtcaaatgccggagtcccaagttaaaggtagcagaaggcccaagttccacgcacggcctgaagactacgcagtgtcacagcccaacagagacatacaggagaaaagggaagcctccctcgaggagagcccagttgcccttggggagtcagccagtgtcccccaagtttcagagacagtccctgccagccaacctctgtccaagaaaaccagctcccagtcaaactcctcctctgaggggtcgatgtgggccaccgtgccgtcctcccctactctggacagggacacagccagtgaggtggatgacctggagcctgacagcgtgtccctggccctggaaatggggggctcggcggctcctgctgcccccaagctcaagatcttcatggctcagtataactacaacccatttgaggggcccaatgatcaccctgagggtgagctgcccctcacagctggggactacatatatatcttcggggacatggatgaggatggcttctatgagggggagcttgacgatggccggcgggggctggtgccctccaacttcgtggagcagattccggacagctacatcccaggctgcctgcctgccaaatcccctgatcttggccccagtcaactcccagcggggcaggatgaagctctggaggaagacagcttattatctgggaaagcccagggaatggtggacagagggctgtgccagatggtcagggtgggctccaagacagaagtagcaacagagatcctggataccaagacggaagcctgccagctgggcttgctgcagagcatggggaagcagggcctctccagaccccttctggggaccaaaggggtgctccgtatggctcccatgcagctacacctgcagaatgtcacagccacatcagccaacatcacctgggtctacagcagccaccgccacccccatgtggtatatcttgatgaccgagagcatgccctgaccccagcgggcgtgagctgctacaccttccagggcctgtgccccggcacgcactaccgggtgcgggtggaggtgcggctgccatgggacttgctgcaggtgtattggggaactatgtcctccaccgtcaccttcgacacactcttggcaggacctccctacccaccgctggaggtgctggtggagcgccatgcctcgccaggtgtcctggtggtcagctggctccctgtgaccattgactcagctgggtcctccaatggagtccaggtcaccggttatgctgtgtatgcagatgggcttaaggtttgtgaggtcgccgatgccactgctgggagcaccgtattggaattctcccagctacaggtgcccctcacgtggcagaaggtctcagtgagaaccatgtcactctgtggtgagtccctggattcagtgcctgctcagatccccgaggacttcttcatgtgtcaccgatggccagagactccaccctttagctacacttgtggcgacccatccacctacagagtcaccttccccgtctgcccccagaagctgtcactggctcctccgagtgccaaggccagcccccacaaccctggaagctgcggggagccccaggccaagttcctagaagcattctttgaagaacccccaaggaggcaatccccagtgtccaacctgggctcagaaggagaatgtccgagttcaggggctggcagccaagcccaggagcttgcagaggcctgggagggctgtagaaaggacctgctctttcagaagagtccccagaaccacaggccaccttcagtcagtgaccagcctggggagaaggaaaattgctaccagcacatgggcaccagcaaaagccctgctccaggattcatccatctacgcaccgagtgtgggcccaggaaagaaccgtgtcaggaaaaggctgcccttgagagggtacttcggcaaaagcaagatgcccaagggttcacacctccccagctgggcgccagccaacagtatgcatctgacttccataacgttttgaaggaggagcaggaggcactgtgcttggatctgcggggcacagagaggcgagaggagaggagggagcctgagccccacagcaggcaaggacaagctctgggggtgaagagagggtgccagctccatgagcccagctcggcactgtgtccagctccatccgccaaagtcatcaagatgcccaggggtggcccccaacagctggggacgggggccaacactccagccagggtctttgtggccctctctgattacaaccccctggtgatgtctgccaacctcaaggctgcagaggaggagctggtcttccagaaaaggcagttgctaagagtgtggggctctcaggacacccatgatttctacctcagcgagtgcaacaggcaagtgggcaatatccccgggcgcctagtggctgagatggaggtggggacagagcagactgataggaggtggcgttctccggcccaagggcacctgccttctgtggcccacctcgaggactttcaggggctcaccatcccccagggttcctccctggtgctccaggggaactccaagagactcccactgtggactccaaagatcatgatagcagctctggactatgatcctggggatgggcaaatggggggccaggggaagggcaggctggcgctgagggcaggagacgtggtcatggtttacgggcccatggatgaccaaggattctattatggagagttgggcggccacaggggcctggttcctgcccacctgctggatcacatgtccctccatggacactgagcaagcatccttgcccaggtagtggcctctggctgctcacaccctgccagaggagaagcaagcgttcagaccctcacaccagcacccctcctcaccaccataagtagcatgtgctccaagtgccactgtgttaaactgatggtagtccttaagcgtcccctaggctctgaaagtagcaggacttaagcctgagttatttgcaaaagcaaacacaacaagccaacccctgagagtctgagaagccatttcaaagttgctgataactatggcaggtatacggagaagcgcctttttctgtggccaatgtgtgttttctctgggaggttaaggttatctgtccattgccttgtacgaaagtctcaagaaaagtctacatctt

SEQ ID NO: 26750 - DNA, 5475 bp, Homo sapiens
  source 1..5475: mol_type = unassigned DNA
cggaacggcggcgcttcgctgcccgggagcgccagctgcgtgaggaggccgagcgggagcggcggcagctggctgaccgtctgcgctccaagtgggaggcacagcgcagccgggagttgcggcagctgcaagaggagatgcagcgggaacgcgaggccgagatccggcagctgctgcgctggaaggaggccgagcagcggcagctgcagcagctgctgcaccgggagcgcgatggcgtggtgcgccaagcccgggagctgcagcgccagctggccgaggagctggtgaaccgcggccactgtagccgcccgggggcgtccgaggtttccgcggcgcagtgccgctgtcgcctgcaggaagtgttggcgcagcttcgctggcagactgacggcgagcaggcggcgcgcatccgctatctgcaggcggcgctggaggtggagcgccagctcttcctcaagtacatcctggcgcacttccgcgggcacccggctttgtcgggatcaccggacccccaagctgtgcattccttggaagaaccgctgccccagacctccagcggctcttgccacgcccccaaacccgcctgccaactcggatctctagacagcctgagtgctgaagtcggtgtgcgctcccgctcgctaggcctggtgtcctctgcgtgctccagctccccagacggcctgctctccacgcacgccagctcccttgattgcttcgcacctgcgtgttcccgctcgcttgacagcacccggagcctccccaaggcctccaaatccgaggagcggccctcctcaccagacacctccacccctggctcccggaggctctcgccgccaccatcgccactcccgccgccaccaccaccgtcagcccacaggaaactcagcaacccgcggggaggagaaggctctgagagccagccctgcgaagtcctgactccctcacccccgggcctgggccaccacgagctgataaagctgaactggctgctggccaaggcgttgtgggtgctggcgcgccgctgttataccctgcaagaggagaacaagcagctgcggcgtgcaggctgcccctaccaggcagacgagaaggtgaagcggctcaaggtaaagcgcgcggagctgaccgggctcgcgcggcgcctagctgaccgcgcccgcgagctgcaggagaccaacctccgggccgtgagcgcgcctatacccggcgagagttgcgccggcctggagctgtgccaagtctttgcccgccagcgcgctcgggacctgtcggagcaggcgagcgcgccgctggccaaggacaagcagatcgaagagctgcggcaggagtgccacctcctgcaggcgcgtgtcgcctcgggtccctgcagcgacctgcatactggaaggggcggcccctgcacccagtggctcaacgtcagagacttagaccgcctgcagcgcgagtcccagcgggaagtgctgcgcctgcagaggcagttgatgcttcagcagggcaacggtggcgcttggcccgaggcgggcggccagagcgcaacctgcgaggaggtgcgacggcagatgctggcgctggagcgcgagctggaccagcggcggcgcgagtgccaggagctgggcacgcaggcggccccggcgcggcgacgtggcgaggaggccgagacacagctgcaggcggcgctgctcaaaaacgcctggctggcggaggagaatgggcggctgcaggccaagaccgactgggtgcggaaggtggaggctgagaatagcgaagtgcgcggccacctgggccgcgcgtgtcaagagcgcgatgcctccggcttgatcgccgaacagctgctgcagcaggcggcgcgcgggcaggacaggcagcagcagctgcaacgcgacccgcagaaggccctgtgtgacctccatccttcctggaaggagatacaggcgctccagtgtcggcctggtcaccctcctgaacagccctgggagaccagtcaaatgccggagtcccaagttaaaggtagcagaaggcccaagttccacgcacggcctgaagactacgcagtgtcacagcccaacagagacatacaggagaaaagggaagcctccctcgaggagagcccagttgcccttggggagtcagccagtgtcccccaagtttcagagacagtccctgccagccaacctctgtccaagaaaaccagctcccagtcaaactcctcctctgaggggtcgatgtgggccaccgtgccgtcctcccctactctggacagggacacagccagtgaggtggatgacctggagcctgacagcgtgtccctggccctggaaatggggggctcggcggctcctgctgcccccaagctcaagatcttcatggctcagtataactacaacccatttgaggggcccaatgatcaccctgagggtgagctgcccctcacagctggggactacatatatatcttcggggacatggatgaggatggcttctatgagggggagcttgacgatggccggcgggggctggtgccctccaacttcgtggagcagattccggacagctacatcccaggctgcctgcctgccaaatcccctgatcttggccccagtcaactcccagcggggcaggatgaagctctggaggaagacagcttattatctgggaaagcccagggaatggtggacagagggctgtgccagatggtcagggtgggctccaagacagaagtagcaacagagatcctggataccaagacggaagcctgccagctgggcttgctgcagagcatggggaagcagggcctctccagaccccttctggggaccaaaggggtgctccgtatggctcccatgcagctacacctgcagaatgtcacagccacatcagccaacatcacctgggtctacagcagccaccgccacccccatgtggtatatcttgatgaccgagagcatgccctgaccccagcgggcgtgagctgctacaccttccagggcctgtgccccggcacgcactaccgggtgcgggtggaggtgcggctgccatgggacttgctgcaggtgtattggggaactatgtcctccaccgtcaccttcgacacactcttggcaggacctccctacccaccgctggatgtgctggtggagcgccatgcctcgccaggtgtcctggtggtcagctggctccctgtgaccattgactcagctgggtcctccaatggagtccaggtcaccggttatgctgtgtatgcagatgggcttaaggtttgtgaggtcgccgatgccactgctgggagcaccgtattggaattctcccagctacaggtgcccctcacgtggcagaaggtctcagtgagaaccatgtcactctgtggtgagtccctggattcagtgcctgctcagatccccgaggacttcttcatgtgtcaccgatggccagagactccaccctttagctacacttgtggcgacccatccacctacagagtcaccttccccgtctgcccccagaagctgtcactggctcctccgagtgccaaggccagcccccacaaccctggaagctgcggggagccccaggccaagttcctagaagcattctttgaagaacccccaaggaggcaatccccagtgtccaacctgggctcagaaggagaatgtccgagttcaggggctggcagccaagcccaggagcttgcagaggcctgggagggctgtagaaaggacctgctctttcagaagagtccccagaaccacaggccaccttcagtcagtgaccagcctggggagaaggaaaattgctaccagcacatgggcaccagcaaaagccctgctccaggattcatccatctacgcaccgagtgtgggcccaggaaagaaccgtgtcaggaaaaggctgcccttgagagggtacttcggcaaaagcaagatgcccaagggttcacacctccccagctgggcgccagccaacagtatgcatctgacttccataacgttttgaaggaggagcaggaggcactgtgcttggatctgcggggcacagagaggcgagaggagaggagggagcctgagccccacagcaggcaaggacaagctctgggggtgaagagagggtgccagctccatgagcccagctcggcactgtgtccagctccatccgccaaagtcatcaagatgcccaggggtggcccccaacagctggggacgggggccaacactccagccagggtctttgtggccctctctgattacaaccccctggtgatgtctgccaacctcaaggctgcagaggaggagctggtcttccagaaaaggcagttgctaagagtgtggggctctcaggacacccatgatttctacctcagcgagtgcaacaggcaagtgggcaatatccccgggcgcctagtggctgagatggaggtggggacagagcagactgataggaggtggcgttctccggcccaagggcacctgccttctgtggcccacctcgaggactttcaggggctcatcatcccccagggttcctccctggtgctccaggggaactccaagagactcccactgtggactccaaagatcatgatagcagctctggactatgatcctggggatgggcaaatggggggccaggggaagggcaggctggcgctgagggcaggagacgtggtcatggtttacgggcccatggatgaccaaggattctattatggagagttgggcggccacaggggcctggttcctgcccacctgctggatcacatgtccctccatggacactgagcaagcatccttgcccaggtagtggcctctggctgctcacaccctgccagaggagaagcaagcgttcagaccctcacaccagcacccctcctcaccaccataagtagcatgtgctccaagtgccactgtgttaaactgatggtagtccttaagtgtcccctaggctctgaaagtagcaggacttaagcctgagttatttgcaaaagcaaacacaacaagccaacccctgagagtctgagaagccatttcaaagttgctgataactatggcaggtatacggagaagcgcctttttctgtggccaatgtgtgttttctctgggaggttaaggttatctgtccattgccttgtacgaaagtctcaagaaaagtctacatcttaaaaaagaaaaagcaatctgagtgttatttttgggatgtgagggtgatctggctgcgacatgtgtcaccccattgatcatcagggttgattcggctgatctggctgactaggcgggtatccccttcctcccgcaccactccatgtgcgtccctccagaagctgtgcgctcaatggaagaggatgaccatccccgatagaggacgatcggtcttcagtcaagagtataagagtagctgcgctcccctgctagaacctccaaacgagctctcagaatgttatttttctgtcttatgtccaacccctcattaaaatgttcatag

SEQ ID NO: 26751 - DNA, 5784 bp, Homo sapiens
  source 1..5784: mol_type = unassigned DNA
ccagccacctgacccaaatacaccacctgaacccacgaccaggtatgcccacaccccatgggtggccttaacacacacaccctgcccctttctccaagtacaggagcagcagcccagacttccctcggggcaccgcggcctgcttgggactgcacagtgcctgggagggtgcctggggagggtcacaagggacttggtgctagaagcaggaaaagtgtagggaccggaaaagcccccgtgcatcctggaagggacatgggccagtttgagcaggggtgtgggagtccagccctggccttgccaggtggagaggcgcctgggccagacatccgcggcaggaggcgggggaacatgccaagaggcggaaggggcacgcggagacccccagggggcgccggaaggggcgcgccgggcggtcggcggcggccgttggcgagctgaggcctgccaggcgaagtctggagaccagccgggccgcggccgcaatggccaaggactcgcccagccccttgggcgcgtcgcccaagaagccgggctgctccagcccggcggcggcagtgctggagaaccagaggcgggagctggagaagctacgggcggagctggaggcggagcgggcaggctggcgggcggaacggcggcgcttcgctgcccgggagcgccagctgcgtgaggaggccgagcgggagcggcggcagctggctgaccgtctgcgctccaagtgggaggcacagcgcagccgggagttgcggcagctgcaagaggagatgcagcgggaacgcgaggccgagatccggcagctgctgcgctggaaggaggccgagcagcggcagctgcagcagctgctgcaccgggagcgcgatggcgtggtgcgccaagcccgggagctgcagcgccagctggccgaggagctggtgaaccgcggccactgtagccgcccgggggcgtccgaggtttccgcggcgcagtgccgctgtcgcctgcaggaagtgttggcgcagcttcgctggcagactgacggcgagcaggcggcgcgcatccgctatctgcaggcggcgctggaggtggagcgccagctcttcctcaagtacatcctggcgcacttccgcgggcacccggctttgtcgggatcaccggacccccaagctgtgcattccttggaagaaccgctgccccagacctccagcggctcttgccacgcccccaaacccgcctgccaactcggatctctagacagcctgagtgctgaagtcggtgtgcgctcccgctcgctaggcctggtgtcctctgcgtgctccagctccccagacggcctgctctccacgcacgccagctcccttgattgcttcgcacctgcgtgttcccgctcgcttgacagcacccggagcctccccaaggcctccaaatccgaggagcggccctcctcaccagacacctccacccctggctcccggaggctctcgccgccaccatcgccactcccgccgccaccaccaccgtcagcccacaggaaactcagcaacccgcggggaggagaaggctctgagagccagccctgcgaagtcctgactccctcacccccgggcctgggccaccacgagctgataaagctgaactggctgctggccaaggcgttgtgggtgctggcgcgccgctgttataccctgcaagaggagaacaagcagctgcggcgtgcaggctgcccctaccaggcagacgagaaggtgaagcggctcaaggtaaagcgcgcggagctgaccgggctcgcgcggcgcctagctgaccgcgcccgcgagctgcaggagaccaacctccgggccgtgagcgcgcctatacccggcgagagttgcgccggcctggagctgtgccaagtctttgcccgccagcgcgctcgggacctgtcggagcaggcgagcgcgccgctggccaaggacaagcagatcgaagagctgcggcaggagtgccacctcctgcaggcgcgtgtcgcctcgggtccctgcagcgacctgcatactggaaggggcggcccctgcacccagtggctcaacgtcagagacttagaccgcctgcagcgcgagtcccagcgggaagtgctgcgcctgcagaggcagttgatgcttcagcagggcaacggtggcgcttggcccgaggcgggcggccagagcgcaacctgcgaggaggtgcgacggcagatgctggcgctggagcgcgagctggaccagcggcggcgcgagtgccaggagctgggcacgcaggcggccccggcgcggcgacgtggcgaggaggccgagacacagctgcaggcggcgctgctcaaaaacgcctggctggcggaggagaatgggcggctgcaggccaagaccgactgggtgcggaaggtggaggctgagaatagcgaagtgcgcggccacctgggccgcgcgtgtcaagagcgcgatgcctccggcttgatcgccgaacagctgctgcagcaggcggcgcgcgggcaggacaggcagcagcagctgcaacgcgacccgcagaaggccctgtgtgacctccatccttcctggaaggagatacaggcgctccagtgtcggcctggtcaccctcctgaacagccctgggagaccagtcaaatgccggagtcccaagttaaaggtagcagaaggcccaagttccacgcacggcctgaagactacgcagtgtcacagcccaacagagacatacaggagaaaagggaagcctccctcgaggagagcccagttgcccttggggagtcagccagtgtcccccaagtttcagagacagtccctgccagccaacctctgtccaagaaaaccagctcccagtcaaactcctcctctgaggggtcgatgtgggccaccgtgccgtcctcccctactctggacagggacacagccagtgaggtggatgacctggagcctgacagcgtgtccctggccctggaaatggggggctcggcggctcctgctgcccccaagctcaagatcttcatggctcagtataactacaacccatttgaggggcccaatgatcaccctgagggtgagctgcccctcacagctggggactacatatatatcttcggggacatggatgaggatggcttctatgagggggagcttgacgatggccggcgggggctggtgccctccaacttcgtggagcagattccggacagctacatcccaggctgcctgcctgccaaatcccctgatcttggccccagtcaactcccagcggggcaggatgaagctctggaggaagacagcttattatctgggaaagcccagggaatggtggacagagggctgtgccagatggtcagggtgggctccaagacagaagtagcaacagagatcctggataccaagacggaagcctgccagctgggcttgctgcagagcatggggaagcagggcctctccagaccccttctggggaccaaaggggtgctccgtatggctcccatgcagctacacctgcagaatgtcacagccacatcagccaacatcacctgggtctacagcagccaccgccacccccatgtggtatatcttgatgaccgagagcatgccctgaccccagcgggcgtgagctgctacaccttccagggcctgtgccccggcacgcactaccgggtgcgggtggaggtgcggctgccatgggacttgctgcaggtgtattggggaactatgtcctccaccgtcaccttcgacacactcttggcaggacctccctacccaccgctggatgtgctggtggagcgccatgcctcgccaggtgtcctggtggtcagctggctccctgtgaccattgactcagctgggtcctccaatggagtccaggtcaccggttatgctgtgtatgcagatgggcttaaggtttgtgaggtcgccgatgccactgctgggagcaccgtattggaattctcccagctacaggtgcccctcacgtggcagaaggtctcagtgagaaccatgtcactctgtggtgagtccctggattcagtgcctgctcagatccccgaggacttcttcatgtgtcaccgatggccagagactccaccctttagctacacttgtggcgacccatccacctacagagtcaccttccccgtctgcccccagaagctgtcactggctcctccgagtgccaaggccagcccccacaaccctggaagctgcggggagccccaggccaagttcctagaagcattctttgaagaacccccaaggaggcaatccccagtgtccaacctgggctcagaaggagaatgtccgagttcaggggctggcagccaagcccaggagcttgcagaggcctgggagggctgtagaaaggacctgctctttcagaagagtccccagaaccacaggccaccttcagtcagtgaccagcctggggagaaggaaaattgctaccagcacatgggcaccagcaaaagccctgctccaggattcatccatctacgcaccgagtgtgggcccaggaaagaaccgtgtcaggaaaaggctgcccttgagagggtacttcggcaaaagcaagatgcccaagggttcacacctccccagctgggcgccagccaacagtatgcatctgacttccataacgttttgaaggaggagcaggaggcactgtgcttggatctgcggggcacagagaggcgagaggagaggagggagcctgagccccacagcaggcaaggacaagctctgggggtgaagagagggtgccagctccatgagcccagctcggcactgtgtccagctccatccgccaaagtcatcaagatgcccaggggtggcccccaacagctggggacgggggccaacactccagccagggtctttgtggccctctctgattacaaccccctggtgatgtctgccaacctcaaggctgcagaggaggagctggtcttccagaaaaggcagttgctaagagtgtggggctctcaggacacccatgatttctacctcagcgagtgcaacaggcaagtgggcaatatccccgggcgcctagtggctgagatggaggtggggacagagcagactgataggaggtggcgttctccggcccaagggcacctgccttctgtggcccacctcgaggactttcaggggctcatcatcccccagggttcctccctggtgctccaggggaactccaagagactcccactgtggactccaaagatcatgatagcagctctggactatgatcctggggatgggcaaatggggggccaggggaagggcaggctggcgctgagggcaggagacgtggtcatggtttacgggcccatggatgaccaaggattctattatggagagttgggcggccacaggggcctggttcctgcccacctgctggatcacatgtccctccatggacactgagcaagcatccttgcccaggtagtggcctctggctgctcacaccctgccagaggagaagcaagcgttcagaccctcacaccagcacccctcctcaccaccataagtagcatgtgctccaagtgccactgtgttaaactgatggtagtccttaagtgtcccctaggctctgaaagtagcaggacttaagcctgagttatttgcaaaagcaaacacaacaagccaacccctgagagtctgagaagccatttcaaagttgctgataactatggcaggtatacggagaagcgcctttttctgtggccaatgtgtgttttctctgggaggttaaggttatctgtccattgccttgtacgaaagtctcaagaaaagtctacatctt

SEQ ID NO: 26752 - DNA, 10988 bp, Homo sapiens
  source 1..10988: mol_type = unassigned DNA
caaagattttgattccagtggaatctttgctttagatttgtgtgtgtgtttgtgttcgtgaattgtaactccagaagcaatgcctgtacaagctccacaatggacggatttcctctcctgcccaatttgcactcagactttcgacgaaacaattcgaaagcccatcagtttgggttgtggccatactgtctgcaagatgtgcctgaataaactccaccgcaaggcttgcccatttgaccagaccactatcaatacagacattgagctcctccctgtgaactcagcattgctgcagctcgtgggtgctcaggtccctgagcagcagcctattactttgtgtagtggggttgaagacacaaagcattatgaggaagccaagaaatgtgtagaagaattagcattgtacttaaaaccgctcagcagtgctagaggagtgggtctgaacagcactactcagagtgttctgagtcgcccaatgcagaggaagcttgtgactctagtccactgtcaactagtagaagaagaaggcaggattcgtgccatgagggcagctcgatctttaggtgaacgaacagttacagagctcattctccagcaccagaatcctcagcaactctcttccaatctttgggcagcagtaagggctaggggatgccagttccttggaccagcaatgcaggaggaagctttaaagttggttctgctggccttagaagatggttctgctttgtcaagaaaagtattggttctgtttgtggtgcaaagattggagccacggtttcctcaagcctctaaaactagcattgggcatgttgttcagctcctttatagagcctcctgtttcaaggtcaccaaacgtgatgaagactcttctttgatgcagctgaaagaagaatttagaacctatgaagctctgcggcgagaacatgactcccagatagtgcagattgctatggaagcaggcttacgaattgcaccggaccagtggtcctctttgctttatggagaccagtctcacaaatctcatatgcagtccattattgacaagttgcagactccagcctcttttgcacagagtgttcaggaactaacaattgctctccagcgaactggagacccagcaaacttgaaccgactaagaccccatttggagctgttagcaaacattgaccctagtccagatgctcctcctcctacttgggaacagctggaaaatgggctggttgctgtgcgtacagtggtacatgggctggttgattatatccagaaccacagcaaaaaaggagcagatcagcagcagcctccacagcatagcaaatacaaaacatacatgtgtcgagatatgaagcagagaggaggatgccctcgtggggccagctgtacatttgcacactcacaggaggaactggaaaaatttcgtaaaatgaataagcgcctggttccgagaagacccttgagtgcctctttgggtcaacttaatgaggtgggcctgccttcagcagctatccttccagatgaaggtgcagtggatctccctagcagaaaacctcctgctctgccaaatggaattgtatcaacagggaatacagtaacacagcttattccgcgagggacagaccccagctatgattctagtctgaaaccaggaaaaatagatcatctgagcagtagtgctcctggatcccctcctgacctgctagaatctgttcctaagagtatttctgccttacctgtgaatccacattctatacctccaagggggccagcagatctgcctccaatgcctgttaccaaaccacttcagatggtacctcgaggttctcagttatatccagcacaacagacggatgtttattatcaggatcctcgaggagcagctccgccatttgaaccagcaccttatcagcagggtatgtattatactccaccaccacaatgtgtgtcccgctttgtccgacctccaccatctgctcctgaacctgctcctccctacttggatcattatccaccctacctccaagaacgtgttgtaaactctcagtatggcacacagccacagcagtacccacctatatacccatctcactatgatggccgtcgagtgtaccctgctccgtcttacacaagagaagagatattccgagaaagccctatacccattgagattccacctgcagcagtaccatcgtatgtaccagaatccagagaaagataccaacagatcgagagttactatccagtggctcctcatccaactcagatcagaccttcgtacctcagagaacctccttatagccggcttcctcctcctccccagcctcatcctagtctagatgaactacatcgccgacgaaaggaaataatggcccagctagaggaaagaaaggttatctctccacctccttttgcaccttcaccaaccttgcctcctacctttcatccggaagaatttttggatgaagacttgaaggtagctgggaaatacaaaggaaatgattatagccaatactctccctggtcatgtgacaccatcggctcctacattggaaccaaagatgcaaaacccaaagatgttgtggcagcagggagtgtggaaatgatgaatgtggagagtaaaggaatgagggaccagcgattagatcttcagagaagagcagcagaaaccagtgatgatgacctcatcccatttggagaccgaccaacagtgtctcggtttggtgccatctcacgaacttccaaaactatatatcagggtgctggtccaatgcaggctatggcacctcagggagctcctacaaaatctattaacatttcagattatagtccatatggaacccacggtggctggggagcttctccatattcacctcatcaaaacataccttctcagggacacttcagtgagagggagagaatatctatgtcagaagtggccagtcatggaaaaccccttccatctgctgagagagaacagctacgactagaattgcagcaattgaaccatcagattagccagcagacccagctacgtggactagaggctgttagtaacaggctggtgttgcagagggaggcaaacaccctggcaggccagtcacagcccccaccaccgccacctccaaaatggcctgggatgatctcaagtgagcagttgagcttggaactgcaccaggtggaaagggaaatcgggaagagaacacgggaactgagtatggaaaaccagtgttctctggacatgaaaagcaaactgaatacaagtaaacaagcagaaaatggacaaccagaaccacaaaacaaggttccggctgaggaccttacattgacattcagtgatgtaccaaatggatcagccttgacacaagagaatatcagcctcctatcaaacaagaccagctctctgaacctgtcagaggaccctgagggaggaggggataataatgactcccagagatcaggagttactcccagttctgctccttaaaatatgaggagtcctacttttatcttctgctcctaatcagtttgtcgggcataggggtaggagaacgcataacttctaaactttttctcttaagagcggtcagagaaatccaggaaattcaccagaggcaatgtgcacaaacaccactactaaaaacaaaccctgcacatagttcacattaatgcatttttttaatttaaagaaaaagaaaattagcagtatctgcaagcaattcagattaaatttgtttttgttctgtgaatgaactttattttaataactttggacgccttggatccagggctttaaaaaaaaaagatattatatatacactctgtttgattaattgtatgatcttaatgaagtaggttttcttgtattttggtattacatacccagtgtataatttgtataattcctcacccccaatccttatcaattctcaccaccccataaacttaaaacagaccaaaaatgtcagctttcagagaattctgtggtgcttgagaaacagacagtactagactgagttattagaaaatgtgcagcaaaccaacttttcccagagctgttatttggaattctttatccctttctagatcactagcttcattggatacgtatatttttcttgacattgaagctttttgtttgtttgggagggttttatttcttgtttttattttcaacttttcaaatagaattaccaattttgaagtcctcattttcatattaaggatcatttgcattctcttaatataatcagaaagctgattcagtgtttaattagatttaaatgttgatcaagaattaactgtaacttactagcactgaaaatacatgtttggtgtttcgcctgcgttcagctcatggttggaaatttgaagcagtgcttttcaaattaaacttttgctgacatcataggatgctaaaaaacaaggacaatcaactatgttttaaaactgcaacatttgatttgaacttaaaatgaatagagccacattattttaatggatgttttgttttacttgtgaactgattgagtcttaaggatagtttatgaattgatcacttgttgctcagaatcattagtataagtaggtaggaaatagtttgaagtcatttttcatagacttaactgtccaatgttgcaaatgtttcttcatgaaaatattgaaaagagtaaggttttttttttttttaattctgctgcacatattctgatgccatgtgtctgtgcttaattaactaagaccctataaaacgtgtttagtggggactgtttgatatagttgccctctccattcctctatttgcctgatttttttcagtttccctttctgtattttactactaaattagaaagcactggttatgtaataagttactacattgctttggttgagtaaaaacaagagtttatatttttcttgtttcttattttcttaacccttaactcctgctgaggtcataacaacctcagtctaagctctgtgtccatcatactgttaacttaaacaaatgggtggtgggggtgggaagggtaatacagtcctgccattgcctaccagtaggagagtccaaacagaacactcttttgagtagcaattatttaatttgcccagtcaaggcaccgtgtttatatactatttcacattgaatttgattatgccctacagacctggctggtcaaggatttgatatacacatattggcttgggattcgagctttcttttttatttaaataaaaatttatatatatattatatatatacatatatacatagctatatctgtatatatattgggtatgttttaaggattttttcgcatgagcgcagctgttgcgataaattgaccgattgggaggtggtagaagcactgaatgaaggtgaggctttttttttttccagttttcttatacatttgtcttctttttttaaaaaaaaaaaaaaaaatatatatatatatatatatatatatatatatgtatgctttttcttttttttttggcttttgtttgctttttgacttttacttaaaacccttttacatttccactttaaatgcctattgtttattgggagaaggaaagaaacttttgtatgtctgacagagtcccaagatttttcatttctctgcataacagtaaaaggcaacattattggcctccaaccttctttttttttttttttttttttttttggagagggagtctgcttctgttgcccaggctggagtgcagtgggttgatctcggctcgctacaacctccacctcccgggttcaagcgattctcctgcctcagcctcctgagtagctgggactacaggcacgcgccaccacgtccagctaatttttgtactacaaccttcttataagcagatttggactgatcttctcctttgggtatgtcagatcatcctaaattttagaagcagttgattcactttggaattcagaatgattcttgtattagaagataatttgtgggtattaatttttgtttaagtttaaaataaaagtaaagattcattttggatatcagttgaaaccccttagtaactcagtttctgttattcttgttctcatttcctttaaatacacttgttcttggcttttgccattttgattctgtgaagtaggcaggagcagggattaatttatacagtattcctgttctgaacaaaaccagaaaagtcactgtataaacttgacttaaaatagtatctttctcttttcatgtattttcatttgggggaaaaaaaatctctttaattgtaacctgaattcaagctgtacccctccatggtcctacactctagagctaatctggttgggcagaaaggcagaaggatggtatattgtcccattgtgcctataatgtattttaaattggtcattccaccttacctaatggaaattcttgcagctttcctagtgctcatcagcggttttaggaattcactaacacccccaaaatttgttttttgttttttgctttttttccttttccttttctctgtgatatcatgagcctgtaaggacaaatggcatatttgggcataactgcttgactctgtaactacttttttaaaatcaaaattgaaaaggtattaattgcttctggctttttaatttttttttttagagacaaagatgaaaccagataggaaatacagtttttatgttttctacttactaaaatattagtttcttctaaatattactttatttgtatttcactaaattccaaagcaaaaatcagatatctgagatgaacaattttgaatgggttaaggtaggagtaataagcattgtgttcactcatacataggtgagggaattttatttatagcgagaaatataaaagtattttgacttactcttttttcaaggagtcgctaggaaagggtagaagaactgagaataagacatctagattccatttctggtttatatgtagctcttttgcctaatttatatataattttgtcataagataagtccagtaactgtcctgtcttagataacgtacagaggctgaagtgaccaaagatccattccttattacttttctaattaaaagaagagttagctagatttctagtagtagtattctagatattgataagacattattcctaatgccaactacaaatattcaactactcagaatgtatttaaaaaattgtttggtacagcattaatgttggtgattcctttctcccatcttatttcccttcccttctattctttcccatgtatttcttttgcctaaaagaatattggtatgattctcatttgctactttgagtatataactccatcagactttccagagttcttcagggatggagctcaaagtttacatttttccatatatgtctttttttttcttgacctttttccaccctgtaatttccccttgacttacccactgccctccccaatctgcaacagtgacagtttgctgcctcaaaacagagcattcaaatgaattcgcttagccaataacttctgtgaagttgccttttctaatggtgttattactcagtgatgcacaaatgtggtatttgccctactggtaggcaaacaaaggtctggttaagaatggtaacctgctgttttctttaaaggagagccaaagacttgtgctttactctgttttggttttgggggaagtagtagccattttgatcatgaaaccttttagtatttgtgagttgattgtactgtgtaagtagatttatctaaagttaactgttaaagttagctagccttataaaatgtaaaagtaatgaaaattcatcagtttctctaagccagtgaatgtcgtcttttgtaatattgtgtataagcatttgtgcccaccccagcttctgctatcactgtggtcaagtcatgggtctgagtaaaagaattcttgagtatgtgactggtgagaaataactaactatagtcagtacatgtacagattgttaaaattcaagacaaaatactttcactaaaaaaaaggattcgtctcagtaaagaagtattcagttgctgtcacttacatacaaatggtggtgggtagcagtctcaccatttttctactctctttttgctcgttttaaataattgagtaaaggttttatttgtaaaatctatctgtaaaaagcacctgtaacgatttatatgtcattgaaaggaatggcccagttactttttaggagagattaataacctacctggaaattaactgcagtgtttacttagattttttccccctaataagagtctaagtgtgttaaatttttaactgatgatatggttacagtgttgcaaggtgatctcttcccctgaaaaatctgcctatccttttaagaaaaattagacctactaaactaaagcaaattttactttcatcattagcacctaaacaagcaagcagtctactactgtcatcattttacctgagtgcccattttgctgatccacattcatacctttctaccttggacagctatgatttttatatttatttgttgcttcagctcaggtttatgaaattttcctgctgaaatgacttattgggagttgtaggttgattatagttactattaaacattttctcaatttagcttttctgagccacttcaagaagaaagctgtttttgtcaaaaggtactattaattgtagcaagtaaatcttaagatttgaatttttaagattttatttctgtgttcactaaagatctttccacaagtaatagattataattgataagtaatactagctatagtgttaataaagagtaagactatcaccaccaggaataagtaacaccttttaataataaatctattcctaataggtatgttttcaatactgcactgaacaaagtgggtaaagagccctttgaaatcttattgtaataaagggacttacctcaccactggaatccttgttttcagagcctctggattttcagccaaacactgaatttctcctaaactttatccctgaaacatccctagagaacgaactttattttcacaagaaaataaggcacaataagggggaagaacttaaacctcaacataatatcgtgtccaaaaatgtgtatttagaaaaataaaatcctgtggagtttgttatcctaatgtttattttatactagataaggtgacttgttttcttgtattgaggtcttactgtttcagatttgtttttgtttctgttctaactctaagcagacagagctcacaagtctttggcatccattttaggttgtacactcagagtcatcttataactggaaactgtcaggtggtcccccaccccagtgagtgtatgaaagagtcaagaaaaagattggaaacaaactattgggtgaataattggttgctctattattattattattattatttgcctttttttaatcaccatttatttgtgtaatctttctccattgattggctgtcattcttataatatctgaactaccccataaaataattctctgacttaaaggcatttagcttttgcttatcgtttttacatcctctattcaactaagacactgtcttgagagttattttttccagatggatcgttggcctaaattttcacacttctcccctgttcatcctttttcctcttccctgcttcctgggaataaaaggaacttttttaaaaaaattaattagtccacaggtctcattatctttctttatgattaatctatgactttttggtacaagaacaatggaaaaagtgaattaaggtaatgaacaaaacctttcacccacttaaacattttccagttttgagattcctcttcgtgtttgtggtgtcttccccttgttaccccttctgccctttttctctgactatggtaatttggtctttaggctcatatcagtctccccgagacattctgcagtcattatcacctttttgggtggattttattttgttttattttgttttttttaaaaaaataactttttaacattggtgcatatttgcttgggatagagcttgtgtaatttaccaatcgtattgattgtaagtgattgtgccctgcagaggtatatttaacaagacaaaaataatcttggttaataaaggagcccatgagatttgagtcaggttgtaagtgaaatcacttacacttttggatagaatttatactcctgctcttataaatcagtggtagacttaccattttttaaagttttcttgcatttttttgtttttttattgccacagctccctattctttcttgcctgcctccacccccctgttcaggaaaaaaaaaaattgagccttaaagtgacagctgattttttaattgctgaattttgtgaaattttactttttccaagtgtttccaactttaaaaagagaagtgaagacaaataggttggaatggtgaagacaaatggattggaatttcacaggctgtgaataattccttaggatctggcaaaccgtgaagtcttatttgaagaccttatctcctgagagttcttttggagtaggaaaaagaaccctatttgaaatagaccgtttttctcttgtttttaatctgtttaatatttctgatttttaagcagctttcaaaacaagtgtggtggaaaaaaagaaatagtagtaggaagatgtttagggcagcagaactctgggtctaaataagtacatgttcccacttgttgccgatttttgagagtactagggccatctttctcaattttgtattatttgtgtgcatgtttatatcaaagatgcccattttgttaaaatgctatttcctttattaccttggaaactgactcagcctcatgttgctcctaattagtgtttaaggctcccatgagttgcagataaaatgatttattttaacaagtagaaggaggtgattcaccttttggattgtaaatatatgaaaatgtctacaaggtctttatctgctttctgtcagcatttatattaaatgataaattaatgaggaa

SEQ ID NO: 26753 - DNA, 3775 bp, Homo sapiens
  source 1..3775: mol_type = unassigned DNA
ctttttttcaaagattttgattccagtggaatctttgctttagatttgtgtgtgtgtttgtgttcgtgaattgtaactccagaagcaatgcctgtacaagctccacaatggacggatttcctctcctgcccaatttgcactcagactttcgacgaaacaattcgaaagcccatcagtttgggttgtggccatactgtctgcaagatgtgcctgaataaactccaccgcaaggcttgcccatttgaccagaccactatcaatacagacattgagctcctccctgtgaactcagcattgctgcagctcgtgggtgctcaggtccctgagcagcagcctattactttgtgtagtggggttgaagacacaaagcattatgaggaagccaagaaatgtgtagaagaattagcattgtacttaaaaccgctcagcagtgctagaggagtgggtctgaacagcactactcagagtgttctgagtcgcccaatgcagaggaagcttgtgactctagtccactgtcaactagtagaagaagaaggcaggattcgtgccatgagggcagctcgatctttaggtgaacgaacagttacagagctcattctccagcaccagaatcctcagcaactctcttccaatctttgggcagcagtaagggctaggggatgccagttccttggaccagcaatgcaggaggaagctttaaagttggttctgctggccttagaagatggttctgctttgtcaagaaaagtattggttctgtttgtggtgcaaagattggagccacggtttcctcaagcctctaaaactagcattgggcatgttgttcagctcctttatagagcctcctgtttcaaggtcaccaaacgtgatgaagactcttctttgatgcagctgaaagaagaatttagaacctatgaagctctgcggcgagaacatgactcccagatagtgcagattgctatggaagcaggcttacgaattgcaccggaccagtggtcctctttgctttatggagaccagtctcacaaatctcatatgcagtccattattgacaagttgcagactccagcctcttttgcacagagtgttcaggaactaacaattgctctccagcgaactggagacccagcaaacttgaaccgactaagaccccatttggagctgttagcaaacattgaccctagtccagatgctcctcctcctacttgggaacagctggaaaatgggctggttgctgtgcgtacagtggtacatgggctggttgattatatccagaaccacagcaaaaaaggagcagatcagcagcagcctccacagcatagcaaatacaaaacatacatgtgtcgagatatgaagcagagaggaggatgccctcgtggggccagctgtacatttgcacactcacaggaggaactggaaaaatttcgtaaaatgaataagcgcctggttccgagaagacccttgagtgcctctttgggtcaacttaatgaggtgggcctgccttcagcagctatccttccagatgaaggtgcagtggatctccctagcagaaaacctcctgctctgccaaatggaattgtatcaacagggaatacagtaacacagcttattccgcgagggacagaccccagctatgattctagtctgaaaccaggaaaaatagatcatctgagcagtagtgctcctggatcccctcctgacctgctagaatctgttcctaagagtatttctgccttacctgtgaatccacattctatacctccaagggggccagcagatctgcctccaatgcctgttaccaaaccacttcagatggtacctcgaggttctcagttatatccagcacaacagacggatgtttattatcaggatcctcgaggagcagctccgccatttgaaccagcaccttatcagcagggtatgtattatactccaccaccacaatgtgtgtcccgctttgtccgacctccaccatctgctcctgaacctgctcctccctacttggatcattatccaccctacctccaagaacgtgttgtaaactctcagtatggcacacagccacagcagtacccacctatatacccatctcactatgatggccgtcgagtgtaccctgctccgtcttacacaagagaagagatattccgagaaagccctatacccattgagattccacctgcagcagtaccatcgtatgtaccagaatccagagaaagataccaacagatcgagagttactatccagtggctcctcatccaactcagatcagaccttcgtacctcagagaacctccttatagccggcttcctcctcctccccagcctcatcctagtctagatgaactacatcgccgacgaaaggaaataatggcccagctagaggaaagaaaggttatctctccacctccttttgcaccttcaccaaccttgcctcctacctttcatccggaagaatttttggatgaagacttgaaggtagctgggaaatacaaaggaaatgattatagccaatactctccctggtcatgtgacaccatcggctcctacattggaaccaaagatgcaaaacccaaagatgttgtggcagcagggagtgtggaaatgatgaatgtggagagtaaaggaatgagggaccagcgattagatcttcagagaagagcagcagaaaccagtgatgatgacctcatcccatttggagaccgaccaacagtgtctcggtttggtgccatctcacgaacttccaaaactatatatcagggtgctggtccaatgcaggctatggcacctcagggagctcctacaaaatctattaacatttcagattatagtccatatggaacccacggtggctggggagcttctccatattcacctcatcaaaacataccttctcagggacacttcagtgagagggagagaatatctatgtcagaagtggccagtcatggaaaaccccttccatctgctgagagagaacagctacgactagaattgcagcaattgaaccatcagattagccagcagacccagctacgtggactagagagggaggcaaacaccctggcaggccagtcacagcccccaccaccgccacctccaaaatggcctgggatgatctcaagtgagcagttgagcttggaactgcaccaggtggaaagggaaatcgggaagagaacacgggaactgagtatggaaaaccagtgttctctggacatgaaaagcaaactgaatacaagtaaacaagcagaaaatggacaaccagaaccacaaaacaaggttccggctgaggaccttacattgacattcagcagtgatgtaccaaatggatcagccttgacacaagagaatatcagcctcctatcaaacaagaccagctctctgaacctgtcagaggaccctgagggaggaggggataataatgactcccagagatcaggagttactcccagttctgctccttaaaatatgaggagtcctacttttatcttctgctcctaatcagtttgtcgggcataggggtaggagaacgcataacttctaaactttttctcttaagagcggtcagagaaatccaggaaattcaccagaggcaatgtgcacaaacaccactactaaaaacaaaccctgcacatagttcacattaatgcatttttttaatttaaagaaaaagaaaattagcagtatctgcaagcaattcagattaaatttgtttttgttctgtgaatgaactttattttaataactttggacgccttggatccagggctttaaa

SEQ ID NO: 26754 - DNA, 11261 bp, Homo sapiens
  source 1..11261: mol_type = unassigned DNA
tggcccctgctgcaggagcagcctcagcagcagcaggtgggaggccggaggcggtgctggcggtggcggcggcagccgtggcccggcggcctgggacagaatcagagtcaacggtggcctcggcggcggcggcggctgccgcggcggtggcgacggccgcggggactcggagctgagaggagctgctgctcggaccagcgcggttatatttcacactatgtgctgactgtatctacagaagatatttaaaaaaaaaaaagataaactttttttcaaagattttgattccagtggaatctttgctttagatttgtgtgtgtgtttgtgttcgtgaattgtaactccagaagcaatgcctgtacaagctccacaatggacggatttcctctcctgcccaatttgcactcagactttcgacgaaacaattcgaaagcccatcagtttgggttgtggccatactgtctgcaagatgtgcctgaataaactccaccgcaaggcttgcccatttgaccagaccactatcaatacagacattgagctcctccctgtgaactcagcattgctgcagctcgtgggtgctcaggtccctgagcagcagcctattactttgtgtagtggggttgaagacacaaagcattatgaggaagccaagaaatgtgtagaagaattagcattgtacttaaaaccgctcagcagtgctagaggagtgggtctgaacagcactactcagagtgttctgagtcgcccaatgcagaggaagcttgtgactctagtccactgtcaactagtagaagaagaaggcaggattcgtgccatgagggcagctcgatctttaggtgaacgaacagttacagagctcattctccagcaccagaatcctcagcaactctcttccaatctttgggcagcagtaagggctaggggatgccagttccttggaccagcaatgcaggaggaagctttaaagttggttctgctggccttagaagatggttctgctttgtcaagaaaagtattggttctgtttgtggtgcaaagattggagccacggtttcctcaagcctctaaaactagcattgggcatgttgttcagctcctttatagagcctcctgtttcaaggtcaccaaacgtgatgaagactcttctttgatgcagctgaaagaagaatttagaacctatgaagctctgcggcgagaacatgactcccagatagtgcagattgctatggaagcaggcttacgaattgcaccggaccagtggtcctctttgctttatggagaccagtctcacaaatctcatatgcagtccattattgacaagttgcagactccagcctcttttgcacagagtgttcaggaactaacaattgctctccagcgaactggagacccagcaaacttgaaccgactaagaccccatttggagctgttagcaaacattgaccctagtccagatgctcctcctcctacttgggaacagctggaaaatgggctggttgctgtgcgtacagtggtacatgggctggttgattatatccagaaccacagcaaaaaaggagcagatcagcagcagcctccacagcatagcaaatacaaaacatacatgtgtcgagatatgaagcagagaggaggatgccctcgtggggccagctgtacatttgcacactcacaggaggaactggaaaaatttcgtaaaatgaataagcgcctggttccgagaagacccttgagtgcctctttgggtcaacttaatgaggtgggcctgccttcagcagctatccttccagatgaaggtgcagtggatctccctagcagaaaacctcctgctctgccaaatggaattgtatcaacagggaatacagtaacacagcttattccgcgagggacagaccccagctatgattctagtctgaaaccaggaaaaatagatcatctgagcagtagtgctcctggatcccctcctgacctgctagaatctgttcctaagagtatttctgccttacctgtgaatccacattctatacctccaagggggccagcagatctgcctccaatgcctgttaccaaaccacttcagatggtacctcgaggttctcagttatatccagcacaacagacggatgtttattatcaggatcctcgaggagcagctccgccatttgaaccagcaccttatcagcagggtatgtattatactccaccaccacaatgtgtgtcccgctttgtccgacctccaccatctgctcctgaacctgctcctccctacttggatcattatccaccctacctccaagaacgtgttgtaaactctcagtatggcacacagccacagcagtacccacctatatacccatctcactatgatggccgtcgagtgtaccctgctccgtcttacacaagagaagagatattccgagaaagccctatacccattgagattccacctgcagcagtaccatcgtatgtaccagaatccagagaaagataccaacagatcgagagttactatccagtggctcctcatccaactcagatcagaccttcgtacctcagagaacctccttatagccggcttcctcctcctccccagcctcatcctagtctagatgaactacatcgccgacgaaaggaaataatggcccagctagaggaaagaaaggttatctctccacctccttttgcaccttcaccaaccttgcctcctacctttcatccggaagaatttttggatgaagacttgaaggtagctgggaaatacaaaggaaatgattatagccaatactctccctggtcatgtgacaccatcggctcctacattggaaccaaagatgcaaaacccaaagatgttgtggcagcagggagtgtggaaatgatgaatgtggagagtaaaggaatgagggaccagcgattagatcttcagagaagagcagcagaaaccagtgatgatgacctcatcccatttggagaccgaccaacagtgtctcggtttggtgccatctcacgaacttccaaaactatatatcagggtgctggtccaatgcaggctatggcacctcagggagctcctacaaaatctattaacatttcagattatagtccatatggaacccacggtggctggggagcttctccatattcacctcatcaaaacataccttctcagggacacttcagtgagagggagagaatatctatgtcagaagtggccagtcatggaaaaccccttccatctgctgagagagaacagctacgactagaattgcagcaattgaaccatcagattagccagcagacccagctacgtggactagaggctgttagtaacaggctggtgttgcagagggaggcaaacaccctggcaggccagtcacagcccccaccaccgccacctccaaaatggcctgggatgatctcaagtgagcagttgagcttggaactgcaccaggtggaaagggaaatcgggaagagaacacgggaactgagtatggaaaaccagtgttctctggacatgaaaagcaaactgaatacaagtaaacaagcagaaaatggacaaccagaaccacaaaacaaggttccggctgaggaccttacattgacattcagtgatgtaccaaatggatcagccttgacacaagagaatatcagcctcctatcaaacaagaccagctctctgaacctgtcagaggaccctgagggaggaggggataataatgactcccagagatcaggagttactcccagttctgctccttaaaatatgaggagtcctacttttatcttctgctcctaatcagtttgtcgggcataggggtaggagaacgcataacttctaaactttttctcttaagagcggtcagagaaatccaggaaattcaccagaggcaatgtgcacaaacaccactactaaaaacaaaccctgcacatagttcacattaatgcatttttttaatttaaagaaaaagaaaattagcagtatctgcaagcaattcagattaaatttgtttttgttctgtgaatgaactttattttaataactttggacgccttggatccagggctttaaaaaaaaaagatattatatatacactctgtttgattaattgtatgatcttaatgaagtaggttttcttgtattttggtattacatacccagtgtataatttgtataattcctcacccccaatccttatcaattctcaccaccccataaacttaaaacagaccaaaaatgtcagctttcagagaattctgtggtgcttgagaaacagacagtactagactgagttattagaaaatgtgcagcaaaccaacttttcccagagctgttatttggaattctttatccctttctagatcactagcttcattggatacgtatatttttcttgacattgaagctttttgtttgtttgggagggttttatttcttgtttttattttcaacttttcaaatagaattaccaattttgaagtcctcattttcatattaaggatcatttgcattctcttaatataatcagaaagctgattcagtgtttaattagatttaaatgttgatcaagaattaactgtaacttactagcactgaaaatacatgtttggtgtttcgcctgcgttcagctcatggttggaaatttgaagcagtgcttttcaaattaaacttttgctgacatcataggatgctaaaaaacaaggacaatcaactatgttttaaaactgcaacatttgatttgaacttaaaatgaatagagccacattattttaatggatgttttgttttacttgtgaactgattgagtcttaaggatagtttatgaattgatcacttgttgctcagaatcattagtataagtaggtaggaaatagtttgaagtcatttttcatagacttaactgtccaatgttgcaaatgtttcttcatgaaaatattgaaaagagtaaggttttttttttttttaattctgctgcacatattctgatgccatgtgtctgtgcttaattaactaagaccctataaaacgtgtttagtggggactgtttgatatagttgccctctccattcctctatttgcctgatttttttcagtttccctttctgtattttactactaaattagaaagcactggttatgtaataagttactacattgctttggttgagtaaaaacaagagtttatatttttcttgtttcttattttcttaacccttaactcctgctgaggtcataacaacctcagtctaagctctgtgtccatcatactgttaacttaaacaaatgggtggtgggggtgggaagggtaatacagtcctgccattgcctaccagtaggagagtccaaacagaacactcttttgagtagcaattatttaatttgcccagtcaaggcaccgtgtttatatactatttcacattgaatttgattatgccctacagacctggctggtcaaggatttgatatacacatattggcttgggattcgagctttcttttttatttaaataaaaatttatatatatattatatatatacatatatacatagctatatctgtatatatattgggtatgttttaaggattttttcgcatgagcgcagctgttgcgataaattgaccgattgggaggtggtagaagcactgaatgaaggtgaggctttttttttttccagttttcttatacatttgtcttctttttttaaaaaaaaaaaaaaaaatatatatatatatatatatatatatatatatgtatgctttttcttttttttttggcttttgtttgctttttgacttttacttaaaacccttttacatttccactttaaatgcctattgtttattgggagaaggaaagaaacttttgtatgtctgacagagtcccaagatttttcatttctctgcataacagtaaaaggcaacattattggcctccaaccttctttttttttttttttttttttttttggagagggagtctgcttctgttgcccaggctggagtgcagtgggttgatctcggctcgctacaacctccacctcccgggttcaagcgattctcctgcctcagcctcctgagtagctgggactacaggcacgcgccaccacgtccagctaatttttgtactacaaccttcttataagcagatttggactgatcttctcctttgggtatgtcagatcatcctaaattttagaagcagttgattcactttggaattcagaatgattcttgtattagaagataatttgtgggtattaatttttgtttaagtttaaaataaaagtaaagattcattttggatatcagttgaaaccccttagtaactcagtttctgttattcttgttctcatttcctttaaatacacttgttcttggcttttgccattttgattctgtgaagtaggcaggagcagggattaatttatacagtattcctgttctgaacaaaaccagaaaagtcactgtataaacttgacttaaaatagtatctttctcttttcatgtattttcatttgggggaaaaaaaatctctttaattgtaacctgaattcaagctgtacccctccatggtcctacactctagagctaatctggttgggcagaaaggcagaaggatggtatattgtcccattgtgcctataatgtattttaaattggtcattccaccttacctaatggaaattcttgcagctttcctagtgctcatcagcggttttaggaattcactaacacccccaaaatttgttttttgttttttgctttttttccttttccttttctctgtgatatcatgagcctgtaaggacaaatggcatatttgggcataactgcttgactctgtaactacttttttaaaatcaaaattgaaaaggtattaattgcttctggctttttaatttttttttttagagacaaagatgaaaccagataggaaatacagtttttatgttttctacttactaaaatattagtttcttctaaatattactttatttgtatttcactaaattccaaagcaaaaatcagatatctgagatgaacaattttgaatgggttaaggtaggagtaataagcattgtgttcactcatacataggtgagggaattttatttatagcgagaaatataaaagtattttgacttactcttttttcaaggagtcgctaggaaagggtagaagaactgagaataagacatctagattccatttctggtttatatgtagctcttttgcctaatttatatataattttgtcataagataagtccagtaactgtcctgtcttagataacgtacagaggctgaagtgaccaaagatccattccttattacttttctaattaaaagaagagttagctagatttctagtagtagtattctagatattgataagacattattcctaatgccaactacaaatattcaactactcagaatgtatttaaaaaattgtttggtacagcattaatgttggtgattcctttctcccatcttatttcccttcccttctattctttcccatgtatttcttttgcctaaaagaatattggtatgattctcatttgctactttgagtatataactccatcagactttccagagttcttcagggatggagctcaaagtttacatttttccatatatgtctttttttttcttgacctttttccaccctgtaatttccccttgacttacccactgccctccccaatctgcaacagtgacagtttgctgcctcaaaacagagcattcaaatgaattcgcttagccaataacttctgtgaagttgccttttctaatggtgttattactcagtgatgcacaaatgtggtatttgccctactggtaggcaaacaaaggtctggttaagaatggtaacctgctgttttctttaaaggagagccaaagacttgtgctttactctgttttggttttgggggaagtagtagccattttgatcatgaaaccttttagtatttgtgagttgattgtactgtgtaagtagatttatctaaagttaactgttaaagttagctagccttataaaatgtaaaagtaatgaaaattcatcagtttctctaagccagtgaatgtcgtcttttgtaatattgtgtataagcatttgtgcccaccccagcttctgctatcactgtggtcaagtcatgggtctgagtaaaagaattcttgagtatgtgactggtgagaaataactaactatagtcagtacatgtacagattgttaaaattcaagacaaaatactttcactaaaaaaaaggattcgtctcagtaaagaagtattcagttgctgtcacttacatacaaatggtggtgggtagcagtctcaccatttttctactctctttttgctcgttttaaataattgagtaaaggttttatttgtaaaatctatctgtaaaaagcacctgtaacgatttatatgtcattgaaaggaatggcccagttactttttaggagagattaataacctacctggaaattaactgcagtgtttacttagattttttccccctaataagagtctaagtgtgttaaatttttaactgatgatatggttacagtgttgcaaggtgatctcttcccctgaaaaatctgcctatccttttaagaaaaattagacctactaaactaaagcaaattttactttcatcattagcacctaaacaagcaagcagtctactactgtcatcattttacctgagtgcccattttgctgatccacattcatacctttctaccttggacagctatgatttttatatttatttgttgcttcagctcaggtttatgaaattttcctgctgaaatgacttattgggagttgtaggttgattatagttactattaaacattttctcaatttagcttttctgagccacttcaagaagaaagctgtttttgtcaaaaggtactattaattgtagcaagtaaatcttaagatttgaatttttaagattttatttctgtgttcactaaagatctttccacaagtaatagattataattgataagtaatactagctatagtgttaataaagagtaagactatcaccaccaggaataagtaacaccttttaataataaatctattcctaataggtatgttttcaatactgcactgaacaaagtgggtaaagagccctttgaaatcttattgtaataaagggacttacctcaccactggaatccttgttttcagagcctctggattttcagccaaacactgaatttctcctaaactttatccctgaaacatccctagagaacgaactttattttcacaagaaaataaggcacaataagggggaagaacttaaacctcaacataatatcgtgtccaaaaatgtgtatttagaaaaataaaatcctgtggagtttgttatcctaatgtttattttatactagataaggtgacttgttttcttgtattgaggtcttactgtttcagatttgtttttgtttctgttctaactctaagcagacagagctcacaagtctttggcatccattttaggttgtacactcagagtcatcttataactggaaactgtcaggtggtcccccaccccagtgagtgtatgaaagagtcaagaaaaagattggaaacaaactattgggtgaataattggttgctctattattattattattattatttgcctttttttaatcaccatttatttgtgtaatctttctccattgattggctgtcattcttataatatctgaactaccccataaaataattctctgacttaaaggcatttagcttttgcttatcgtttttacatcctctattcaactaagacactgtcttgagagttattttttccagatggatcgttggcctaaattttcacacttctcccctgttcatcctttttcctcttccctgcttcctgggaataaaaggaacttttttaaaaaaattaattagtccacaggtctcattatctttctttatgattaatctatgactttttggtacaagaacaatggaaaaagtgaattaaggtaatgaacaaaacctttcacccacttaaacattttccagttttgagattcctcttcgtgtttgtggtgtcttccccttgttaccccttctgccctttttctctgactatggtaatttggtctttaggctcatatcagtctccccgagacattctgcagtcattatcacctttttgggtggattttattttgttttattttgttttttttaaaaaaataactttttaacattggtgcatatttgcttgggatagagcttgtgtaatttaccaatcgtattgattgtaagtgattgtgccctgcagaggtatatttaacaagacaaaaataatcttggttaataaaggagcccatgagatttgagtcaggttgtaagtgaaatcacttacacttttggatagaatttatactcctgctcttataaatcagtggtagacttaccattttttaaagttttcttgcatttttttgtttttttattgccacagctccctattctttcttgcctgcctccacccccctgttcaggaaaaaaaaaaattgagccttaaagtgacagctgattttttaattgctgaattttgtgaaattttactttttccaagtgtttccaactttaaaaagagaagtgaagacaaataggttggaatggtgaagacaaatggattggaatttcacaggctgtgaataattccttaggatctggcaaaccgtgaagtcttatttgaagaccttatctcctgagagttcttttggagtaggaaaaagaaccctatttgaaatagaccgtttttctcttgtttttaatctgtttaatatttctgatttttaagcagctttcaaaacaagtgtggtggaaaaaaagaaatagtagtaggaagatgtttagggcagcagaactctgggtctaaataagtacatgttcccacttgttgccgatttttgagagtactagggccatctttctcaattttgtattatttgtgtgcatgtttatatcaaagatgcccattttgttaaaatgctatttcctttattaccttggaaactgactcagcctcatgttgctcctaattagtgtttaaggctcccatgagttgcagataaaatgatttattttaacaagtagaaggaggtgattcaccttttggattgtaaatatatgaaaatgtctacaaggtctttatctgctttctgtcagcatttatattaaatgataaattaatgaggaa

SEQ ID NO: 26755 - DNA, 4013 bp, Homo sapiens
  source 1..4013: mol_type = unassigned DNA
ttaccaaagatacatccccaggcggcaccattcacttcacatgaaagccgctgctcttggttcctgagatgatctcatctgaacatggctccagcgacctcagccacaggaactagagacagcttgctttctgtcgtggcaatgttttgaaactggcaaaatcagattttatcatgtgggcaacctgctgcaactggttctgcctggatggacagcctgaggaggtcccaccaccccagggagccaggatgcaggcctattccaaccctgggtacagctccttcccttccccaacaggcttggaaccaagctgcaagtcctgtggggctcactttgcaaacacggccaggaagcagacctgcttggactgtaagaaaaatttttgcatgacctgttcgagccaagtagggaatgggccccgcctctgccttctctgccaacggtttcgagctacagcctttcagcgagaggagctcatgaagatgaaggtgaaggacttgagggactatctcagcctccatgacatctctaccgaaatgtgccgggagaaagaagagctggtgctcttggtccttggccagcagcctgtaatctcccaggaggacaggactcgtgcctccaccttgtccccagactttcctgagcagcaggccttcctgacccagcctcactccagcatggttccacctacctcacccaacctcccctcttcatctgcacaagccacctctgttcccccagcccaggttcaggagaatcagcagtctattgactcagaggacagctttgtcccaggccgaagggcctctctgtctgacctgactgacctggaggacattgaaggcctgacagtgcggcagctgaaagagatcttggctcgcaactttgtcaactacaagggctgctgtgagaagtgggagctgatggagagagtgacccggctatacaaggatcagaaaggactccagcacctggggggagcagtaccatcaggcttggaggagaacctgtgtaagatctgcatggactcacccattgactgtgttcttctggagtgtggccacatggtaacctgtaccaagtgtggcaagcgcatgaatgaatgtcccatctgccggcagtatgtaatccgagctgtgcatgtcttccggtcctgagagcttgcatcggtttcttcagtgccttacagggaaatagcctggggtgtctgggctcagggttggccagcttgcagaggagcaagctagtagaaatattgcagggttcccaaaaccaggtcaagcaagatgccatgtcacccctgagcatgcctgtcttcccaggggtgtacctcttggctggcaaagcccaaggccagtgggaacttgtataaatcacatgggtatgttcttggttcagtgatcttggagtgatgatggtaactgatgaacagagaactttccagaacttgggtcctgtcttcctccctgaacctagacagtttcacccctcctcctgtacccaacccatccccaccccatatgggagatgcttgcccatgtgtttcatcaatcagaagtcctcctccccagcacattcggatttaaatttctggtctctccggctttctgtgctttaactatctttgctaaagtctcttgctacattgcctaaatccatttgtttctttggaccaaaaatgttagtttaccagaccgatagtggtccttaggacagattttagaccagtaaacttatctttggtgagaaatgaaatacaaatgctatagaaaaatttcaaagttgttaaaagccacttcattaaatgctgggattggaagctgttggtctcctgacctgactctgggagccaacaaaacatcaggctcccaaactgctgggaaatttgtttctgtctgcaagggatagtgcgtgcataatccctgctgctgcttctcttgggacctgatttgcaccatccttagtttatgcggaaaggggaagcaatgggtggaggcagtggccttctccttaattttggcttggcttctgatccttttcccaactagaagtcttaagccacttttcgctgaaaatgaaatccctcccttatccatggtagttttaaatttggtttcattgaagaaatagatttaggcaaagagcctgtgctcttctctggccagactgctgttgaagttcctggagagcaaatgttaagacagagcacttaagagctttcaggaggtactgaatgagactggattctgttgtaagccgacagttcaagtctttatttcccaggttggtggggagtgaggagaccctactttcattccctttcctagcccactgatttttgggggcaggtcagggagaaagcattttttttttttttttgagtctcactctgttgcccaggctggagtgcagtggtacagtcttggcttactgcaacctccacctcccaggttcaagctattctcctgccttagcctccagagtagctgggattataggcgcccaccaccacaccaggctaatttttgtatttttagtagagacggggttttaccatgttcaccaggctggtcttgaactcttgaccttatgatccgcccgcctcagcttcccaaagtgctgggattacaggcgtgagccaccacacccagcaggagaaaccattttctaggctctttaggaaggaccatgcaatgagtaggtgatgtatttgagccctcacagtctttacacccctagaggagctggaggacttaagagtttgctgcagaagcgtggccaagcacaaaacacatgatcaggaaagcagagtgttttcccattaccaatggatgaactatgcaaaccctaaacgccttggcagacacctcccaccccttacccctcccatgcagctgaaaaatctgagactagaaccaatcatgactctggatggcagagggaaacctctaaagggacttattacattggtacagacatatttatgctttcttccatcaccaaccactaaacccctttggaggaatgaaataactgcataaactagtcaactgaacactgggccacttacctcaatgttatacaaagtcctggatgatttgattctgaaccacagcctttgcaggagttgggggaatcagatttgctcatgaagacatccctttccacttttgtcatgggcagtaaatactatagtttacaatgcctaccaattagcaaaggatcattcattcagctactcagttcctctgtaaaacaggtctatgtatgtgcaattcagctaagatctagcagtaacttaagggcagaagctggctctctacttacaacctgctttctctgctgaagccttacctcctcttcagtttccctcctagacacaaatcgaaaataatatactgatagctggttagtaacctcagtaagaattaaaactgaggttgtttactcattttgcctttaaatcttttatccccttttggtgaaggtttccctttaggaaaaaaggtgtcaaacaaccctgattttttttttttttgcatcatttttattacaccaaattaaagttgggagttccaagatcccattccagttaatatttaaccaaggtctaaaatttgattttttttaaatctttgaatcctcccttctgcccctcatggatccttggttttaatgatatggaaacatctaattcttagaattattccgtagcttttgctgattactctgagatttcagttaagacttgtttcaaaagacagatagctgactggttcataatacattggaatagttggatccaaactaataagaataagctgtacaggaactagtgctcaatatacattgtataaatttgtggaaatctcttggatgtgaattgttacttcaagtggcttttattaagattttctcagacttacttggaggttaaagcaaacccaaatgtgtattattttgttacagagctctgctttataattttgtaataaagtttcaatacagacacc

SEQ ID NO: 26756 - DNA, 7269 bp, Homo sapiens
  source 1..7269: mol_type = unassigned DNA
gggtgggagggggggccgacttcctggggccgcccgtgaggatgtcgcgaccgcccccgggtgcccctcagccccagagacgccgccgcggcggagtccgcagcctccctgcctgaggcgtccgcggccgggatccggcccctcccctcgcctcctctcctaggtgccggccgggagggcggccgcagcagattttatcatgtgggcaacctgctgcaactggttctgcctggatggacagcctgaggaggtcccaccaccccagggagccaggatgcaggcctattccaaccctgggtacagctccttcccttccccaacaggcttggaaccaagctgcaagtcctgtggggctcactttgcaaacacggccaggaagcagacctgcttggactgtaagaaaaatttttgcatgacctgttcgagccaagtagggaatgggccccgcctctgccttctctgccaacggtttcgagctacagcctttcagcgagaggagctcatgaagatgaaggtgaaggacttgagggactatctcagcctccatgacatctctaccgaaatgtgccgggagaaagaagagctggtgctcttggtccttggccagcagcctgtaatctcccaggaggacaggactcgtgcctccaccttgtccccagactttcctgagcagcaggccttcctgacccagcctcactccagcatggttccacctacctcacccaacctcccctcttcatctgcacaagccacctctgttcccccagcccaggttcaggagaatcagcaggccaatggccatgtgtctcaggatcaagaggaacccgtctacctggagagcgtggccagagtacctgctgaggatgagacccagtctattgactcagaggacagctttgtcccaggccgaagggcctctctgtctgacctgactgacctggaggacattgaaggcctgacagtgcggcagctgaaagagatcttggctcgcaactttgtcaactacaagggctgctgtgagaagtgggagctgatggagagagtgacccggctatacaaggatcagaaaggactccagcacctggtcagtggtgccgaagaccaaaacgggggagcagtaccatcaggcttggaggagaacctgtgtaagatctgcatggactcacccattgactgtgttcttctggagtgtggccacatggtaacctgtaccaagtgtggcaagcgcatgaatgaatgtcccatctgccggcagtatgtaatccgagctgtgcatgtcttccggtcctgagagcttgcatcggtttcttcagtgccttacagggaaatagcctggggtgtctgggctcagggttggccagcttgcagaggagcaagctagtagaaatattgcagggttcccaaaaccaggtcaagcaagatgccatgtcacccctgagcatgcctgtcttcccaggggtgtacctcttggctggcaaagcccaaggccagtgggaacttgtataaatcacatgggtatgttcttggttcagtgatcttggagtgatgatggtaactgatgaacagagaactttccagaacttgggtcctgtcttcctccctgaacctagacagtttcacccctcctcctgtacccaacccatccccaccccatatgggagatgcttgcccatgtgtttcatcaatcagaagtcctcctccccagcacattcggatttaaatttctggtctctccggctttctgtgctttaactatctttgctaaagtctcttgctacattgcctaaatccatttgtttctttggaccaaaaatgttagtttaccagaccgatagtggtccttaggacagattttagaccagtaaacttatctttggtgagaaatgaaatacaaatgctatagaaaaatttcaaagttgttaaaagccacttcattaaatgctgggattggaagctgttggtctcctgacctgactctgggagccaacaaaacatcaggctcccaaactgctgggaaatttgtttctgtctgcaagggatagtgcgtgcataatccctgctgctgcttctcttgggacctgatttgcaccatccttagtttatgcggaaaggggaagcaatgggtggaggcagtggccttctccttaattttggcttggcttctgatccttttcccaactagaagtcttaagccacttttcgctgaaaatgaaatccctcccttatccatggtagttttaaatttggtttcattgaagaaatagatttaggcaaagagcctgtgctcttctctggccagactgctgttgaagttcctggagagcaaatgttaagacagagcacttaagagctttcaggaggtactgaatgagactggattctgttgtaagccgacagttcaagtctttatttcccaggttggtggggagtgaggagaccctactttcattccctttcctagcccactgatttttgggggcaggtcagggagaaagcattttttttttttttttgagtctcactctgttgcccaggctggagtgcagtggtacagtcttggcttactgcaacctccacctcccaggttcaagctattctcctgccttagcctccagagtagctgggattataggcgcccaccaccacaccaggctaatttttgtatttttagtagagacggggttttaccatgttcaccaggctggtcttgaactcttgaccttatgatccgcccgcctcagcttcccaaagtgctgggattacaggcgtgagccaccacacccagcaggagaaaccattttctaggctctttaggaaggaccatgcaatgagtaggtgatgtatttgagccctcacagtctttacacccctagaggagctggaggacttaagagtttgctgcagaagcgtggccaagcacaaaacacatgatcaggaaagcagagtgttttcccattaccaatggatgaactatgcaaaccctaaacgccttggcagacacctcccaccccttacccctcccatgcagctgaaaaatctgagactagaaccaatcatgactctggatggcagagggaaacctctaaagggacttattacattggtacagacatatttatgctttcttccatcaccaaccactaaacccctttggaggaatgaaataactgcataaactagtcaactgaacactgggccacttacctcaatgttatacaaagtcctggatgatttgattctgaaccacagcctttgcaggagttgggggaatcagatttgctcatgaagacatccctttccacttttgtcatgggcagtaaatactatagtttacaatgcctaccaattagcaaaggatcattcattcagctactcagttcctctgtaaaacaggtctatgtatgtgcaattcagctaagatctagcagtaacttaagggcagaagctggctctctacttacaacctgctttctctgctgaagccttacctcctcttcagtttccctcctagacacaaatcgaaaataatatactgatagctggttagtaacctcagtaagaattaaaactgaggttgtttactcattttgcctttaaatcttttatccccttttggtgaaggtttccctttaggaaaaaaggtgtcaaacaaccctgattttttttttttttgcatcatttttattacaccaaattaaagttgggagttccaagatcccattccagttaatatttaaccaaggtctaaaatttgattttttttaaatctttgaatcctcccttctgcccctcatggatccttggttttaatgatatggaaacatctaattcttagaattattccgtagcttttgctgattactctgagatttcagttaagacttgtttcaaaagacagatagctgactggttcataatacattggaatagttggatccaaactaataagaataagctgtacaggaactagtgctcaatatacattgtataaatttgtggaaatctcttggatgtgaattgttacttcaagtggcttttattaagattttctcagacttacttggaggttaaagcaaacccaaatgtgtattattttgttacagagctctgctttataattttgtaataaagtttcaatacagacacctgtcctgtctggtgcgaggatgttagaggttgataggactgacaaaagagcctgacagtggttcatgctataatttccacactttaggaggccaaggtgggaagactgcttgagctcaggagtttgagaccaacctgggcaatgtagtgagaccttgtctctacttaaaaaaacaaacaagggccgggtgcggtggctcacgcctgtaatcccagcactttgggaggctgaggcgggcagatcacgaggtcaggagatcgagaccaccctggctaacacggtgaaaccccgtctctactaaaaatacaaaaaattagccaggcgtggtggcgggtgcctgtagtcccagctactcgggaggctgaggcaggagaatggtgtgaacccgggaggcggagcttgcagtgagccaagattgcgccactgcagtccggcctgggcgaaagagcgagactctgtctcaaaaaacaaaacaaaaaaaaacacaaacaaaaaacccaaaaaaaccaaaaaattagccgtgcatggtggtgcatgtgggtagtcccaactacttggaaggctgaggtgggaggatcacttgagccaggagattgaagctgcagtgagctctgatcgccaccgcactccagccagggtgacagagtgagaccctgtattaaaaaaaaaaaaaaattgacaactgataaaccacaagctaatcctgggatgtgcacatggcctgggattagcctgtggttgggccaagtgaccttggtcaagatgctcagtgttgttgtaactaactaacttgctcaagaccacaaatgtaatatatggaagaggccatggaacaacctagaagagaatgagagctgggtaggtaaaggatgaatcccaagaccaattgggttgaagcaccaagtgagttcagatatttacactgatctagaagagatgggccttaaagaactgaaatctgaggacagttagtatgcccagttaggtcttcaggttaccctgggagatacatggtaccttttggatacagctgtagtacagctggactatggctcagaaaaggttggcccaggctgggcgccatggctcacgcctgtaatcccagcactttgggaggctgaggtgcgtggatgactcgaggccaggagtttgagaccagtctggacaacatggcgaaacgtggtctctactaaaaatacaaaaacttagctgcgagtgatggtgtgtgcctgtttgttaagtcttagccacttgggaggctgaggcatgagaattgcttgtgaacccgggaagcagaggttgcagtgagctgagattgcaccactgcactccagcctgaatgacagagcaagagtctgtttaaaaaaaaaaaaaaggttggcccagcctcgtgacagactgctgtgtgtgcgcaggcttgtacaaacctccctgaccaggcgcccaaggagcagggaaaagactactgagaatgcagcccctgggagaacaagattatgtgtccatctgctgtgactgagaagagaaaggaatcttgccaaaagggcataaaggatcgaggatgagccacaacactttgctcacattgccctagggagctgacctgttcagcacccagtgatgacctctgcttgatgccagccagcagcatgtagaggttcagaagagggaggcctccagcattctgctggagagatttatgatgatgatgttgagggctgcattgaaatacatgaaagaaatacatgaaaggatacaaaatagtatatacagtcagatctcagcagcaaagactggaagaaaatacataaaaaaccactgacattgaaatggcaataacacacactaaggcagagaagggacaagatgatcacctgcagccagcagaggccctttcctgtgagtgtgcactctgggtgtaagcaaccaataagggcaagtggggctgggtccaggttggagaggacagtgcctttggcaggatcctgaggagacagccttgttctgctgccctgtccggttgtttgtttggcctgaggctgaagagagaaatggaaatctatgtaggtcagtactcaaaggaggagcagctttttgtctccatagaggatggaataaaaagtatcttattcctaatactgaagcaaggctgaatggtgcctattcaaaaacaccaaatgtcctgggctagagtcaggaaagtaaacccctcccccgtgctgtccctactcccccaacatacacattttaaacagtaggtggaagccaaagtcaatcagatcaaagttgggggggggcggtggggtggccagggggcgcagtggtccttgatcttataggtccagagcctgttaatttgttcataaggtgagaactgaccctcaagagctggaaggattgggacatggcagccagtttacaaccatatggtgtcctgatgagcctgcactcagagtggagtgttggctggaacatgcacacctgcaactgagggttctaaagtcataggttaggcccttctcccgggtagggtctggacatgcacaccaggagtgacgttcccaactctagataactatgtgctaggctctgggctaagtgctttacataatgttgctcaggacaacaggacaaccctatgatttaggtgcacccattctacttggagggattgaggcttagatgttaacgtaacttgcctaaggttagagccattaagtttcaggagtctgatctgaactccgtctacacctgcactgtccagtgtggtagtcactagtgacatgtgaccatttgaagttgaattaaaataagaacttcagttccttagttgtgccagcttcatttcaattgctcagcagctgtctgtggctagtttggttggatactgcagatttatggatatttccactgctgcaaaaagttctattgaatagcacttgtctacactaaattgtctctcttccttttgttcttcaaataaatcagcctcaggtagcacaggagctgttctttgtaagcaggttgtatggatctgttctcaggtgtggatttttatttttttccctgcagatatggagtatattttctttaagaaattaaaaactaagaagaaaatgcca

SEQ ID NO: 26757 - DNA, 4097 bp, Homo sapiens
  source 1..4097: mol_type = unassigned DNA
ttaccaaagatacatccccaggcggcaccattcacttcacatgaaagccgctgctcttggttcctgagatgatctcatctgaacatggctccagcgacctcagccacaggaactagagacagcttgctttctgtcgtggcaatgttttgaaactggcaaaatcagattttatcatgtgggcaacctgctgcaactggttctgcctggatggacagcctgaggaggtcccaccaccccagggagccaggatgcaggcctattccaaccctgggtacagctccttcccttccccaacaggcttggaaccaagctgcaagtcctgtggggctcactttgcaaacacggccaggaagcagacctgcttggactgtaagaaaaatttttgcatgacctgttcgagccaagtagggaatgggccccgcctctgccttctctgccaacggtttcgagctacagcctttcagcgagaggagctcatgaagatgaaggtgaaggacttgagggactatctcagcctccatgacatctctaccgaaatgtgccgggagaaagaagagctggtgctcttggtccttggccagcagcctgtaatctcccaggaggacaggactcgtgcctccaccttgtccccagactttcctgagcagcaggccttcctgacccagcctcactccagcatggttccacctacctcacccaacctcccctcttcatctgcacaagccacctctgttcccccagcccaggttcaggagaatcagcaggccaatggccatgtgtctcaggatcaagaggaacccgtctacctggagagcgtggccagagtacctgctgaggatgagacccagtctattgactcagaggacagctttgtcccaggccgaagggcctctctgtctgacctgactgacctggaggacattgaaggcctgacagtgcggcagctgaaagagatcttggctcgcaactttgtcaactacaagggctgctgtgagaagtgggagctgatggagagagtgacccggctatacaaggatcagaaaggactccagcacctggggggagcagtaccatcaggcttggaggagaacctgtgtaagatctgcatggactcacccattgactgtgttcttctggagtgtggccacatggtaacctgtaccaagtgtggcaagcgcatgaatgaatgtcccatctgccggcagtatgtaatccgagctgtgcatgtcttccggtcctgagagcttgcatcggtttcttcagtgccttacagggaaatagcctggggtgtctgggctcagggttggccagcttgcagaggagcaagctagtagaaatattgcagggttcccaaaaccaggtcaagcaagatgccatgtcacccctgagcatgcctgtcttcccaggggtgtacctcttggctggcaaagcccaaggccagtgggaacttgtataaatcacatgggtatgttcttggttcagtgatcttggagtgatgatggtaactgatgaacagagaactttccagaacttgggtcctgtcttcctccctgaacctagacagtttcacccctcctcctgtacccaacccatccccaccccatatgggagatgcttgcccatgtgtttcatcaatcagaagtcctcctccccagcacattcggatttaaatttctggtctctccggctttctgtgctttaactatctttgctaaagtctcttgctacattgcctaaatccatttgtttctttggaccaaaaatgttagtttaccagaccgatagtggtccttaggacagattttagaccagtaaacttatctttggtgagaaatgaaatacaaatgctatagaaaaatttcaaagttgttaaaagccacttcattaaatgctgggattggaagctgttggtctcctgacctgactctgggagccaacaaaacatcaggctcccaaactgctgggaaatttgtttctgtctgcaagggatagtgcgtgcataatccctgctgctgcttctcttgggacctgatttgcaccatccttagtttatgcggaaaggggaagcaatgggtggaggcagtggccttctccttaattttggcttggcttctgatccttttcccaactagaagtcttaagccacttttcgctgaaaatgaaatccctcccttatccatggtagttttaaatttggtttcattgaagaaatagatttaggcaaagagcctgtgctcttctctggccagactgctgttgaagttcctggagagcaaatgttaagacagagcacttaagagctttcaggaggtactgaatgagactggattctgttgtaagccgacagttcaagtctttatttcccaggttggtggggagtgaggagaccctactttcattccctttcctagcccactgatttttgggggcaggtcagggagaaagcattttttttttttttttgagtctcactctgttgcccaggctggagtgcagtggtacagtcttggcttactgcaacctccacctcccaggttcaagctattctcctgccttagcctccagagtagctgggattataggcgcccaccaccacaccaggctaatttttgtatttttagtagagacggggttttaccatgttcaccaggctggtcttgaactcttgaccttatgatccgcccgcctcagcttcccaaagtgctgggattacaggcgtgagccaccacacccagcaggagaaaccattttctaggctctttaggaaggaccatgcaatgagtaggtgatgtatttgagccctcacagtctttacacccctagaggagctggaggacttaagagtttgctgcagaagcgtggccaagcacaaaacacatgatcaggaaagcagagtgttttcccattaccaatggatgaactatgcaaaccctaaacgccttggcagacacctcccaccccttacccctcccatgcagctgaaaaatctgagactagaaccaatcatgactctggatggcagagggaaacctctaaagggacttattacattggtacagacatatttatgctttcttccatcaccaaccactaaacccctttggaggaatgaaataactgcataaactagtcaactgaacactgggccacttacctcaatgttatacaaagtcctggatgatttgattctgaaccacagcctttgcaggagttgggggaatcagatttgctcatgaagacatccctttccacttttgtcatgggcagtaaatactatagtttacaatgcctaccaattagcaaaggatcattcattcagctactcagttcctctgtaaaacaggtctatgtatgtgcaattcagctaagatctagcagtaacttaagggcagaagctggctctctacttacaacctgctttctctgctgaagccttacctcctcttcagtttccctcctagacacaaatcgaaaataatatactgatagctggttagtaacctcagtaagaattaaaactgaggttgtttactcattttgcctttaaatcttttatccccttttggtgaaggtttccctttaggaaaaaaggtgtcaaacaaccctgattttttttttttttgcatcatttttattacaccaaattaaagttgggagttccaagatcccattccagttaatatttaaccaaggtctaaaatttgattttttttaaatctttgaatcctcccttctgcccctcatggatccttggttttaatgatatggaaacatctaattcttagaattattccgtagcttttgctgattactctgagatttcagttaagacttgtttcaaaagacagatagctgactggttcataatacattggaatagttggatccaaactaataagaataagctgtacaggaactagtgctcaatatacattgtataaatttgtggaaatctcttggatgtgaattgttacttcaagtggcttttattaagattttctcagacttacttggaggttaaagcaaacccaaatgtgtattattttgttacagagctctgctttataattttgtaataaagtttcaatacagacacc

SEQ ID NO: 26758 - DNA, 4121 bp, Homo sapiens
  source 1..4121: mol_type = unassigned DNA
ttaccaaagatacatccccaggcggcaccattcacttcacatgaaagccgctgctcttggttcctgagatgatctcatctgaacatggctccagcgacctcagccacaggaactagagacagcttgctttctgtcgtggcaatgttttgaaactggcaaaatcagattttatcatgtgggcaacctgctgcaactggttctgcctggatggacagcctgaggaggtcccaccaccccagggagccaggatgcaggcctattccaaccctgggtacagctccttcccttccccaacaggcttggaaccaagctgcaagtcctgtggggctcactttgcaaacacggccaggaagcagacctgcttggactgtaagaaaaatttttgcatgacctgttcgagccaagtagggaatgggccccgcctctgccttctctgccaacggtttcgagctacagcctttcagcgagaggagctcatgaagatgaaggtgaaggacttgagggactatctcagcctccatgacatctctaccgaaatgtgccgggagaaagaagagctggtgctcttggtccttggccagcagcctgtaatctcccaggaggacaggactcgtgcctccaccttgtccccagactttcctgagcagcaggccttcctgacccagcctcactccagcatggttccacctacctcacccaacctcccctcttcatctgcacaagccacctctgttcccccagcccaggttcaggagaatcagcaggccaatggccatgtgtctcaggatcaagaggaacccgtctacctggagagcgtggccagagtacctgctgaggatgagacccagtctattgactcagaggacagctttgtcccaggccgaagggcctctctgtctgacctgactgacctggaggacattgaaggcctgacagtgcggcagctgaaagagatcttggctcgcaactttgtcaactacaagggctgctgtgagaagtgggagctgatggagagagtgacccggctatacaaggatcagaaaggactccagcacctggtcagtggtgccgaagaccaaaacgggggagcagtaccatcaggcttggaggagaacctgtgtaagatctgcatggactcacccattgactgtgttcttctggagtgtggccacatggtaacctgtaccaagtgtggcaagcgcatgaatgaatgtcccatctgccggcagtatgtaatccgagctgtgcatgtcttccggtcctgagagcttgcatcggtttcttcagtgccttacagggaaatagcctggggtgtctgggctcagggttggccagcttgcagaggagcaagctagtagaaatattgcagggttcccaaaaccaggtcaagcaagatgccatgtcacccctgagcatgcctgtcttcccaggggtgtacctcttggctggcaaagcccaaggccagtgggaacttgtataaatcacatgggtatgttcttggttcagtgatcttggagtgatgatggtaactgatgaacagagaactttccagaacttgggtcctgtcttcctccctgaacctagacagtttcacccctcctcctgtacccaacccatccccaccccatatgggagatgcttgcccatgtgtttcatcaatcagaagtcctcctccccagcacattcggatttaaatttctggtctctccggctttctgtgctttaactatctttgctaaagtctcttgctacattgcctaaatccatttgtttctttggaccaaaaatgttagtttaccagaccgatagtggtccttaggacagattttagaccagtaaacttatctttggtgagaaatgaaatacaaatgctatagaaaaatttcaaagttgttaaaagccacttcattaaatgctgggattggaagctgttggtctcctgacctgactctgggagccaacaaaacatcaggctcccaaactgctgggaaatttgtttctgtctgcaagggatagtgcgtgcataatccctgctgctgcttctcttgggacctgatttgcaccatccttagtttatgcggaaaggggaagcaatgggtggaggcagtggccttctccttaattttggcttggcttctgatccttttcccaactagaagtcttaagccacttttcgctgaaaatgaaatccctcccttatccatggtagttttaaatttggtttcattgaagaaatagatttaggcaaagagcctgtgctcttctctggccagactgctgttgaagttcctggagagcaaatgttaagacagagcacttaagagctttcaggaggtactgaatgagactggattctgttgtaagccgacagttcaagtctttatttcccaggttggtggggagtgaggagaccctactttcattccctttcctagcccactgatttttgggggcaggtcagggagaaagcattttttttttttttttgagtctcactctgttgcccaggctggagtgcagtggtacagtcttggcttactgcaacctccacctcccaggttcaagctattctcctgccttagcctccagagtagctgggattataggcgcccaccaccacaccaggctaatttttgtatttttagtagagacggggttttaccatgttcaccaggctggtcttgaactcttgaccttatgatccgcccgcctcagcttcccaaagtgctgggattacaggcgtgagccaccacacccagcaggagaaaccattttctaggctctttaggaaggaccatgcaatgagtaggtgatgtatttgagccctcacagtctttacacccctagaggagctggaggacttaagagtttgctgcagaagcgtggccaagcacaaaacacatgatcaggaaagcagagtgttttcccattaccaatggatgaactatgcaaaccctaaacgccttggcagacacctcccaccccttacccctcccatgcagctgaaaaatctgagactagaaccaatcatgactctggatggcagagggaaacctctaaagggacttattacattggtacagacatatttatgctttcttccatcaccaaccactaaacccctttggaggaatgaaataactgcataaactagtcaactgaacactgggccacttacctcaatgttatacaaagtcctggatgatttgattctgaaccacagcctttgcaggagttgggggaatcagatttgctcatgaagacatccctttccacttttgtcatgggcagtaaatactatagtttacaatgcctaccaattagcaaaggatcattcattcagctactcagttcctctgtaaaacaggtctatgtatgtgcaattcagctaagatctagcagtaacttaagggcagaagctggctctctacttacaacctgctttctctgctgaagccttacctcctcttcagtttccctcctagacacaaatcgaaaataatatactgatagctggttagtaacctcagtaagaattaaaactgaggttgtttactcattttgcctttaaatcttttatccccttttggtgaaggtttccctttaggaaaaaaggtgtcaaacaaccctgattttttttttttttgcatcatttttattacaccaaattaaagttgggagttccaagatcccattccagttaatatttaaccaaggtctaaaatttgattttttttaaatctttgaatcctcccttctgcccctcatggatccttggttttaatgatatggaaacatctaattcttagaattattccgtagcttttgctgattactctgagatttcagttaagacttgtttcaaaagacagatagctgactggttcataatacattggaatagttggatccaaactaataagaataagctgtacaggaactagtgctcaatatacattgtataaatttgtggaaatctcttggatgtgaattgttacttcaagtggcttttattaagattttctcagacttacttggaggttaaagcaaacccaaatgtgtattattttgttacagagctctgctttataattttgtaataaagtttcaatacagacacc

SEQ ID NO: 26759 - DNA, 1100 bp, Homo sapiens
  source 1..1100: mol_type = unassigned DNA
aggttgcagttgactgcggttggttcaggctgagttgtttgggaagtacaaattttgcccagcgtgagtcagcactgccctgggtaaactccctgctgtgttgcaatcttgcttaccaaagatacatccccaggcggcaccattcacttcacatgaaagccgctgctcttggttcctgagatgatctcatctgaacatggctccagcgacctcagccacaggaactagagacagcttgctttctgtcgtggcaatgttttgaaactggcaaaatcagattttatcatgtgggcaacctgctgcaactggttctgcctggatggacagcctgaggaggtcccaccaccccagggagccaggatgcaggcctattccaaccctgggtacagctccttcccttccccaacaggcttggaaccaagctgcaagtcctgtggggctcactttgcaaacacggccaggaagcagacctgcttggactgtaagaaaaatttttgcatgacctgttcgagccaagtagggaatgggccccgcctctgccttctctgccaacggtttcgagctacagcctttcagcgagaggagctcatgaagatgaaggtgaaggacttgagggactatctcagcctccatgacatctctaccgaaatgtgccgggagaaagaagagctggtgctcttggtccttggccagcagcctgtaatctcccaggaggacaggactcgtgcctccaccttgtccccagactttcctgagcagcaggccttcctgacccagcctcactccagcatggttccacctacctcacccaacctcccctcttcatctgcacaagccacctctgttcccccagcccaggttcaggagaatcagcaggccaatggccatgtgtctcaggatcaagaggaacccgtctacctggagagcgtggccagagtacctgctgaggatgagacccagtctattgactcagaggacagctttgtcccaggccgaagggcctctctgtctgacctgactgacctggaggacattgaaggcctgacagtgcggcagctgaaagagatcttggctcgcaactttgtcaactacaagggctg

SEQ ID NO: 26760 - DNA, 489 bp, Homo sapiens
  source 1..489: mol_type = unassigned DNA
aaggagttcaagttgcttgccagactaacttacttttaaaagtaagcagccttccaagttaagagatgattttaaatttcagattttatcatgtgggcaacctgctgcaactggttctgcctggatggacagcctgaggaggtcccaccaccccagggagccaggatgcaggcctattccaaccctgggtacagctccttcccttccccaacaggcttggaaccaagctgcaagtcctgtggggctcactttgcaaacacggccaggaagcagacctgcttggactgtaagaaaaatttttgcatgacctgttcgagccaagtagggaatgggccccgcctctgccttctctgccaacggtttcgagctacagcctttcagcgagaggagctcatgaagatgaaggtgaaggacttgagggactatctcagcctccatgacatctctaccgaaatgtgccgggagaaagaagagctggtgctcttggtc

SEQ ID NO: 26761 - DNA, 893 bp, Homo sapiens
  source 1..893: mol_type = unassigned DNA
gtcagggtgggtacctcaggcaggtttgctggaaaattccagtaaacagtttcaaaggagttcaagttgcttgccagactaacttacttttaaaagtaagcagccttccaagttaagagatgattttaaatttcagggaaagtggaagaggagaccctagcaggcttcaagcaagctctgtaggacagcagttagacactgtttttgaggactaaattgccaagtctgtcttttaagaagagggtgaggggagtttgggaaggaatgttcaagccctgagtgaagatccaataattttctttcaagatcagaaggagattttatcatgtgggcaacctgctgcaactggttctgcctggatggacagcctgaggaggtcccaccaccccagggagccaggatgcaggcctattccaaccctgggtacagctccttcccttccccaacaggcttggaaccaagctgcaagtcctgtggggctcactttgcaaacacggccaggaagcagacctgcttggactgtaagaaaaatttttgcatgacctgttcgagccaagtagggaatgggccccgcctctgccttctctgccaacggtttcgagctacagcctttcagcgagaggagctcatgaagatgaaggtgaaggacttgagggactatctcagcctccatgacatctctaccgaaatgtgccgggagaaagaagagctggtgctcttggtccttggccagcagcctgtaatctcccaggaggacaggactcgtgcctccaccttgtccccagactttcctgagcagcaggccttcctgacccagcctcactccagcatggttccacctacctcacccaacctcccctcttcatctgcacaagccacctctgttcccccag

SEQ ID NO: 26762 - DNA, 720 bp, Homo sapiens
  source 1..720: mol_type = unassigned DNA
gggccgggccggctggggatgggtgggagggggggccgacttcctggggccgcccgtgaggatgtcgcgaccgcccccgggtgcccctcagccccagagacgccgccgcggcggagtccgcagcctccctgcctgaggcgtccgcggccgggatccggcccctcccctcgcctcctctcctaggtgccggccgggagggcggccgcagcagaactttgggggaagtgagaactgtgagcacaataatcttcagagaatgcacagtcctttgggtatttgtctactcatcagctgcttagtcagatggagtgttttcctaagtactactgaagtacacagttcagtctttattttgaaatctctccttctgccttctctccctcttccattactttgattaccttgatgggacattcaagctgtgcagtcgtatccttttatttctatagcctgcagaaaccaggttgaagattaactgtaggtgaacaggtaatcttatctacttggctagaaatcacccttcaagatgaaacacgtgttgacaaaggccccctagacttggggacatgaacaaagattttatcatgtgggcaacctgctgcaactggttctgcctggatggacagcctgaggaggtcccaccaccccagggagccaggatgcaggcctattccaaccctgggtacagctccttcccttccccaacaggcttggaaccaa

SEQ ID NO: 26763 - DNA, 2124 bp, Homo sapiens
  source 1..2124: mol_type = unassigned DNA
atgtctggtagccgccaggccgggtcgggctccgctgggacaagccccgggtcctcggcggcctcctcggtgacttccgcctcctcgtctttatcctcttccccgtcgccgccttccgtggcggtttcggcggcagcgctggtgtccggcggggtggcccaggccgccggctcgggcggcctcgggggcccggtgcggcctgtgttggtggcgcccgccgtatcgggtagcggcggcggggcggtgtccacgggcctgtcccggcacagctgcgcggccaggcccagcgccggcgtaggaggcagcagctccagcctaggcagcggcagcaggaagcgacctctcctcgcccccctctgcaacgggctcatcaactcctacgaggacaaaagcaacgacttcgtatgccccatctgctttgatatgattgaagaagcatacatgacaaaatgtggccacagcttttgctacaagtgtattcatcagagtttggaggacaataatagatgtcccaagtgtaactatgttgtggacaatattgaccatctgtatcctaatttcttggtgaatgaactcattcttaaacagaagcaaagatttgaggaaaagaggttcaaattggaccactcaaatggccacaggtggcagatatttcaagattggttgggaactgaccaagataaccttgatttggccaatgtcaatcttatgttggagttactagtgcagaagaagaaacaactggaagcagaatcacatgcagcccaactacagattcttatggaattcctcaaggttgcaagaagaaataagagagaggaaatgagtggcttatactctcctgtcagtgaggatagcacagtgcctcaatttgaagctccttctccatcacacagtagtattattgattccacagaatacagccaacctccaggtttcagtggcagttctcagacaaagaaacagccttggtataatagcacgttagcatcaagacgaaaacgacttactgctcattttgaagacttggagcagtgttacttttctacaaggatgtctcgtatctcagatgacagtcgaactgcaagccagttggatgaatttcaggaatgcttgtccaagtttactcgatataattcagtacgacctttagccacattgtcatatgctagtgatctctataatggttccagtatagtctctagtattgaatttgaccgggattgtgactattttgcgattgctggagttacaaagaagattaaagtctatgaatatgacactgtcatccaggatgcagtggatattcattaccctgagaatgaaatgacctgcaattcgaaaatcagctgtatcagttggagtagttaccataagaacctgttagctagcagtgattatgaaggcactgttattttatgggatggattcacaggacagaggtcaaaggtctatcaggagcatgagaagaggtgttggagtgttgactttaatttgatggatcctaaactcttggcttcaggttctgatgatgcaaaagtgaagctgtggtctaccaatctagacaactcagtggcaagcattgaggcaaaggctaatgtgtgctgtgttaaattcagcccctcttccagataccatttggctttcggctgtgcagatcactgtgtccactactatgatcttcgtaacactaaacagccaatcatggtattcaaaggacaccgtaaagcagtctcttatgcaaagtttgtgagtggtgaggaaattgtctctgcctcaacagacagtcagctaaaactgtggaatgtagggaaaccatactgcctacgttccttcaagggtcatatcaatgaaaaaaactttgtaggcctggcttccaatggagattatatagcttgtggaagtgaaaataactctctctacctgtactataaaggactttctaagactttgctaacttttaagtttgatacagtcaaaagtgttctcgacaaagaccgaaaagaagatgatacaaatgaatttgttagtgctgtgtgctggagggcactaccagatggggagtccaatgtgctgattgctgctaacagtcagggtacaattaaggtgctagaattggtatga

SEQ ID NO: 26764 - DNA, 2566 bp, Homo sapiens
  source 1..2566: mol_type = unassigned DNA
gggaccgcggtggcggcggcggcctcgacagcggtagtgccttctactccgcttttttagtttcctccgccccctcccgtgggacgctgttgtgtggctgccttaaaaaaaaacgcaactttattgttcctcagccccacctccggctcggcgggcgtcctcaggatgcactgaggctgaggggaggggaggcggcggagggtcgaggtcgcggtccctctcctccgagcgcccggctggaggggagggagtcacgatgtctggtagccgccaggccgggtcgggctccgctgggacaagccccgggtcctcggcggcctcctcggtgacttccgcctcctcgtctttatcctcttccccgtcgccgccttccgtggcggtttcggcggcagcgctggtgtccggcggggtggcccaggccgccggctcgggcggcctcgggggcccggtgcggcctgtgttggtggcgcccgccgtatcgggtagcggcggcggggcggtgtccacgggcctgtcccggcacagctgcgcggccaggcccagcgccggcgtaggaggcagcagctccagcctaggcagcggcagcaggaagcgacctctcctcgcccccctctgcaacgggctcatcaactcctacgaggacaaaagcaacgacttcgtatgccccatctgctttgatatgattgaagaagcatacatgacaaaatgtggccacagcttttgctacaagtgtattcatcagagtttggaggacaataatagatgtcccaagtgtaactatgttgtggacaatattgaccatctgtatcctaatttcttggtgaatgaactcattcttaaacagaagcaaagatttgaggaaaagaggttcaaattggaccactcagtgagtagcaccaatggccacaggtggcagatatttcaagattggttgggaactgaccaagataaccttgatttggccaatgtcaatcttatgttggagttactagtgcagaagaagaaacaactggaagcagaatcacatgcagcccaactacagattcttatggaattcctcaaggttgcaagaagaaataagagagagcaactggaacagatccagaaggagctaagtgttttggaagaggatattaagagagtggaagaaatgagtggcttatactctcctgtcagtgaggatagcacagtgcctcaatttgaagctccttctccatcacacagtagtattattgattccacagaatacagccaacctccaggtttcagtggcagttctcaggctggagtgcaatggcgctatcttggctcactgcaacctccacctcccaggtacaagcgattctcctgcctcaccctcccaagtagctgggattaccggcgcctgcctccacacctgacaaagaaacagccttggtataatagcacgttagcatcaagacgaaaacgacttactgctcattttgaagacttggagcagtgttacttttctacaaggatgtctcgtatctcagatgacagtcgaactgcaagccagttggatgaatttcaggaatgcttgtccaagtttactcgatataattcagtacgacctttagccacattgtcatatgctagtgatctctataatggttccagtatagtctctagtattgaatttgaccgggattgtgactattttgcgattgctggagttacaaagaagattaaagtctatgaatatgacactgtcatccaggatgcagtggatattcattaccctgagaatgaaatgacctgcaattcgaaaatcagctgtatcagttggagtagttaccataagaacctgttagctagcagtgattatgaaggcactgttattttatgggatggattcacaggacagaggtcaaaggtctatcaggagcatgagaagaggtgttggagtgttgactttaatttgatggatcctaaactcttggcttcaggttctgatgatgcaaaagtgaagctgtggtctaccaatctagacaactcagtggcaagcattgaggcaaaggctaatgtgtgctgtgttaaattcagcccctcttccagataccatttggctttcggctgtgcagatcactgtgtccactactatgatcttcgtaacactaaacagccaatcatggtattcaaaggacaccgtaaagcagtctcttatgcaaagtttgtgagtggtgaggaaattgtctctgcctcaacagacagtcagctaaaactgtggaatgtagggaaaccatactgcctacgttccttcaagggtcatatcaatgaaaaaaactttgtaggcctggcttccaatggagattatatagcttgtggaagtgaaaataactctctctacctgtactataaaggactttctaagactttgctaacttttaagtttgatacagtcaaaagtgttctcgacaaagaccgaaaagaagatgatacaaatgaatttgttagtgctgtgtgctggagggcactaccagatggggagtccaatgtgctgattgctgctaacagtcagggtacaattaaggttctcgcactgtta

SEQ ID NO: 26765 - DNA, 3033 bp, Homo sapiens
  source 1..3033: mol_type = unassigned DNA
cacctataccattcattccagtctcctcaattctttcactgtattaagacggcctgccctctggcacgttttctggaacgaaagcggcttgggacagacagactcccttcgccagggagccccgaccccgagggcgcgccctgagcgtctgagcgcagccccgctgcgtccccagttgtatcccccgccacgcccgcctcttccgccgctcgcgcgcgcgcgcacggccggccacggcgcgccggggttggctgctacagggaccgcggtggcggcggcggcctcgacagcggtagtgccttctactccgcttttttagtttcctccgccccctcccgtgggacgctgttgtgtggctgccttaaaaaaaaacgcaactttattgttcctcagccccacctccggctcggcgggcgtcctcaggatgcactgaggctgaggggaggggaggcggcggagggtcgaggtcgcggtccctctcctccgagcgcccggctggaggggagggagtcacgatgtctggtagccgccaggccgggtcgggctccgctgggacaagccccgggtcctcggcggcctcctcggtgacttccgcctcctcgtctttatcctcttccccgtcgccgccttccgtggcggtttcggcggcagcgctggtgtccggcggggtggcccaggccgccggctcgggcggcctcgggggcccggtgcggcctgtgttggtggcgcccgccgtatcgggtagcggcggcggggcggtgtccacgggcctgtcccggcacagctgcgcggccaggcccagcgccggcgtaggaggcagcagctccagcctaggcagcggcagcaggaagcgacctctcctcgcccccctctgcaacgggctcatcaactcctacgaggacaaaagcaacgacttcgtatgccccatctgctttgatatgattgaagaagcatacatgacaaaatgtggccacagcttttgctacaagtgtattcatcagagtttggaggacaataatagatgtcccaagtgtaactatgttgtggacaatattgaccatctgtatcctaatttcttggtgaatgaactcattcttaaacagaagcaaagatttgaggaaaagaggttcaaattggaccactcagtgagtagcaccaatggccacaggtggcagatatttcaagattggttgggaactgaccaagataaccttgatttggccaatgtcaatcttatgttggagttactagtgcagaagaagaaacaactggaagcagaatcacatgcagcccaactacagattcttatggaattcctcaaggttgcaagaagaaataagagagagcaactggaacagatccagaaggagctaagtgttttggaagaggatattaagagagtggaagaaatgagtggcttatactctcctgtcagtgaggatagcacagtgcctcaatttgaagctccttctccatcacacagtagtattattgattccacagaatacagccaacctccaggtttcagtggcagttctcagacaaagaaacagccttggtataatagcacgttagcatcaagacgaaaacgacttactgctcattttgaagacttggagcagtgttacttttctacaaggatgtctcgtatctcagatgacagtcgaactgcaagccagttggatgaatttcaggaatgcttgtccaagtttactcgatataattcagtacgacctttagccacattgtcatatgctagtgatctctataatggttccagtatagtctctagtattgaatttgaccgggattgtgactattttgcgattgctggagttacaaagaagattaaagtctatgaatatgacactgtcatccaggatgcagtggatattcattaccctgagaatgaaatgacctgcaattcgaaaatcagctgtatcagttggagtagttaccataagaacctgttagctagcagtgattatgaaggcactgttattttatgggatggattcacaggacagaggtcaaaggtctatcaggagcatgagaagaggtgttggagtgttgactttaatttgatggatcctaaactcttggcttcaggttctgatgatgcaaaagtgaagctgtggtctaccaatctagacaactcagtggcaagcattgaggcaaaggctaatgtgtgctgtgttaaattcagcccctcttccagataccatttggctttcggctgtgcagatcactgtgtccactactatgatcttcgtaacactaaacagccaatcatggtattcaaaggacaccgtaaagcagtctcttatgcaaagtttgtgagtggtgaggaaattgtctctgcctcaacagacagtcagctaaaactgtggaatgtagggaaaccatactgcctacgttccttcaagggtcatatcaatgaaaaaaactttgtaggcctggcttccaatggagattatatagcttgtggaagtgaaaataactctctctacctgtactataaaggactttctaagactttgctaacttttaagtttgatacagtcaaaagtgttctcgacaaagaccgaaaagaagatgatacaaatgaatttgttagtgctgtgtgctggagggcactaccagatggggagtccaatgtgctgattgctgctaacagtcagggtacaattaaggtgctagaattggtatgaagggttaactcaagtcaaattgtacttgatcctgctgaaatacatctgcagctgacaatgagagaagaaacagaaaatgtcatgtgatgtctctccccaaagtcatcatgggttttggatttgttttgaatatttttttctttttttcttttccctcctttatgacctttgggacattgggaatacccagccaactctccaccatcaatgtaactccatggacattgctgctcttggtggtgttatctaatttttgtgatagggaaacaaattcttttgaataaaaataaataacaaaacaataaaagtttattgagccaca

SEQ ID NO: 26766 - DNA, 1027 bp, Homo sapiens
  source 1..1027: mol_type = unassigned DNA
gggaccgcggtggcggcggcggcctcgacagcggtagtgccttctactccgcttttttagtttcctccgccccctcccgtgggacgctgttgtgtggctgccttaaaaaaaaacgcaactttattgttcctcagccccacctccggctcggcgggcgtcctcaggatgcactgaggctgaggggaggggaggcggcggagggtcgaggtcgcggtccctctcctccgagcgcccggctggaggggagggagtcacgatgtctggtagccgccaggccgggtcgggctccgctgggacaagccccgggtcctcggcggcctcctcggtgacttccgcctcctcgtctttatcctcttccccgtcgccgccttccgtggcggtttcggcggcagcgctggtgtccggcggggtggcccaggccgccggctcgggcggcctcgggggcccggtgcggcctgtgttggtggcgcccgccgtatcgggtagcggcggcggggcggtgtccacgggcctgtcccggcacagctgcgcggccaggcccagcgccggcgtaggaggcagcagctccagcctaggcagcggcagcaggaagcgacctctcctcgcccccctctgcaacgggctcatcaactcctacgaggacaaaagcaacgacttcgtatgccccatctgctttgatatgattgaagaagcatacatgacaaaatgtggccacagcttttgctacaagtgtattcatcagagtttggaggacaataatagatgtcccaagtgtaactatgttgtggacaatattgaccatctgtatcctaatttcttggtgaatgaactcattcttaaacagaagcaaagatttgaggaaaagaggttcaaattggaccactcagtgagtagcaccaatggccacaggtggcagatatttcaagattggttgggaactgaccaagataaccttgatttggccaatgtcaatcttatgttggagttactagtgcagaagaataaaaaaaaaaaaaaaaaaaaaaaa

SEQ ID NO: 26767 - DNA, 4952 bp, Homo sapiens
  source 1..4952: mol_type = unassigned DNA
aagtggcagttggcgtaggtgcattcggagtgcggccgaggtaactaccgagtcttcggcgggctcgcgagcccggccgcggcctgctggtttcagtgatggctcatgaagcaatggaatatgatgttcaggtgcagttaaatcatgccgaacaacagccagctcctgctggcatggccagcagccaagggggaccagccctcctccagcctgttcctgctgatgtggtcagcagccagggggtaccatccatcctccagccagctcctgctgaggtgatcagcagccaagcgacaccacccctgctccagcctgctccgcaactgtctgttgacctgacagaagtggaggtcttgggagaagacactgtggagaacatcaatccaagaacttcagaacaacataggcagggatctgatggtaatcacaccatcccagcatcttcgttgcattcaatgaccaacttcatcagcggactgcagagacttcatggcatgctggaattcctgagaccttcatcttcaaaccacagtgtagggccaatgagaacaagaaggagggtatctgcttcacggagggcaagagccggagggtctcagaggacagacagtgccaggttgagagcaccattggatgcttactttcaggtgagcaggacccagcctgacttgccagctaccacttatgattcagagactaggaatcctgtatctgaagagttgcaggtgtctagtagttctgattctgacagtgacagctctgcagagtatggaggggttgttgaccaggcagaggaatctggagctgtcattttagaagagcaactagcaggtgtctcagcagagcaagaagttacatgtatcgatggaggcaagaccctccccaaacagccatctccccagaagtctgagcctctgctaccttctgcttctatggatgaggaagaaggggacacttgtacaatatgtctggaacagtggaccaatgctggggaccaccggctctcagcattacgctgtgggcatctctttgggtataggtgcatttccacgtggcttaaaggacaagtacgaaaatgtccccagtgcaacaagaaagccaggcacagtgacattgtcgtcctttatgcccgaaccctgagagctttggacactagtgaacaggagcgcatgaaaagttccctactgaaggaacagatgctaaggaaacaggccgagttagaatcagcacagtgccgactccaactgcaggtcctcactgataagtgcactaggcttcaaaggcgtgttcaggacttgcaaaaacttacgtcacatcaaagtcagaatttacagcaacccaggggctcccaagcatgggtcctgagctgctcaccctccagccagggccagcacaagcacaagtaccacttccaaaagaccttcacagtatctcaggcaggaaactgccggatcatggcatactgtgatgctctgagctgcctggtgatatcacagccttctcctcaggcctcttttcttccaggctttggtgttaagatgttgagtactgccaacatgaagagcagtcagtacattccgatgcatggcaaacagatccgtggactggcgtttagcagttacctcagaggcttgctactctctgcttccctagacaacactattaaactgaccagcctggagacaaataccgtggtccagacttataatgctggacgtcctgtctggagctgttgctggtgtcttgatgaggctaactacatctatgctggactggccaatggttcaattctggtatatgacgtgcgaaacacgagcagtcatgtgcaggagttagtagctcagaaagccagatgcccactggtctccctgtcatacatgcccagagctgcctcagctgcatttccatatggtggggtgctggctggaaccttggaggatgcttcattctgggaacagaaaatggacttttctcattggcctcatgtgctgcccttggagccagggggctgcatagactttcagacagagaacagctcccggcactgtcttgtgacctacaggcctgataaaaatcacaccaccatacgaagtgtgctgatggaaatgtcctaccgactggatgacactggaaatccaatctgctcctgccagcctgtacatacattttttggaggacctacttgcaaactattgaccaaaaatgccattttccaaagcccagagaatgatggcaacatcctggtgtgtactggggatgaagcagcaaattctgccctgctgtgggatgctgccagtggctcgttgctccaggacctacagaccgatcagcctgtgttggacatctgcccatttgaggtgaaccgtaacagctacttggctaccttaacagagaagatggtccacatctataagtgggagtgactgtggtctcgaaaccttgaaggcatgctgctggttagatgttgtttgctagcgcctagcagccccaagcaagatccctgtttattgtctgcagtctagaacattgggaatcatggtttgtttgcattagtatgattctaggaccctaggtcactgagacactacagattgtgtatctgttatgtccactaaaagagtaattgatgggtactttatctacattatccatttcttgggtttaaagccttcattaaccattattgtatgttggaaattcttattttctttattttctgtgtgactttctggaccttagagagtgtcctctcatcatctaggatgtgagtgggcatcaagcattttctggggaatatgacatcccatctgagttgtcctgtcacttaagtatccttgaagggactaaccatcgtcttggtactgatttgatgcaacgtagatgtaaaagagtattattcagttgaacacaagagggcactgtagaaccttgtgtccggtttatttctgaccttgaaggctgacaatcttttagtaacttgtctcatctccacacaagtgtgtgatagcacacctgggtgtgctttgtggcaataacacttgtgttccaggtgtgaagtgctgggacattggcaggcccagtgatggaagcagctagtgaacgattccctttgctaatgcctagtgcattaagttcattgctttgcgaaaggtaaggaaagaggccagttgtttgagcggtggggaagattttgttttttctagccagcttaggatctcaggattggttttatccaagctagtgctttgaagaacactatctcttgccaggaaaagatgagtgataggtcaaagcttttacttgagtctcccctagtgtcagagatcaggagaaaagacataagagaatttacaaaagctattcagactgctattgaaaacatgagaagaacttgtctcccattttgagagttcctatctaaataaagccaattcctcagactgaggggctgttcttaagtgttctttatacattccagttatccagttaaagccttccccatgtgaagctgatgtttgattccagtttcctttgatttgcctccctaaccttttctagggctcagtttgtatttctttgccttgcctcagactactttgccaacccacttccacaacagaatatgcttcaagatgtgggcaggtcagtgtcctgttcatgggagaaaatggcttaacagtctgattttctcaaatgattattgaagagttgttatcgtttttattataaaacacttctgacctgtcaattcaagagctgtttctaggatctttctctccggcaaggggttgttgcactagatttccccagagttccaagttctagttgtgccttttaatgaccctttaatattttaggacataattttttccttttttaaatttttttgtagaaatagatgtttcactacgttgtccaggctggtcttggactcctggcctcaagcaatcctcccacctcagcctcctaaagtgccaaaattataggcgtgagccactgcacccggcccctatttgaagacgtcttttgtaaaagctagcttctagaacctgagaaaagctcttttctcagaggagatactccttttgatatgttaatgattaagagtggttgcccaggcctagtttcagtggcagaataggattggaattaaaaagcagaactcatctggcttcagcagattgccaccaagaggatacaggtggtcaggtcctggctggctttgtctttgggcctgggcaggcttaggatttgactttctttgaagtacctgatgctgattgattccactaatagtaggaagcaagagacttaactatgagggacgttatgtgaatcttaagtcttaccagtccttgcattagtacattaaatttggatgttttggaagcaaattcatacgatcgtgagtgatttctccaaagaaaaaaagccttgtccagcctgaccaacatggtgaaaccccatctctactaaaaatacaaaaattaactgggtgcagtggtgcgcatgcctgtagtcccagctacttgggaggctgaggcaggagaattgcttgaaccctgggaggcagaggttgcagtgagtcgagatcgcgccactgcactccagcctcggtgacagagcaagactccatctcaaaaaaaacaaacaaacaaaaaaaaaccctgatgccattcccagtccccgttgtaggacatcacatttataaatccaggctttagtcttctgggctccaccagtctctgccccaccatattcctttgtcactacctctaagtttttttccccacttgaggatttggagttaaacgaactcaaaatgtcttgtcattgtatgtattcttgcccctgctttgaaaacagggccatgggaactctgtttatgccctgttttaatgtttctgttttatgttttactgttaatatgaaaataaagaatttgctatgta

SEQ ID NO: 26768 - DNA, 3321 bp, Homo sapiens
  source 1..3321: mol_type = unassigned DNA
atggctcatgaagcaatggaatatgatgttcaggtgcagttaaatcatgccgaacaacagccagctcctgctggcatggccagcagccaagggggaccagccctcctccagcctgttcctgctgatgtggtcagcagccagggggtaccatccatcctccagccagctcctgctgaggtgatcagcagccaagcgacaccacccctgctccagcctgctccgcaactgtctgttgacctgacagaagtggaggtcttgggagaagacactgtggagaacatcaatccaagaacttcagaacaacataggcagggatctgatggtaatcacaccatcccagcatcttcgttgcattcaatgcccttggagccagggggctgcatagactttcagacagagaacagctcccggcactgtcttgtgacctacaggcctgataaaaatcacaccaccatacgaagtgtgctgatggaaatgtcctaccgactggatgacactggaaatccaatctgctcctgccagcctgtacatacattttttggaggacctacttgcaaactattgaccaaaaatgccattttccaaagcccagagaatgatggcaacatcctggtgtgtactggggatgaagcagcaaattctgccctgctgtgggatgctgccagtggctcgttgctccaggacctacagaccgatcagcctgtgttggacatctgcccatttgaggtgaaccgtaacagctacttggctaccttaacagagaagatggtccacatctataagtgggagtgactgtggtctcgaaaccttgaaggcatgctgctggttagatgttgtttgctagcgcctagcagccccaagcaagatccctgtttattgtctgcagtctagaacattgggaatcatggtttgtttgcattagtatgattctaggaccctaggtcactgagacactacagattgtgtatctgttatgtccactaaaagagtaattgatgggtactttatctacattatccatttcttgggtttaaagccttcattaaccattattgtatgttggaaattcttattttctttattttctgtgtgactttctggaccttagagagtgtcctctcatcatctaggatgtgagtgggcatcaagcattttctggggaatatgacatcccatctgagttgtcctgtcacttaagtatccttgaagggactaaccatcgtcttggtactgatttgatgcaacgtagatgtaaaagagtattattcagttgaacacaagagggcactgtagaaccttgtgtccggtttatttctgaccttgaaggctgacaatcttttagtaacttgtctcatctccacacaagtgtgtgatagcacacctgggtgtgctttgtggcaataacacttgtgttccaggtgtgaagtgctgggacattggcaggcccagtgatggaagcagctagtgaacgattccctttgctaatgcctagtgcattaagttcattgctttgcgaaaggtaaggaaagaggccagttgtttgagcggtggggaagattttgttttttctagccagcttaggatctcaggattggttttatccaagctagtgctttgaagaacactatctcttgccaggaaaagatgagtgataggtcaaagcttttacttgagtctcccctagtgtcagagatcaggagaaaagacataagagaatttacaaaagctattcagactgctattgaaaacatgagaagaacttgtctcccattttgagagttcctatctaaataaagccaattcctcagactgaggggctgttcttaagtgttctttatacattccagttatccagttaaagccttccccatgtgaagctgatgtttgattccagtttcctttgatttgcctccctaaccttttctagggctcagtttgtatttctttgccttgcctcagactactttgccaacccacttccacaacagaatatgcttcaagatgtgggcaggtcagtgtcctgttcatgggagaaaatggcttaacagtctgattttctcaaatgattattgaagagttgttatcgtttttattataaaacacttctgacctgtcaattcaagagctgtttctaggatctttctctccggcaaggggttgttgcactagatttccccagagttccaagttctagttgtgccttttaatgaccctttaatattttaggacataattttttccttttttaaatttttttgtagaaatagatgtttcactacgttgtccaggctggtcttggactcctggcctcaagcaatcctcccacctcagcctcctaaagtgccaaaattataggcgtgagccactgcacccggcccctatttgaagacgtcttttgtaaaagctagcttctagaacctgagaaaagctcttttctcagaggagatactccttttgatatgttaatgattaagagtggttgcccaggcctagtttcagtggcagaataggattggaattaaaaagcagaactcatctggcttcagcagattgccaccaagaggatacaggtggtcaggtcctggctggctttgtctttgggcctgggcaggcttaggatttgactttctttgaagtacctgatgctgattgattccactaatagtaggaagcaagagacttaactatgagggacgttatgtgaatcttaagtcttaccagtccttgcattagtacattaaatttggatgttttggaagcaaattcatacgatcgtgagtgatttctccaaagaaaaaaagccttgtccagcctgaccaacatggtgaaaccccatctctactaaaaatacaaaaattaactgggtgcagtggtgcgcatgcctgtagtcccagctacttgggaggctgaggcaggagaattgcttgaaccctgggaggcagaggttgcagtgagtcgagatcgcgccactgcactccagcctcggtgacagagcaagactccatctcaaaaaaaacaaacaaacaaaaaaaaaccctgatgccattcccagtccccgttgtaggacatcacatttataaatccaggctttagtcttctgggctccaccagtctctgccccaccatattcctttgtcactacctctaagtttttttccccacttgaggatttggagttaaacgaactcaaaatgtcttgtcattgtatgtattcttgcccctgctttgaaaacagggccatgggaactctgtttatgccctgttttaatgtttctgttttatgttttactgttaatatgaaaataaagaatttgctatgta

SEQ ID NO: 26769 - DNA, 3276 bp, Homo sapiens
  source 1..3276: mol_type = unassigned DNA
gcttccttgtgagaatctaggtctctaagggaagcgttacttgaggctcggttgggaagagatgggcagctctcaaaaaaggcacaaacaattgaaggatggataccatggcatatgttaaaagcgtgttgaaaggaaaataagaaagccaggaatctcaggatgaatcagtctagatcgagatcagatggtggcagtgaagaaaccttacctcaagaccataatcatcatgaaaatgagagaagatggcagcaagagcgtctccacagagaagaggcctattatcagtttattaatgaactcaatgatgaagattatcggcttatgagagaccataatcttttaggcacccctggagaaataacatcagaagaactgcaacagcggttagatggcgtcaaggaacaactagcatctcagcctgacttgagagatggaacgaattacagagactcagaagtccctagagaaagttcacatgaagattctcttctagaatggttgaacacctttcggcgcacaggaaatgcaactcgaagtggacaaaatgggaaccaaacttggagagctgtgagtcgaacaaacccgaacaatggagagtttcggtttagtttggaaatccacgtaaatcatgaaaatagaggatttgaaattcatggagaagattatacagacattccactttcagatagtaacagagatcatactgcaaataggcaacaaaggtcaactagtcctgtggctaggcgaacaagaagccaaacctcagtgaatttcaatggtagtagttccaacattccaaggactaggcttgcttcaagggggcaaaatccagctgaaggatctttctcaacattgggaaggttaagaaatggaattgggggagcagctggcattcctcgagctaacgcttcacgcactaatttcagtagtcacacaaaccaatcaggtggtagtgaactcaggcaaagggaggggcaacggtttggagcagcacatgtttgggaaaatggggctagaagtaatgttacagtgaggaatacaaaccaaagattagagccaataagattacgatctacttccaatagtcgaagccgttcaccaattcagagacagagtggcactgtttatcataattcccaaagggaaagtagaccagtacagcaaaccactagaagatctgttaggaggagaggtagaactcgagtctttttagagcaagatagagaacgagaacgcagaggtactgcatataccccattctctaattcaaggcttgtgtcaagaataacagtagaagaaggagaagaatccagcagatcctcaactgctgtacgacgacatccaacaatcacactggaccttcaagtgagaaggatccgtcctggagaaaatagagatcgggatagtattgcaaatagaactcgatccagagtagggctagcagaaaatacagtcactattgaaagcaatagtgggggctttcgccgaaccatttctcgtttagagcggtcaggtattcgaacctatgttagtaccataacagttcctcttcgtaggatttctgagaatgagcttgttgagccatcatcagtggctcttcggtcaattttaaggcagatcatgactgggtttggagaactgagttctctaatggaggccgattctgagtcagaacttcaaagaaatggccagcatttaccagacatgcactcagaactgagtaacttaggtacagataacaacaggagccagcacagggaaggttcctctcaagacaggcaggcccaaggagacagcactgaaatgcatggtgaaaacgagaccacccagcctcatactcgaaacagtgacagtaggggtggcaggcagttgcgaaatccaaacaatttagttgaaactggaacactacccattcttcgccttgctcacttttttttactaaatgaaagtgatgatgatgatcgaatacgtggtttaaccaaagagcagattgacaatctttccaccaggcactatgagcataacagtattgatagtgaactaggtaaaatctgtagtgtttgtattagtgactatgtaactggaaacaagctcaggcaattaccttgcatgcatgaatttcacattcattgtattgaccgatggctctcagagaattgcacttgtccgatctgtcggcagcctgttttagggtctaacatagcaaacaatgggtaaggtgatgggatctactcaaatactgttttttagtagaactgaatgttcaagcattgttttgctgagttatttgtgattagctaaccaggatgaaaaataacagattatatatagtttgaactatttttcgtgtgcttttttaaacttgttaaaaagaaatttatataaaatttaaaatacaaatgttaaattatccagaaatacagaatagttaatattgctagaaccaaataacctctaaaatgtttttattttggtaattttgtcatgctaagcacttttgtatctgcacaattcagtaggttaagaatcaatcttctttttcttaatagtacagcagactttagcttcaagtttcataggcttagtacttatatctagacatttgtgtctaaataagcttttcattaactttttattttaaggacagtatcttttcatgaaagagtatttggctgaatgtttgctatatatatgttacttgaaatgttaaatttaatatgcagcataccataggtgtatatataggtatataattttaaggttaaaatattcagtctacaagtttggttcttatttaagcttttgggctaatactgcatatggcacaatgtttaatattggcaagttcatctcagagaaaggggattcagatataattttaaagtagagataatttactgaagcgtctctgacaatctaacttattagacagcaagcaatatataatactgaaaaagtattcagaaatggaaaatttacatcatataggttatttaacttgtgttcagcctttttgtaacttttttgaaagtgcaaacaattctttggattattaaataaggtatacagtatgcatggtttctcaaatttagttttaaaatctaaaagtctataaagaatcagatgcataggcaatatgttaagttcacttggaggctaaaaatctccagtgaaaacaaaacgaaaacctttaagagaatgtagagtttatataaacacaaagtatgcattgaagatctgtttctaccaataaacattaaaacaaagactgta

SEQ ID NO: 26770 - DNA, 3398 bp, Homo sapiens
  source 1..3398: mol_type = unassigned DNA
gggaaagaaaccagtagcgggacggagggcgggggtggcaagaaagtcaaggtttagaagtaagccggagacgcctaaccctggtaacatccgaatgggaacgggataggaaggaaggcctttgagagaggaggcgtaaacccaggaacagtgacagtgtaggacgaaaggcctaagtttgttgcggaagatgggcagctctcaaaaaaggcacaaacaattgaaggatggataccatggcatatgttaaaagcgtgttgaaaggaaaataagaaagccaggaatctcaggatgaatcagtctagatcgagatcagatggtggcagtgaagaaaccttacctcaagaccataatcatcatgaaaatgagagaagatggcagcaagagcgtctccacagagaagaggcctattatcagtttattaatgaactcaatgatgaagattatcggcttatgagagaccataatcttttaggcacccctggagaaataacatcagaagaactgcaacagcggttagatggcgtcaaggaacaactagcatctcagcctgacttgagagatggaacgaattacagagactcagaagtccctagagaaagttcacatgaagattctcttctagaatggttgaacacctttcggcgcacaggaaatgcaactcgaagtggacaaaatgggaaccaaacttggagagctgtgagtcgaacaaacccgaacaatggagagtttcggtttagtttggaaatccacgtaaatcatgaaaatagaggatttgaaattcatggagaagattatacagacattccactttcagatagtaacagagatcatactgcaaataggcaacaaaggtcaactagtcctgtggctaggcgaacaagaagccaaacctcagtgaatttcaatggtagtagttccaacattccaaggactaggcttgcttcaagggggcaaaatccagctgaaggatctttctcaacattgggaaggttaagaaatggaattgggggagcagctggcattcctcgagctaacgcttcacgcactaatttcagtagtcacacaaaccaatcaggtggtagtgaactcaggcaaagggaggggcaacggtttggagcagcacatgtttgggaaaatggggctagaagtaatgttacagtgaggaatacaaaccaaagattagagccaataagattacgatctacttccaatagtcgaagccgttcaccaattcagagacagagtggcactgtttatcataattcccaaagggaaagtagaccagtacagcaaaccactagaagatctgttaggaggagaggtagaactcgagtctttttagagcaagatagagaacgagaacgcagaggtactgcatataccccattctctaattcaaggcttgtgtcaagaataacagtagaagaaggagaagaatccagcagatcctcaactgctgtacgacgacatccaacaatcacactggaccttcaagtgagaaggatccgtcctggagaaaatagagatcgggatagtattgcaaatagaactcgatccagagtagggctagcagaaaatacagtcactattgaaagcaatagtgggggctttcgccgaaccatttctcgtttagagcggtcaggtattcgaacctatgttagtaccataacagttcctcttcgtaggatttctgagaatgagcttgttgagccatcatcagtggctcttcggtcaattttaaggcagatcatgactgggtttggagaactgagttctctaatggaggccgattctgagtcagaacttcaaagaaatggccagcatttaccagacatgcactcagaactgagtaacttaggtacagataacaacaggagccagcacagggaaggttcctctcaagacaggcaggcccaaggagacagcactgaaatgcatggtgaaaacgagaccacccagcctcatactcgaaacagtgacagtaggggtggcaggcagttgcgaaatccaaacaatttagttgaaactggaacactacccattcttcgccttgctcacttttttttactaaatgaaagtgatgatgatgatcgaatacgtggtttaaccaaagagcagattgacaatctttccaccaggcactatgagcataacagtattgatagtgaactaggtaaaatctgtagtgtttgtattagtgactatgtaactggaaacaagctcaggcaattaccttgcatgcatgaatttcacattcattgtattgaccgatggctctcagagaattgcacttgtccgatctgtcggcagcctgttttagggtctaacatagcaaacaatgggtaaggtgatgggatctactcaaatactgttttttagtagaactgaatgttcaagcattgttttgctgagttatttgtgattagctaaccaggatgaaaaataacagattatatatagtttgaactatttttcgtgtgcttttttaaacttgttaaaaagaaatttatataaaatttaaaatacaaatgttaaattatccagaaatacagaatagttaatattgctagaaccaaataacctctaaaatgtttttattttggtaattttgtcatgctaagcacttttgtatctgcacaattcagtaggttaagaatcaatcttctttttcttaatagtacagcagactttagcttcaagtttcataggcttagtacttatatctagacatttgtgtctaaataagcttttcattaactttttattttaaggacagtatcttttcatgaaagagtatttggctgaatgtttgctatatatatgttacttgaaatgttaaatttaatatgcagcataccataggtgtatatataggtatataattttaaggttaaaatattcagtctacaagtttggttcttatttaagcttttgggctaatactgcatatggcacaatgtttaatattggcaagttcatctcagagaaaggggattcagatataattttaaagtagagataatttactgaagcgtctctgacaatctaacttattagacagcaagcaatatataatactgaaaaagtattcagaaatggaaaatttacatcatataggttatttaacttgtgttcagcctttttgtaacttttttgaaagtgcaaacaattctttggattattaaataaggtatacagtatgcatggtttctcaaatttagttttaaaatctaaaagtctataaagaatcagatgcataggcaatatgttaagttcacttggaggctaaaaatctccagtgaaaacaaaacgaaaacctttaagagaatgtagagtttatataaacacaaagtatgcattgaagatctgtttctaccaataaacattaaaacaaa

SEQ ID NO: 26771 - DNA, 3867 bp, Homo sapiens
  source 1..3867: mol_type = unassigned DNA
gacagacttcagaatttattagggtttgtaatttccaggttccaaagcacagcaagggaaagggcctggctgggtagtacgttacacccggaagtaaagagacgcatacaccgttgggtgcactttatagtctggctggcaaacgagcgacaccgacgcgcagagttaagtgctgggacttcccaagcctggaaagcagaccgtgtctctgcaactacgcggctgccacgagcgctgagcggccgggcatttggcctcgaggaggaggcactgtaagggcggcgcaagagggcggaacgcgggacgccaggcaccctagctcccgacggacgcagttttcagttgcacgggcgagctccgggccggctgcggagcgactccccgccgccaagtgggcggcgtggctgtcgggaaagaagggctggggcctgccgttcttcctcccgagtatcccctccagctggacgaccccacgctgcagcacgggcttccggcttctctcctcagtggccaattcgagggcacagcgggctccggaggcgcggcggcaagcctatcccgcctcccaaccacagcctccagcacccgagagaacggccgcccacagcacacgttctccggacaggagggcgaaggcccaagacctggagagatgggcagctctcaaaaaaggcacaaacaattgaaggatggataccatggcatatgttaaaagcgtgttgaaaggaaaataagaaagccaggaatctcaggatgaatcagtctagatcgagatcagatggtggcagtgaagaaaccttacctcaagaccataatcatcatgaaaatgagagaagatggcagcaagagcgtctccacagagaagaggcctattatcagtttattaatgaactcaatgatgaagattatcggcttatgagagaccataatcttttaggcacccctggagaaataacatcagaagaactgcaacagcggttagatggcgtcaaggaacaactagcatctcagcctgacttgagagatggaacgaattacagagactcagaagtccctagagaaagttcacatgaagattctcttctagaatggttgaacacctttcggcgcacaggaaatgcaactcgaagtggacaaaatgggaaccaaacttggagagctgtgagtcgaacaaacccgaacaatggagagtttcggtttagtttggaaatccacgtaaatcatgaaaatagaggatttgaaattcatggagaagattatacagacattccactttcagatagtaacagagatcatactgcaaataggcaacaaaggtcaactagtcctgtggctaggcgaacaagaagccaaacctcagtgaatttcaatggtagtagttccaacattccaaggactaggcttgcttcaagggggcaaaatccagctgaaggatctttctcaacattgggaaggttaagaaatggaattgggggagcagctggcattcctcgagctaacgcttcacgcactaatttcagtagtcacacaaaccaatcaggtggtagtgaactcaggcaaagggaggggcaacggtttggagcagcacatgtttgggaaaatggggctagaagtaatgttacagtgaggaatacaaaccaaagattagagccaataagattacgatctacttccaatagtcgaagccgttcaccaattcagagacagagtggcactgtttatcataattcccaaagggaaagtagaccagtacagcaaaccactagaagatctgttaggaggagaggtagaactcgagtctttttagagcaagatagagaacgagaacgcagaggtactgcatataccccattctctaattcaaggcttgtgtcaagaataacagtagaagaaggagaagaatccagcagatcctcaactgctgtacgacgacatccaacaatcacactggaccttcaagtgagaaggatccgtcctggagaaaatagagatcgggatagtattgcaaatagaactcgatccagagtagggctagcagaaaatacagtcactattgaaagcaatagtgggggctttcgccgaaccatttctcgtttagagcggtcaggtattcgaacctatgttagtaccataacagttcctcttcgtaggatttctgagaatgagcttgttgagccatcatcagtggctcttcggtcaattttaaggcagatcatgactgggtttggagaactgagttctctaatggaggccgattctgagtcagaacttcaaagaaatggccagcatttaccagacatgcactcagaactgagtaacttaggtacagataacaacaggagccagcacagggaaggttcctctcaagacaggcaggcccaaggagacagcactgaaatgcatggtgaaaacgagaccacccagcctcatactcgaaacagtgacagtaggggtggcaggcagttgcgaaatccaaacaatttagttgaaactggaacactacccattcttcgccttgctcacttttttttactaaatgaaagtgatgatgatgatcgaatacgtggtttaaccaaagagcagattgacaatctttccaccaggcactatgagcataacagtattgatagtgaactaggtaaaatctgtagtgtttgtattagtgactatgtaactggaaacaagctcaggcaattaccttgcatgcatgaatttcacattcattgtattgaccgatggctctcagagaattgcacttgtccgatctgtcggcagcctgttttagggtctaacatagcaaacaatgggtaaggtgatgggatctactcaaatactgttttttagtagaactgaatgttcaagcattgttttgctgagttatttgtgattagctaaccaggatgaaaaataacagattatatatagtttgaactatttttcgtgtgcttttttaaacttgttaaaaagaaatttatataaaatttaaaatacaaatgttaaattatccagaaatacagaatagttaatattgctagaaccaaataacctctaaaatgtttttattttggtaattttgtcatgctaagcacttttgtatctgcacaattcagtaggttaagaatcaatcttctttttcttaatagtacagcagactttagcttcaagtttcataggcttagtacttatatctagacatttgtgtctaaataagcttttcattaactttttattttaaggacagtatcttttcatgaaagagtatttggctgaatgtttgctatatatatgttacttgaaatgttaaatttaatatgcagcataccataggtgtatatataggtatataattttaaggttaaaatattcagtctacaagtttggttcttatttaagcttttgggctaatactgcatatggcacaatgtttaatattggcaagttcatctcagagaaaggggattcagatataattttaaagtagagataatttactgaagcgtctctgacaatctaacttattagacagcaagcaatatataatactgaaaaagtattcagaaatggaaaatttacatcatataggttatttaacttgtgttcagcctttttgtaacttttttgaaagtgcaaacaattctttggattattaaataaggtatacagtatgcatggtttctcaaatttagttttaaaatctaaaagtctataaagaatcagatgcataggcaatatgttaagttcacttggaggctaaaaatctccagtgaaaacaaaacgaaaacctttaagagaatgtagagtttatataaacacaaagtatgcattgaagatctgtttctaccaataaacattaaaacaaagactgta

SEQ ID NO: 26772 - DNA, 1524 bp, Homo sapiens
  source 1..1524: mol_type = unassigned DNA
gaagcgttacttgaggctcggttgggaagagatgggcagctctcaaaaaaggcacaaacaattgaaggatggataccatggcatatgttaaaagcgtgttgaaaggaaaataagaaagccaggaatctcaggatgaatcagtctagatcgagatcagatggtggcagtgaagaaaccttacctcaagaccataatcatcatgaaaatgagagaagatggcagcaagagcgtctccacagagaagaggcctattatcagtttattaatgaactcaatgatgaagattatcggcttatgagagaccataatcttttaggcacccctggagaaataacatcagaagaactgcaacagcggttagatggcgtcaaggaacaactagcatctcagcctgacttgagagatggaacgaattacagagactcagaagtccctagagaaagttcacatgaagattctcttctagaatggttgaacacctttcggcgcacaggaaatgcaactcgaagtggacaaaatgggaaccaaacttggagagctgcttgtgtcaagaataacagtagaagaaggagaagaatccagcagatcctcaactgctgtacgacgacatccaacaatcacactggaccttcaagtgagaaggatccgtcctggagaaaatagagatcgggatagtattgcaaatagaactcgatccagagtagggctagcagaaaatacagtcactattgaaagcaatagtgggggctttcgccgaaccatttctcgtttagagcggtcaggtattcgaacctatgttagtaccataacagttcctcttcgtaggatttctgagaatgagcttgttgagccatcatcagtggctcttcggtcaattttaaggcagatcatgactgggtttggagaactgagttctctaatggaggccgattctgagtcagaacttcaaagaaatggccagcatttaccagacatgcactcagaactgagtaacttaggtacagataacaacaggagccagcacagggaaggttcctctcaagacaggcaggcccaaggagacagcactgaaatgcatggtgaaaacgagaccacccagcctcatactcgaaacagtgacagtaggggtggcaggcagttgcgaaatccaaacaatttagttgaaactggaacactacccattcttcgccttgctcacttttttttactaaatgaaagtgatgatgatgatcgaatacgtggtttaaccaaagagcagattgacaatctttccaccaggcactatgagcataacagtattgatagtgaactaggtaaaatctgtagtgtttgtattagtgactatgtaactggaaacaagctcaggcaattaccttgcatgcatgaatttcacattcattgtattgaccgatggctctcagagaattgcacttgtccgatctgtcggcagcctgttttagggtctaacatagcaaacaatgggtaaggtgatgggatctactcaaatactgttttttagtagaa

SEQ ID NO: 26773 - DNA, 1752 bp, Homo sapiens
  source 1..1752: mol_type = unassigned DNA
gtgacgtagggccccagcgcccgggccatggcggcggcggtggcgggagctgctgtctgagcagcggttgcggaccgagcgaacttggcccaggagcccgggcctagggagaggcgcggcggcggcgggagcgcgaacggctggagctggccttcttcgccttctcctcggctgtggagccctggtggggggtctgcgcccggtcaccatgacgacgccggcgaatgcccagaatgccagcaaaacgtgggaactgagtctgtatgagctgcaccggaccccgcaggaagccataatggatggcacagagattgctgtttcccctcggtcactgcattcagaactcatgtgccctatctgcctggacatgctgaagaatacgatgaccaccaaggagtgcctccacagattctgctctgactgcattgtcacagccctacggagcgggaacaaggagtgtcctacctgccgaaagaagctggtgtccaagcgatccctacggccagaccccaactttgatgccctgatctctaagatctatcctagccgggaggaatacgaggcccatcaagaccgagtgcttatccgcctgagccgcctgcacaaccagcaggcattgagctccagcattgaggaggggctacgcatgcaggccatgcacagggcccagcgtgtgaggcggccgataccagggtcagatcagaccacaacgatgagtgggggggaaggagagcccggggagggagaaggggatggagaagatgtgagctcagactccgcccctgactctgccccaggccctgctcccaagcgaccccgtggagggggcgcaggggggagcagtgtagggacagggggaggcggcactggtggggtgggtgggggtgccggttcggaagactctggtgaccggggagggactctgggagggggaacgctgggccccccaagccctcctggggcccccagccccccagagccaggtggagaaattgagctcgtgttccggccccaccccctgctcgtggagaagggagaatactgccagacgaggtatgtgaagacaactgggaatgccacagtggaccacctctccaagtacttggccctgcgcattgccctcgagcggaggcaacagcaggaagcaggggagccaggagggcctggagggggcgcctctgacaccggaggacctgatgggtgtggcggggagggtgggggtgccggaggaggtgacggtcctgaggagcctgctttgcccagcctggagggcgtcagtgaaaagcagtacaccatctacatcgcacctggaggcggggcgttcacgacgttgaatggctcgctgaccctggagctggtgaatgagaaattctggaaggtgtcccggccactggagctgtgctatgctcccaccaaggatccaaagtgaccccaccaggggacagccagaggaaggggaccatggggtatccctgtgtcctggtctatcaccccagcttctttgtcccccagtacccccagcccagccagccaataagaggacacaaatgaggacacgtggcttttatacaaagtatctatatgagattcttctatattgtacagagtggggcaaaacacgcccccatctgctgccttttctattgccctgcaacgtcccatctatacgaggtgttggagaaggtgaagaaccctcccattcacgcccgcctaccaacaacaaacgtgcttttttcctctttgaaacctgca

SEQ ID NO: 26774 - DNA, 1752 bp, Homo sapiens
  source 1..1752: mol_type = unassigned DNA
gtgacgtagggccccagcgcccgggccatggcggcggcggtggcgggagctgctgtctgagcagcggttgcggaccgagcgaacttggcccaggagcccgggcctagggagaggcgcggcggcggcgggagcgcgaacggctggagctggccttcttcgccttctcctcggctgtggagccctggtggggggtctgcgcccggtcaccatgacgacgccggcgaatgcccagaatgccagcaaaacgtgggaactgagtctgtatgagctgcaccggaccccgcaggaagccataatggatggcacagagattgctgtttcccctcggtcactgcattcagaactcatgtgccctatctgcctggacatgctgaagaatacgatgaccaccaaggagtgcctccacagattctgctctgactgcattgtcacagccctacggagcgggaacaaggagtgtcctacctgccgaaagaagctggtgtccaagcgatccctacggccagaccccaactttgatgccctgatctctaagatctatcctagccgggaggaatacgaggcccatcaagaccgagtgcttatccgcctgagccgcctgcacaaccagcaggcattgagctccagcattgaggaggggctacgcatgcaggccatgcacagggcccagcgtgtgaggcggccgataccagggtcagatcagaccacaacgatgagtgggggggaaggagagcccggggagggagaaggggatggagaagatgtgagctcagactccgcccctgactctgccccaggccctgctcccaagcgaccccgtggagggggcgcaggggggagcagtgtagggacagggggaggcggcactggtggggtgggtgggggtgccggttcggaagactctggtgaccggggagggactctgggagggggaacgctgggccccccaagccctcctggggcccccagccccccagagccaggtggagaaattgagctcgtgttccggccccaccccctgctcgtggagaagggagaatactgccagacgaggtatgtgaagacaactgggaatgccacagtggaccacctctccaagtacttggccctgcgcattgccctcgagcggaggcaacagcaggaagcaggggagccaggagggcctggagggggcgcctctgacaccggaggacctgatgggtgtggcggggagggtgggggtgccggaggaggtgatggtcctgaggagcctgctttgcccagcctggagggcgtcagtgaaaagcagtacaccatctacatcgcacctggaggcggggcgttcacgacgttgaatggctcgctgaccctggagctggtgaatgagaaattctggaaggtgtcccggccactggagctgtgctatgctcccaccaaggatccaaagtgaccccaccaggggacagccagaggaaggggaccatggggtatccctgtgtcctggtctatcaccccagcttctttgtcccccagtacccccagcccagccagccaataagaggacacaaatgaggacacgtggcttttatacaaagtatctatatgagattcttctatattgtacagagtggggcaaaacacgcccccatctgctgccttttctattgccctgcaacgtcccatctatacgaggtgttggagaaggtgaagaaccctcccattcacgcccgcctaccaacaacaaacgtgcttttttcctctttgaaacctgca

SEQ ID NO: 26775 - DNA, 1750 bp, Homo sapiens
  source 1..1750: mol_type = unassigned DNA
gacgtagggccccagcgcccgggccatggcggcggcggtggcgggagctgctgtctgagcagcggttgcggaccgagcgaacttggcccaggagcccgggcctagggagaggcgcggcggcggcgggagcgcgaacggctggagctggccttcttcgccttctcctcggctgtggagccctggtggggggtctgcgcccggtcaccatgacgacgccggcgaatgcccagaatgccagcaaaacgtgggaactgagtctgtatgagctgcaccggaccccgcaggaagccataatggatggcacagagattgctgtttcccctcggtcactgcattcagaactcatgtgccctatctgcctggacatgctgaagaatacgatgaccaccaaggagtgcctccacagattctgctctgactgcattgtcacagccctacggagcgggaacaaggagtgtcctacctgccgaaagaagctggtgtccaagcgatccctacggccagaccccaactttgatgccctgatctctaagatctatcctagccgggaggaatacgaggcccatcaagaccgagtgcttatccgcctgagccgcctgcacaaccagcaggcattgagctccagcattgaggaggggctacgcatgcaggccatgcacagggcccagcgtgtgaggcggccgataccagggtcagatcagaccacaacgatgagtgggggggaaggagagcccggggagggagaaggggatggagaagatgtgagctcagactccgcccctgactctgccccaggccctgctcccaagcgaccccgtggagggggcgcaggggggagcagtgtagggacagggggaggcggcactggtggggtgggtgggggtgccggttcggaagactctggtgaccggggagggactctgggagggggaacgctgggccccccaagccctcctggggcccccagccccccagagccaggtggagaaattgagctcgtgttccggccccaccccctgctcgtggagaagggagaatactgccagacgaggtatgtgaagacaactgggaatgccacagtggaccacctctccaagtacttggccctgcgcattgccctcgagcggaggcaacagcaggaagcaggggagccaggagggcctggagggggcgcctctgacaccggaggacctgatgggtgtggcggggagggtgggggtgccggaggaggtgacggtcctgaggagcctgctttgcccagcctggagggcgtcagtgaaaagcagtacaccatctacatcgcacctggaggcggggcgttcacgacgttgaatggctcgctgaccctggagctggtgaatgagaaattctggaaggtgtcccggccactggagctgtgctatgctcccaccaaggatccaaagtgaccccaccaggggacagccagaggaaggggaccatggggtatccctgtgtcctggtctatcaccccagcttctttgtcccccagtacccccagcccagccagccaataagaggacacaaatgaggacacgtggcttttatacaaagtatctatatgagattcttctatattgtacagagtggggcaaaacacgcccccatctgctgccttttctattgccctgcaacgtcccatctatacgaggtgttggagaaggtgaagaaccctcccattcacgcccgcctaccaacaacaaacgtgcttttttcctctttgaaacctgca

SEQ ID NO: 26776 - DNA, 1752 bp, Homo sapiens; identical to SEQ ID NO: 26773
  source 1..1752: mol_type = unassigned DNA

SEQ ID NO: 26777 - DNA, 1752 bp, Homo sapiens; identical to SEQ ID NO: 26773
  source 1..1752: mol_type = unassigned DNA

SEQ ID NO: 26778 - DNA, 1752 bp, Homo sapiens; identical to SEQ ID NO: 26774
  source 1..1752: mol_type = unassigned DNA

SEQ ID NO: 26779 - DNA, 3084 bp, Homo sapiens
  source 1..3084: mol_type = unassigned DNA
gcagtgcccgagccggcctcgttctggctgccgccgtctcgctgaggcggagtaggatgaggcccgcggccgtggctccggcgtcggcgggggcagcagcagctgaggcagcagctgaggcagccgcgacggccgcgcccccccccgctgacctggattaggcccagcagctccgtggccgccgccgccccgcgggggggcggggtggggaagtgcttcgtctccccgcccccccccccccatcgctgcctcgcaggaggcgaacgccgcgaccccagcggagcccgcggcccagccttgatcccccaaccccgggggctggcatgagcggcccctcggcggcaccgtggggcggtggagtcgcctccgcctgatccccggcctgtcgcccgaccccacctcgccaaccgaggcggaccgcggagtgtgcgaacgaccccaccgctgctttctcctcccccagatcacgcaccccagctccggaagatggggaactgcctcaaatcccccacctcggatgacatctccctgcttcacgagtctcagtccgaccgggctagctttggcgaggggacggagccggatcaggagccgccgccgccatatcaggaacaagttccagttccagtctaccacccaacacctagccagactcggctagcaactcagctgactgaagaggaacaaattaggatagctcaaagaataggtcttatacaacatctgcctaaaggagtttatgaccctggaagagatggatcagaaaaaaagatccgggagtgtgtgatctgtatgatggactttgtttatggggacccaattcgatttctgccgtgcatgcacatctatcacctggactgtatagatgactggttgatgagatccttcacgtgcccctcctgcatggagccagttgatgcagcactgctttcatcctatgagactaattgagccagggtctcttatctgacttcaagtgaaccaccattttggtggttttgatcttttgtcactgagcccaaagagccagggattaggaattaagatcgtgcacaaaagtttccttaaaattcctggatggctgcagatgttgggggaaaaagtacgtgatattttagaaacttagtgggaaaagtaggatggtatttttatgtaaagccttgacccaatgtttaaaaatataattgtatttagatcttgttattgctccagtacataggaattgtgtaaagtgttaacagcagctgtatttgtttaaattgtgtgtattgaagattaggaaaaagatagtagttatttttcctaaatgaaataactttcttctcttccccttccccacccgaattcttttctgaagttgctggcatttgggtcaaggttttattaaaagctacattttataacactggcacacacaaaaaagtagttttaagcttgtttgcacagttctttttttccattggaaatggaattcattgccttaggtctttttaaatagtgtattattatcgttggggctggctctatgcttgaaaaccagtttatttataacctgttataagtgctatattctgtttgcagttaggaaatgcagaattcaaagtgatctcctagcttgtaagcaaactgagatgcactatcccttttctataaaaaataagttaatgtgtcaagaaaccaactctattaaggtggggtttaatattaccctttcctatgtgttttatctaattattttggttgttaatatggtgataatggaaagtcaagttaaattttaaatattaagaattctgatttattgagattgaattatgccaccacgtttatgtaaaaatgaaggtggcaccgtggtgagacctaatgagaaatagttactcagttgtaaaaattttgatttattctctttcttctgacctccttgcctcttgtcttgaaccatagcaaaaggatactgcatctctcattactgtagtgctgaggttattgaagttatacaaaacacatctcagtctctgtttcttggaaaggtatctattacatcctgctagctgactgacaaaactaagcagggagaataaagataattgtattttatgttttgcacacaaacgcagaatttgtataaccatatgacttcatagttgtgatctcaaaaaagaaggaatttctcctttgtttcttgcagttaatgtaagaatactttaaatctctaagcttctgaagtgttagaggtagagatggtctagtaaagatgtagtagtaatgttttatccatttagcatgtgtttattttttcatatgtactcaaaggtgacttattggttcacctcagtgatattacagctaaaaaaatcattcattagcaaaaggaaaagtggtctcaacctaacatcagaagtgtttcttattattattttatattgagttgaatattgaactctaacagttttctacatacaaaacacagtgtcatgaaggttattcataattgcattatagaggaatgtagtatgtcataagtactttgtaaagatttgacattcaactgtagtatccatatgttgcttaaatttccttatgagccccatgatggaaagacttaaagatgaatttgagaaaaattgaaagaaattagattatcaggttctgttaaattgttacatgtatcttgcttaaatttctgtttattaatttatatccacccaagtacataaagcaaatttggaggaaacaactgaagttgtgcaatattttctgataattgctttttttattcttgtgttttctacttaaacataatgtctgtgtcatcaagtattatagtcagacttttctttttttctagattgttaaaattggcaaatgaacttttttaaaaatcatcttccatgttgcagttagtctttcttttcattacaagtctttcacagaagtttggtggtaatattgaaagaactagcattgggcagaatgtgtcttttttaggcactttatattctcaacatacaatgttaagaaccatcaattttgacttttactaagttgttaaataaagttataatacagctgtgaagggctaaa

SEQ ID NO: 26780 - DNA, 3212 bp, Homo sapiens
  source 1..3212: mol_type = unassigned DNA
gggtgagtccagcagcagcctcctctttcctgactgtcacatttcttttccagctctgaccgggagtcagctcctcggggataccatcccccgacctcaccttctacctaccgcagcctgctagcctttccgggagaaaaggcatccttacctctggttgaaggtctcggggcctccccctctgcatccggaccctctccccatcccagcctcccatgccaaggcccgccttgtcagtcacttccttttgtcatcggcttggcaaacgggagagaaaacagagcttcatgggaaacagcggcaacagttggtcccatacacctttccccaagttggagctaggcctggggccccagcccatggcgccccgggagctccctacctgctccatctgcctggagaggttgcgcgaccccatctcgctggactgtggccacgacttctgcatacggtgcttcagcacacaccgtctcccgggctgtgagccgccctgctgtcctgagtgccggaagatatgcaagcagaagaggggcctccggagcctgggcgagaagatgaagctcctgccgcagcggccgctgccccctgcactgcaggagacgtgtcctgtgagggcggagccgctgctgctggttcgcatcaatgcctctgggggcctcatccttaggatgggggccatcaaccgctgcctgaagcaccctctggccagggacaccccagtctgcctcctcgctgtcctgggggagcagcactcagggaagtccttcctcctcaaccatttgcttcagggcttgccgggcctggagtctggtgagggcggccggccaagaggaggagaggcatccctgcagggctgcaggtggggcgccaatggcctcgccaggggcatatggatgtggagccaccccttcttgctggggaaagaagggaagaaggtggcggtgttcctggtggacacaggggatgccatgagccctgagctgagcagggaaacaaggatcaagctctgtgctctcaccacgatgctgagctcctaccagatcctcagcacctcccaggagctgaaggatacagacctggactatctggagatgtttgtccacgtggccgaggtgatgggcaagcattatgggatggtgccaatccagcatctggacctcttagttcgtgactcatcccaccccaacaaggcagggcaggggcatgtaggcaacatcttccagagattgtctggcagataccccaaggtgcaggagctgctgcaagggaagcgagcccgttgctgcctcttgcctgccccagggaggcggcggatgaaccaaggccatgcaagccctggtgacacagatgatgacttccgccaccttctgggggcctacgtctcagatgtgctgagtgcggccccccagcacgctaagagccgctgccaggggtactggaacgaggggcgcgccgtggccaggggggacagacgcctactcacggggcagcagctagctcaggaaatcaagaacctctcaggatggatggggaggacagggcccggtttcacctctccggatgagatggctgctcagctgcacgacctgaggaaggtggaagctgccaagagggagttcgaggagtatgtgaggcagcaggacgtagccaccaagcgcatattctctgcgctgcgggtcctgccagacaccatgcggaacctcctctccacccagaaagatgccattctggcccgccatggtgtggccttactctgcaaggggagagatcagaccttggaggcactggaagctgagctgcaggccacggccaaggccttcatggactcctacacgatgcgcttctgtggccacctagctgctgtggggggtgctgtgggggccgggctcatgggcctggcagggggcgtggtgggtgctggcatggcagcagctgcactggctgcagaggctgggatggtggctgctggagctgccgtgggggccacaggggccgctgtggttgggggtggcgtgggtgctgggttggctgccacagtgggctgcatggagaaggaggaggatgagaggcttctggaaggggaccgagagccccttctccaggaagagtaacagccccaggaggtattgaaggacaggagagatgtcaggtggggatgaagaagaggggcaggtcgggggagggtgatgccagggattccaaggcaccgccatgtactgcactgccctggtcgaatgctcggtgtctgggtggcagctgagctgggactcaaggtggctcttggaacctgggaggcagcatctgggggcagtggatagaacacccggcctgtttctggttgcagatggttgccgatctgcccttgtcacagataggctacatcccagggtttctggctgcaagtgagactccaccctccccacctggctcatttccccgatgaccctggattgtaggaaagttaagcaggcaccatcctggaagtctacccctaggtggtcgagagacctgttctttcacagatgtgagaagccccaggatgattgaccatggtgttcaggagcggggagcactgatgaggtgctggggatgacaggaaggaaggaacactgggcagaaccagagagatgggacatggtagactgtggcccagaccccagagcagagaaacttgttcccatgacccttcccaaatctgctccagcaggactaaggtggctttcccactcctggcccacagccccagagagcctgtctgtgcatcctgaaccactctttgctgggcctccgcaagggcctctcttgggtctgtgtcctttttcaagcctgtttagatgggggagtgcccatgccctctgtgaagtgcccaaatgcgaaagaataacaccttttcttgcattctgagctaagccagacagcctttatactagattctatcaaaatcttgcaaaggaaaacaaaatgaacaacttctacccttaaacacatcctttctcccctgggcttgtaagaagatgcagcttgatgcagctcctcaaacaccaggccccctgggaactgggggtgcgggagttctccctctgggggacagaaaatctgactactaggaagacttctaggctatgaaactgacttctaggctatgaaacttacagggtatgggtgggcacattatcctttattttatgaaaaataaaatgtgtgtatgtgaa

SEQ ID NO: 26781 - DNA, 2440 bp, Homo sapiens
  source 1..2440: mol_type = unassigned DNA
agatggcggcgcaacagcgggactgcgggggtgctgcgcagctggcggggccggcggcggaggctgaccccctaggacgcttcacgtgtcccgtgtgcttagaggtgtacgagaagccggtacaggtgccctgcggacacgtcttttgctctgcatgcctgcaggaatgtctgaagccgaagaagcctgtctgtggggtgtgtcgcagcgctctggcacctggcgtccgagccgtggagctcgagcggcagatcgagagcacagagacttcttgccatggctgccgtaagaatttcttcctgtccaagatccggtcccacgtggctacttgttccaaataccagaattacatcatggaaggtgtgaaggccaccattaaggatgcatctcttcagccaaggaatgttccaaaccgttacacctttccttgtccttactgtcctgagaagaactttgatcaggaaggacttgtggaacactgcaaattattccatagcacggataccaaatctgtggtttgtccgatatgtgcctcgatgccctggggagaccccaactaccgcagcgccaacttcagagagcacatccagcgccggcaccggttttcttatgacacttttgtggattatgatgttgatgaagaggacatgatgaatcaggtgttgcagcgctccatcatcgaccagtgagcagagtccgtgcttgctatctgtctcatgttacagagcttccattacatattaaacgtgaaatctatgactcctgtaccttacctgttcaacagacctgaaaatgagccatggcattgggacagggtcacttctgacaggggaagtgggtccccaggtcagcccttctcttccctttgggctcttgccaaagctgtcttcccctactgttaaccttgtttgtcacacggtcgagttcgtattggttctcggctacttcctggagcttctgccgcctcctgtggaagataatctagcttctccacctcttgtttcacactcattcctcccatccagtgtttgtctctcgggtccttcaagccagccaggaccttttctgggtcatgaatagcacaatgaagcaagtgtctcctttccttgtccccaaggtgtgcagactttggcagccgtgcacctgaccagagctgaagctcccgctgggctgtggggttgccagaagctggggttgccatcccggggtacatgtcaccagtcctcttggggttttgtaccatctgatgctggaagttttgattagtgatattttctactactacatatttagagttcactggttcagtcttaaatgcctgcatggtgcctttttaggataaggtataaccatacatttttggtggaagtgtttctgggttagggaagttaaagtctgtttatccgtaagtggggaggagggtcagctaagagaagtgggagggccagagctttttggttctgatttacaaattaatgaagtagtttcaaacaacgcggtcatgtttacctctccatttgggagcctgcctacattcttgttctagaagcacaaaaaatcctcagatgaattagaagaaagaggtttggggactcagcggatactagttcttttaccttctgcttggtaacttagattaaactgagcattgtttttctgtcacaaatgttttccttatgacactggtttcgacatgtaaaatgtgtttgaaaacctgctttgtagatgcagagagaagctataggaaacccagtaccacccctggtctgttctgacgagacatcgttcataaggcacagcacatcgcaagatgaacagttgttaataaaagctgttgctggaaacttgctttaggaacagctcaagaaccttggagttcatatttcacaaatattaataaatataagtccaagagctgtcagcctaatctgtaggagcagaacctctgattgaccaaaaggcatatgggtttaggttggttttttgatgtcatatgtctctgatggggctgcaagtgctacctcgcgcttgtacactgctgctgtggggctccgcgcctgccggtgaagagctgcagatgccgagaagccagcaaacacagggcccactggaaaaaaatagttttttcattagtatttctcgggaggacccaaaagttaaggtcagcttgttcactgtaatttctggaagaagttcactcagaccttcctgaattcagatcatctcagaagtctggagggaaatctggcgaaaccttcgtttgagggactgatgtgagtgtatgtccacctcactggtggcaccgagaaacttacttccttgtattaagtgcacttcttgtatttctaataagatgactttccagaaagtgagatttgttatgttctggcttttaaaaggtaaaatataaataaatttcataacttaatctaagtggtaa

SEQ ID NO: 26782 - DNA, 581 bp, Homo sapiens
  source 1..581: mol_type = unassigned DNA
gcaagatggcggcgcaacagcgggactgcgggggtgctgcgcagctggcggggccggcggcggaggctgaccccctaggacgcttcacgtgtcccgtgtgcttagaggtgtacgagaagccggtacaggtgccctgcggacacgtcttttgctctgcatgcctgcaggaatgtctgaagccgaagaagcctgtctgtggggtgtgtcgcagcgctctggcacctggcgtccgagccgtggagctcgagcggcagatcgagagcacagagacttcttgccatggctgccgtaagaatttcttcctgtccaagatccggtcccacgtggctacttgttccaaataccagaattacatcatggaaggtgtgaaggccaccattaaggatgcatctcttcagccaaggaatgttccaaaccgttacacctttccttgtccttactgtcctgagaagaactttgatcaggaaggacttgtggaacactgcaaattattccatagcacggataccaaatctgtgaccagtgagcagagtccgtgcttgctatctgtctcatgttacagagcttccattacatattaa

SEQ ID NO: 26783 - DNA, 2817 bp, Homo sapiens
  source 1..2817: mol_type = unassigned DNA
gcttcacgctaaagccccagagcccgacgcggcagccgcggtagcggagaagactggagctccgaggagctgcatctgcggcaacctgtgtgctgacgctacgtgcctcctggctccgacgtagctcgcagctccccagtctcactccattccttccccacctggcgcgcacctgctcaagaccagggtcctgccaagcgctaggagggcgcgtgccaggggcgctagggaactgcggagcgcgcgcgccatggggccgccgcctggggccggggtctcctgccgcggtggctgcggcttttccagattgctggcatggtgcttcctgctggccctgagtccgcaggcacccggttcccggggggctgaagcagtgtggaccgcgtacctcaacgtgtcctggcgggttccgcacacgggagtgaaccgtacggtgtgggagctgagcgaggagggcgtgtacggccaggactcgccgctggagcctgtggctggggtcctggtaccgcccgacgggcccggggcgcttaacgcctgtaacccgcacacgaatttcacggtgcccacggtttggggaagcaccgtgcaagtctcttggttggccctcatccaacgcggcgggggctgcaccttcgcagacaagatccatctggcttatgagagaggggcgtctggagccgtcatctttaacttccccgggacccgcaatgaggtcatccccatgtctcacccgggtgcagtagacattgttgcaatcatgatcggcaatctgaaaggcacaaaaattctgcaatctattcaaagaggcatacaagtgacaatggtcatagaagtagggaaaaaacatggcccttgggtgaatcactattcaatttttttcgtttctgtgtccttttttattattacggcggcaactgtgggctattttatcttttattctgctcgaaggctacggaatgcaagagctcaaagcaggaagcagaggcaattaaaggcagatgctaaaaaagctattggaaggcttcaactacgcacactgaaacaaggagacaaggaaattggccctgatggagatagttgtgctgtgtgcattgaattgtataaaccaaatgatttggtacgcatcttaacgtgcaaccatattttccataagacatgtgttgacccatggctgttagaacacaggacttgccccatgtgcaaatgtgacatactcaaagctttgggaattgaggtggatgttgaagatggatcagtgtctttacaagtccctgtatccaatgaaatatctaatagtgcctcctcccatgaagaggataatcgcagcgagaccgcatcatctggatatgcttcagtacagggaacagatgaaccgcctctggaggaacacgtgcagtcaacaaatgaaagtctacagctggtaaaccatgaagcaaattctgtggcagtggatgttattcctcatgttgacaacccaacctttgaagaagacgaaactcctaatcaagagactgctgttcgagaaattaaatcttaaaatctgtgtaaatagaaaacttgaaccattagtaataacagaactgccaatcagggcctagtttctattaataaattggataaatttaataaaataagagtgatactgaaagtgctcagatgactaatattatgctatagttaaatggcttaaaatatttaacctgttaacttttttccacaaactcattataatatttttcataggcaagtttcctctcagtagtgataacaacatttttagacattcaaaactgtcttcaagaagtcacgtttttcatttataacaattttcttataaaaacatgttgcttttaaaatgtggagtagctgtaatcactttattttatgatagtatcttaatgaaaaatactacttctttagcttgggctacatgtgtcagggtttttctccaggtgcttatattgatctggaattgtaatgtaaaaagcaatgcaaacttaggcgagtacttcttgaaatgtctatttaagctgctttaagttaatagaaaagattaaagcaaaatattcatttttactttttcttatttttaaaattaggctgaatgtacttcatgtgatttgtcaaccatagtttatcagagattatggacttaattgattggtatattagtgacatcaacttgacacaagattagacaaaaaattccttacaaaaatactgtgtaactatttctcaaacttgtgggatttttcaaaagctcagtatatgaatcatcatactgtttgaaattgctaatgacagagtaagtaacactaatattggtcattgatcttcgttcatgaattagtctacagaaaaaaaatgttctgtaaaattagtctgttgaaaatgttttccaaacaatgttactttgaaaattgagtttatgtttgacctaaatgggctaaaattacattagataaactaaaattctgtccgtgtaactataaattttgtgaatgcattttcctggtgtttgaaaaagaagggggggagaattccaggtgccttaatataaagtttgaagcttcatccaccaaagttaaatagagctatttaaaaatgcactttatttgtactctgtgtggcttttgttttagaattttgttcaaattatagcagaatttaggcaaaaataaaacagacatgtatttttgtttgctgaatggatgaaaccattgcattcttgtacactgatttgaaatgctgtaaatatgtcccaatttgtattgattctctttaaatataaaatgtaaataaaatattccaataaaa

SEQ ID NO: 26784 - DNA, 2654 bp, Homo sapiens
  source 1..2654: mol_type = unassigned DNA
atagagctgatgtatccagaggttatgttgctagaggtgagatcagttacctacgtgcaactgaaatttcaaacttctgttcagcagggacgtgagtggacaatggtgactgatagttggaaatatcagcaaacatcttaaattttatactcaaatgaatgagcaatgaaccaggagaataggtccagttttttttggctccttgtaatttttacctttttacttaaaattacagcatctttttcaatgagtgcctatgtgactgtgacttattacaatgaaaccagcaactacactgcaatagagacatgtgaatgtggcgtttatggattagcttcaccagtggctaatgctatgggagtggtaggcatccctaagaacaataactaccaagcttgtgaccacaacactgagtttagtaatactaagaagccctggattgcgctgatagaaagaggtaattgtacattttcagaaaaaattcaaacagcgggcagaagaaatgctgatgctgttgtgatttacaatgctccagagactggcaatcagacgatacagatggcaaattttggtgcagtagacattgttgcaatcatgatcggcaatctgaaaggcacaaaaattctgcaatctattcaaagaggcatacaagtgacaatggtcatagaagtagggaaaaaacatggcccttgggtgaatcactattcaatttttttcgtttctgtgtccttttttattattacggcggcaactgtgggctattttatcttttattctgctcgaaggctacggaatgcaagagctcaaagcaggaagcagaggcaattaaaggcagatgctaaaaaagctattggaaggcttcaactacgcacactgaaacaaggagacaaggaaattggccctgatggagatagttgtgctgtgtgcattgaattgtataaaccaaatgatttggtacgcatcttaacgtgcaaccatattttccataagacatgtgttgacccatggctgttagaacacaggacttgccccatgtgcaaatgtgacatactcaaagctttgggaattgaggtggatgttgaagatggatcagtgtctttacaagtccctgtatccaatgaaatatctaatagtgcctcctcccatgaagaggataatcgcagcgagaccgcatcatctggatatgcttcagtacagggaacagatgaaccgcctctggaggaacacgtgcagtcaacaaatgaaagtctacagctggtaaaccatgaagcaaattctgtggcagtggatgttattcctcatgttgacaacccaacctttgaagaagacgaaactcctaatcaagagactgctgttcgagaaattaaatcttaaaatctgtgtaaatagaaaacttgaaccattagtaataacagaactgccaatcagggcctagtttctattaataaattggataaatttaataaaataagagtgatactgaaagtgctcagatgactaatattatgctatagttaaatggcttaaaatatttaacctgttaacttttttccacaaactcattataatatttttcataggcaagtttcctctcagtagtgataacaacatttttagacattcaaaactgtcttcaagaagtcacgtttttcatttataacaattttcttataaaaacatgttgcttttaaaatgtggagtagctgtaatcactttattttatgatagtatcttaatgaaaaatactacttctttagcttgggctacatgtgtcagggtttttctccaggtgcttatattgatctggaattgtaatgtaaaaagcaatgcaaacttaggcgagtacttcttgaaatgtctatttaagctgctttaagttaatagaaaagattaaagcaaaatattcatttttactttttcttatttttaaaattaggctgaatgtacttcatgtgatttgtcaaccatagtttatcagagattatggacttaattgattggtatattagtgacatcaacttgacacaagattagacaaaaaattccttacaaaaatactgtgtaactatttctcaaacttgtgggatttttcaaaagctcagtatatgaatcatcatactgtttgaaattgctaatgacagagtaagtaacactaatattggtcattgatcttcgttcatgaattagtctacagaaaaaaaatgttctgtaaaattagtctgttgaaaatgttttccaaacaatgttactttgaaaattgagtttatgtttgacctaaatgggctaaaattacattagataaactaaaattctgtccgtgtaactataaattttgtgaatgcattttcctggtgtttgaaaaagaagggggggagaattccaggtgccttaatataaagtttgaagcttcatccaccaaagttaaatagagctatttaaaaatgcactttatttgtactctgtgtggcttttgttttagaattttgttcaaattatagcagaatttaggcaaaaataaaacagacatgtatttttgtttgctgaatggatgaaaccattgcattcttgtacactgatttgaaatgctgtaaatatgtcccaatttgtattgattctctttaaatataaaatgtaaataaaatattccaataaaa

SEQ ID NO: 26785 - DNA, 839 bp, Homo sapiens
  source 1..839: mol_type = unassigned DNA
tggaggaggggcaagcaaaggggaatgtagataactaaagtgaaatagagctgatgtatccagaggttatgttgctagagcatctttttcaatgagtgcctatgtgactgtgacttattacaatgaaaccagcaactacactgcaatagagacatgtgaatgtggcgtttatggattagcttcaccagtggctaatgctatgggagtggtaggcatccctaagaacaataactaccaagcttgtgaccacaacactgagtttagtaatactaagaagccctggattgcgctgatagaaagaggtaattgtacattttcagaaaaaattcaaacagcgggcagaagaaatgctgatgctgttgtgatttacaatgctccagagactggcaatcagacgatacagatggcaaattttggtgcagtagacattgttgcaatcatgatcggcaatctgaaaggcacaaaaattctgcaatctattcaaagaggcatacaagtgacaatggtcatagaagtagggaaaaaacatggcccttgggtgaatcactattcaatttttttcgtttctgtgtccttttttattattacggcggcaactgtgggctattttatcttttattctgctcgaaggctacggaatgcaagagctcaaagcaggaagcagaggcaattaaaggcagatgctaaaaaagctattggaaggcttcaactacgcacactgaaacaaggagacaaggaaattggccctgatggagatagttgtgctgtgtgcattgaattgtataaaccaaatgatttggtacgcatcttaacgtgcaaccatattttccataagacat

SEQ ID NO: 26786 - DNA, 1905 bp, Homo sapiens
  source 1..1905: mol_type = unassigned DNA
gagactcgcccggctcaaccccgacgtccgcgccccggccgcctgttggccatggcgggcctgggcctgggctccgccgttcccgtgtggctggccgaggacgacctcggctgcatcatctgccaggggctgctggactggcccgccacgctgccctgcggccacagcttctgccgccactgcctggaggccctgtggggcgcccgcgacgcccgccgctgggcctgccccacttgccgccagggcgccgcgcagcagccgcacctgcggaagaacacgctactgcaggacctggccgacaagtaccgccgcgccgcacgcgagatacaggcgggctccgaccctgcccactgcccctgcccgggctccagttccctctccagcgcggccgcgaggccccggcgccgcccggaactgcagcgggtggcagtagagaagagcatcacagaagttgctcaggagctgacagagctggtggaacatcttgtagacattgtcagaagcctgcagaatcagaggcccctatcagaatctggaccagacaacgaactgagcatcctgggcaaggagaactcctggaagccccgtcttcctcctcatgcccattgcctgaccagagccaccctgcactcaggagagcttctcggtttgctcagtgggccatccatccaacctttaacttgaagagcctttcctgcagcctggaggtgtccaaggattcccgtacagtgactgtgtctcaccgcccacaaccctatcgctggagctgtgagaggttttctaccagccaggtcttatgttcccaggccctgtcttctggaaagcattactgggaagtggacactaggaattgcagccactgggcagttggggtggcttcctgggagatgagccgcgaccaggtcctgggaaggactatggactcttgttgtgtggaatggaaggggactagccagctctctgcatggcacatggtcaaggaaactgtccttggctcagacagacctggggtggtgggcatctggctgaaccttgaggagggaaagcttgccttctattcagtggacaatcaggagaagcttctgtatgagtgtaccatctctgcctcctctcctttgtaccctgccttctggctgtatggcttacatcctggaaattacctgataataaagcaagtaaaggtgtaaggtttcctaagggattacaacacagtggtttcctggtctctctccctgtcatcaatcagggtagtaacttgacttaagaataccactttttagaaaaattacgatagagatgggatctcactaggttgcccaggctggtgtcgaattcctggtctcaagcagtcctcccacctcagcctcccaaggtgctgggattacaggtgtgagccaccacacctggccaagaataccacttttgaagttaatccttttgtgtgatacaggatgaacttgggatgtttgaaccctggacattccaaataaagaataggcccctgcctggctcctgggagataacctctaagccattagaatatcttgcctgataagagtgtttttgtttacctgtgggccttgggccatgcagtatcagcttgaccttgcaaggtcaagctgaggagactaagttagccatgtgggcagtgaagcatgccaatgtgatcaatccctagtaaaagccctggacacctaggcatgggtgagctactctggttggtaatactctgtgcacacatcattgtagccacacatcattgctgggagaattaagcattatcctgaagactctgccaggagaggataattggaagttctcttggaccttaccttatgtgcctttcttcattgctgattttaatctgtatcctttcactgtaataaactgtaactatgagtgcaa

SEQ ID NO: 26787 - DNA, 2070 bp, Homo sapiens
  source 1..2070: mol_type = unassigned DNA
gagactcgcccggctcaaccccgacgtccgcgccccggccgcctgttggccatggcgggcctgggcctgggctccgccgttcccgtgtggctggccgaggacgacctcggctgcatcatctgccaggggctgctggactggcccgccacgctgccctgcggccacagcttctgccgccactgcctggaggccctgtggggcgcccgcgacgcccgccgctgggcctgccccacttgccgccagggcgccgcgcagcagccgcacctgcggaagaacacgctactgcaggacctggccgacaagtaccgccgcgccgcacgcgagatacaggcgggctccgaccctgcccactgcccctgcccgggctccagttccctctccagcgcggccgcgaggccccggcgccgcccggaactgcagcgggtggcagtagagaagagcatcacagaagttgctcaggagctgacagagctggtggaacatcttgtagacattgtcagaagcctgcagaatcagaggcccctatcagaatctggaccagacaacgaactgagcatcctgggcaaggctttttcttctggggtggatctttccatggcttctccaaagctggtgacttccgacacagctgcagggaaaatcagagatattctccatgacctagaagaaattcaggaaaaattacaagaaagcgtcacctggaaagaggctcctgaagcacaaatgcagggagaactcctggaagccccgtcttcctcctcatgcccattgcctgaccagagccaccctgcactcaggagagcttctcggtttgctcagtgggccatccatccaacctttaacttgaagagcctttcctgcagcctggaggtgtccaaggattcccgtacagtgactgtgtctcaccgcccacaaccctatcgctggagctgtgagaggttttctaccagccaggtcttatgttcccaggccctgtcttctggaaagcattactgggaagtggacactaggaattgcagccactgggcagttggggtggcttcctgggagatgagccgcgaccaggtcctgggaaggactatggactcttgttgtgtggaatggaaggggactagccagctctctgcatggcacatggtcaaggaaactgtccttggctcagacagacctggggtggtgggcatctggctgaaccttgaggagggaaagcttgccttctattcagtggacaatcaggagaagcttctgtatgagtgtaccatctctgcctcctctcctttgtaccctgccttctggctgtatggcttacatcctggaaattacctgataataaagcaagtaaaggtgtaaggtttcctaagggattacaacacagtggtttcctggtctctctccctgtcatcaatcagggtagtaacttgacttaagaataccactttttagaaaaattacgatagagatgggatctcactaggttgcccaggctggtgtcgaattcctggtctcaagcagtcctcccacctcagcctcccaaggtgctgggattacaggtgtgagccaccacacctggccaagaataccacttttgaagttaatccttttgtgtgatacaggatgaacttgggatgtttgaaccctggacattccaaataaagaataggcccctgcctggctcctgggagataacctctaagccattagaatatcttgcctgataagagtgtttttgtttacctgtgggccttgggccatgcagtatcagcttgaccttgcaaggtcaagctgaggagactaagttagccatgtgggcagtgaagcatgccaatgtgatcaatccctagtaaaagccctggacacctaggcatgggtgagctactctggttggtaatactctgtgcacacatcattgtagccacacatcattgctgggagaattaagcattatcctgaagactctgccaggagaggataattggaagttctcttggaccttaccttatgtgcctttcttcattgctgattttaatctgtatcctttcactgtaataaactgtaactatgagtgcaaca

SEQ ID NO: 26788 - DNA, 251 bp, Homo sapiens
  source 1..251: mol_type = unassigned DNA
ggaaagaggctcctgaagcacaaatgcagggttctctgttgcccaggctggagtgcagtggcacaatcactgcagcctcgatctctcaggctcaggagaactcctggaagccccgtcttcctcctcatgcccattgcctgaccagagccaccctgcactcaggagagcttctcggtttgctcagtgtccctccacggggggagctgattgcaaaggcaaagcaggttgagactctagacccaagagcactc

SEQ ID NO: 26789 - DNA, 624 bp, Homo sapiens
  source 1..624: mol_type = unassigned DNA
gcgcagcagccgcacctgcggaagaacacgctactgcaggacctggccgacaagtaccgccgcgccgcacgcgagatacaggcgggctccgaccctgcccactgcccctgcccgggctccagttccctctccagcgcggccgcgaggccccggcgccgcccggaactgcagcgggagaactcctggaagccccgtcttcctcctcatgcccattgcctgaccagagccaccctgcactcaggagagcttctcggtttgctcagtgggccatccatccaacctttaacttgaagagcctttcctgcagcctggaggtgtccaaggattcccgtacagtgactgtgtctcaccgcccacaaccctatcgctggagctgtgagaggttttctaccagccaggtcttatgttcccaggccctgtcttctggaaagcattactgggaagtggacactaggaattgcagccactgggcagttggggtggcttcctgggagatgagccgcgaccaggtcctgggaaggactatggactcttgttgtgtggaatggaaggggactagccagctctctgcatggcacatggtcaaggaaactgtccttggctcagacagacctggggtggtgg

SEQ ID NO: 26790 - DNA, 2094 bp, Homo sapiens
  source 1..2094: mol_type = unassigned DNA
gccgcctgttggccatggcgggcctgggcctgggctccgccgttcccgtgtggctggccgaggacgacctcggctgcatcatctgccaggggctgctggactggcccgccacgctgccctgcggccacagcttctgccgccactgcctggaggccctgtggggcgcccgcgacgcccgccgctgggcctgccccacttgccgccagggcgccgcgcagcagccgcacctgcggaagaacacgctactgcaggacctggccgacaagtaccgccgcgccgcacgcgagatacaggcgggctccgaccctgcccactgcccctgcccgggctccagttccctctccagcgcggccgcgaggccccggcgccgcccggaactgcagcgggtggcagtagagaagagcatcacagaagttgctcaggagctgacagagctggtggaacatcttgtagacattgtcagaagcctgcagaatcagaggcccctatcagaatctggaccagacaacgaactgagcatcctgggcaaggctttttcttctggggtggatctttccatggcttctccaaagctggtgacttccgacacagctgcagggaaaatcagagatattctccatgacctagaagaaattcaggaaaaattacaagaaagcgtcacctggaaagaggctcctgaagcacaaatgcagggttctctgttgcccaggctggagtgcagtggcacaatcactgcagcctcgatctctcaggctcaggagaactcctggaagccccgtcttcctcctcatgcccattgcctgaccagagccaccctgcactcaggagagcttctcggtttgctcagtgggccatccatccaacctttaacttgaagagcctttcctgcagcctggaggtgtccaaggattcccgtacagtgactgtgtctcaccgcccacaaccctatcgctggagctgtgagaggttttctaccagccaggtcttatgttcccaggccctgtcttctggaaagcattactgggaagtggacactaggaattgcagccactgggcagttggggtggcttcctgggagatgagccgcgaccaggtcctgggaaggactatggactcttgttgtgtggaatggaaggggactagccagctctctgcatggcacatggtcaaggaaactgtccttggctcagacagacctggggtggtgggcatctggctgaaccttgaggagggaaagcttgccttctattcagtggacaatcaggagaagcttctgtatgagtgtaccatctctgcctcctctcctttgtaccctgccttctggctgtatggcttacatcctggaaattacctgataataaagcaagtaaaggtgtaaggtttcctaagggattacaacacagtggtttcctggtctctctccctgtcatcaatcagggtagtaacttgacttaagaataccactttttagaaaaattacgatagagatgggatctcactaggttgcccaggctggtgtcgaattcctggtctcaagcagtcctcccacctcagcctcccaaggtgctgggattacaggtgtgagccaccacacctggccaagaataccacttttgaagttaatccttttgtgtgatacaggatgaacttgggatgtttgaaccctggacattccaaataaagaataggcccctgcctggctcctgggagataacctctaagccattagaatatcttgcctgataagagtgtttttgtttacctgtgggccttgggccatgcagtatcagcttgaccttgcaaggtcaagctgaggagactaagttagccatgtgggcagtgaagcatgccaatgtgatcaatccctagtaaaagccctggacacctaggcatgggtgagctactctggttggtaatactctgtgcacacatcattgtagccacacatcattgctgggagaattaagcattatcctgaagactctgccaggagaggataattggaagttctcttggaccttaccttatgtgcctttcttcattgctgattttaatctgtatcctttcactgtaataaactgtaactatgagtgc

SEQ ID NO: 26791 - DNA, 1946 bp, Homo sapiens
  source 1..1946: mol_type = unassigned DNA
gttggccatggcgggcctgggcctgggctccgccgttcccgtgtggctggccgaggacgacctcggctgcatcatctgccaggggctgctggactggcccgccacgctgccctgcggccacagcttctgccgccactgccgcacctgcggaagaacacgctactgcaggacctggccgacaagtaccgccgcgccgcacgcgagatacaggcgggctccgaccctgcccactgcccctgcccgggctccagttccctctccagcgcggccgcgaggccccggcgccgcccggaactgcagcgggtggcagtagagaagagcatcacagaagttgctcaggagctgacagagctggtggaacatcttgtagacattgtcagaagcctgcagaatcagaggcccctatcagaatctggaccagacaacgaactgagcatcctgggcaaggctttttcttctggggtggatctttccatggcttctccaaagctggtgacttccgacacagctgcagggaaaatcagagatattctccatgacctagaagaaattcaggaaaaattacaagaaagcgtcacctggaaagaggctcctgaagcacaaatgcagggagaactcctggaagccccgtcttcctcctcatgcccattgcctgaccagagccaccctgcactcaggagagcttctcggtttgctcagtgggccatccatccaacctttaacttgaagagcctttcctgcagcctggaggtgtccaaggattcccgtacagtgactgtgtctcaccgcccacaaccctatcgctggagctgtgagaggttttctaccagccaggtcttatgttcccaggccctgtcttctggaaagcattactgggaagtggacactaggaattgcagccactgggcagttggggtggcttcctgggagatgagccgcgaccaggtcctgggaaggactatggactcttgttgtgtggaatggaaggggactagccagctctctgcatggcacatggtcaaggaaactgtccttggctcagacagacctggggtggtgggcatctggctgaaccttgaggagggaaagcttgccttctattcagtggacaatcaggagaagcttctgtatgagtgtaccatctctgcctcctctcctttgtaccctgccttctggctgtatggcttacatcctggaaattacctgataataaagcaagtaaaggtgtaaggtttcctaagggattacaacacagtggtttcctggtctctctccctgtcatcaatcagggtagtaacttgacttaagaataccactttttagaaaaattacgatagagatgggatctcactaggttgcccaggctggtgtcgaattcctggtctcaagcagtcctcccacctcagcctcccaaggtgctgggattacaggtgtgagccaccacacctggccaagaataccacttttgaagttaatccttttgtgtgatacaggatgaacttgggatgtttgaaccctggacattccaaataaagaataggcccctgcctggctcctgggagataacctctaagccattagaatatcttgcctgataagagtgtttttgtttacctgtgggccttgggccatgcagtatcagcttgaccttgcaaggtcaagctgaggagactaagttagccatgtgggcagtgaagcatgccaatgtgatcaatccctagtaaaagccctggacacctaggcatgggtgagctactctggttggtaatactctgtgcacacatcattgtagccacacatcattgctgggagaattaagcattatcctgaagactctgccaggagaggataattggaagttctcttggaccttaccttatgtgcctttcttcattgctgattttaatctgtatcctttcactgtaataaactgtaactatgagtgc

SEQ ID NO: 26792 - DNA, 2637 bp, Homo sapiens
  source 1..2637: mol_type = unassigned DNA
gactgacggcgcagcctccgggcctagccacagcagcaacggcagaggccagcgggcgaggtcaagatggtggctccgcgggcgggggaggcagtggagggaggaggagtcagaccttagccagccggaaacaccgaaacccagagacctcctggggagccgccgccgccgccctctcggccatcgctgcctccgccgcctgctccacctcgagggacgcgagcgggcggcggggctggccgtgagagagacaggagaggaaggagggcaggggcggagttgcccgccttagcccccgcccccggccgcggccccgggccctgccccgcgcggccctgcccggcccaccgagccctggtgtggcagcggctcatggcggccgtggggcccccgcagcagcaggtgcggatggcccatcagcaggtctgggcggcgctcgaagtggcgctccgggtgccctgcctttacatcatcgacgccatcttcaactcctacccggattccagccaaagccggttctgcatcgtgctccagatcttcctccggctctttggtgtatttgcatccagtattgttctgatcttgtcacaacgatcacttttcaagttttacacgtacagctcagcctttctgttagctgcaacttcagtgttggtgaattattatgcttctttgcacattgacttctatggtgcctacaacacgtcagcttttggaattgagctgcttcctcgaaaaggtccctcgctgtggatggcacttatcgttctacagctaacatttggaattggatacgttacactactccagattcattccatctattcacaattaattattttggatctcttggttcctgtaataggcttaatcacagagctaccattacacatcagagagactttactgtttacttcttccttgattctcacattaaatacagtgtttgtcctggcagtgaaactgaagtggttttattattccacacgatatgtttatcttttggtgaggcacatgtatcgaatttacggattacagttattgatggaggacacatggaagaggattcgtttcccagacatactacgagtcttttggctaacaagagttacagctcaggctacagtgttaatgtacatcttaaggatggcaaatgaaactgattccttctttatttcttgggatgatttttgggacctcatttgcaatcttataattagtgggtgcgattctacactaactgtactgggcatgagtgctgtaatttcctcagtagcccattatttggggcttggaatattggcctttattggatcaactgaggaagatgacaggcgtcttggctttgttgcacctgttttattttttattttggctcttcagactgggttaagtgggctaagaccagaagagagacttattcgcttaagtagaaacatgtgccttttattaactgcagtcctgcattttatccatggaatgacagaccctgtattaatgtctctcagtgcctctcatgtgtcatcttttcgtagacattttcctgtgctgtttgtctctgcttgcctgtttattcttcctgtcttactcagttatgttctttggcatcactatgcactaaatacatggttgtttgcagttacagcattttgtgtggaactgtgcttaaaagtaattgtttctctcactgtttatacgttattcatgattgatggctactataatgtcctctgggaaaagcttgacgattatgtctactacgttcgttcaacaggcagtattattgaatttatatttggagttgtaatgtttggaaatggggcttacactatgatgtttgagtcgggaagtaaaattcgggcttttatgatgtgcctacatgcatattttaacatctacttacaagccaaaaatggctggaagacatttatgaatcgtaggactgctgtgaagaaaattaattcacttcctgaaataaaagggagccgcttacaagaaataaatgatgtatgtgcaatctgctatcatgagtttacaacatctgctcgtattacaccgtgtaatcattatttccatgcactttgccttcggaaatggctgtacattcaagatacttgtccaatgtgccatcagaaagtatacatcgaagatgatatcaaggataattcaaatgtatctaacaacaatggatttattccacccaatgaaactccagaggaagctgtaagagaagctgctgctgaatctgacagggaattgaacgaagatgacagtacagattgtgatgatgatgttcaaagagaaagaaatggagtgattcagcacacaggcgcagcagctgaagaatttaatgatgatactgactgatgaaaatagcatttattaatgattgaggtatttgtttaaaattcagttcatccaaaatggagtaatatccttcaccttcagtgtgtaaccaagcacaaaaacagtatcaatgttgaatctgtgaatggttttccgtttactgtgatgtgctactgtaaatatacctctttaattacttctggtctctttggtgacctgtttaaatttgtgtacattattgtacatagaataaaatgttttcacatttttatgacaaaatttgaacaaata

SEQ ID NO: 26793 - DNA, 2937 bp, Homo sapiens
  source 1..2937: mol_type = unassigned DNA
gccggcggtcgcgccagcgggatccgcctggctcagctgacagctcccgagaacggaagaggcggcgcgccggttgagcagggcgtctctaggcctggtcggctggcggcggtccttatgtcgtcagaagatcgagaagctcaggaggatgaattgctggccctggcaagtatttacgatggagatgaatttagaaaagcagagtctgtccaaggtggagaaaccaggatctatttggatttgccacagaatttcaagatatttgtgagcggcaattcaaatgagtgtctccagaatagtggctttgaatacaccatttgctttctgcctccacttgtgctgaactttgaactgccaccagattatccatcctcttccccaccttcattcacacttagtggcaaatggctgtcaccaactcagctatctgctctatgcaagcacttagacaacctatgggaagaacaccgtggcagcgtggtcctgtttgcctggatgcaatttcttaaggaagagaccctagcatacttgaatattgtctctccttttgagctcaagattggttctcagaaaaaagtgcagagaaggacagctcaagcttctcccaacacagagctagattttggaggagctgctggatctgatgtagaccaagaggaaattgtggatgagagagcagtgcaggatgtggaatcactgtcaaatctgatccaggaaatcttggactttgatcaagctcagcagataaaatgctttaatagtaaattgttcctgtgcagtatctgtttctgtgagaagctgggtagtgaatgcatgtacttcttggagtgcaggcatgtgtactgcaaagcctgtctgaaggactactttgaaatccagatcagagatggccaggttcaatgcctcaactgcccagaaccaaagtgcccttcggtggccactcctggtcaggtcaaagagttagtggaagcagagttatttgcccgttatgaccgccttctcctccagtcctccttggacctgatggcagatgtggtgtactgcccccggccgtgctgccagctgcctgtgatgcaggaacctggctgcaccatgggtatctgctccagctgcaattttgccttctgtactttgtgcaggttgacctaccatggggtctccccatgtaaggtgactgcagagaaattaatggacttacgaaatgaatacctgcaagcggatgaggctaataaaagacttttggatcaaaggtatggtaagagagtgattcagaaggcactggaagagatggaaagtaaggagtggctagagaagaactcaaagagctgcccatgttgtggaactcccatagagaaattagacggatgtaacaagatgacatgtactggctgtatgcaatatttctgttggatttgcatgggttctctctctagagcaaacccttacaaacatttcaatgaccctggttcaccatgttttaaccggctgttttatgctgtggatgttgacgacgatatttgggaagatgaggtagaagactagttaactactgctcaagatatggaagtggattgtttttccctaatcttccgtcaagtacacaaagtaactttgcgggatatttagggtactattcattcactcttcctgcgtagaagatatggaagaacgaggtttatattttcatgtggtactactgaagaaggtgcattgatacatttttaaatgtaagttgagaaaaatttataagccaaaggttcagaaaattaaactacagaatattaaatattataatgtgcccaaagctctgaatagttaaaaattaaatatttattttcttccccaagctttaggtaaggagaagaggggtcaagagttaaacttagagaccctttgtctctgagaagcatccttctaagacattctgttggagttccctcagtactattccttacaactggagtgggtagaagccttatgaaaattatactgagaacctgatctcgtttactccatgttaatcacattcctaccaacctaaatttctgccaagtcagttctctttggaggaagcccattactccgtaactgactggatggtccagtgtcattttgatctgcttttcagaatggaaatttataatataaatatatgttttaataccacaaacactgtggggcacttgatatttattagtggtgtatatggtccactggtttcaggccaaatctagaatttagtgatactggctcagaagaatttaagttctattcagccttcctgggtgttagaacctagattcaaaatggcttgtctttgctacttttgttccacattctctctctttacctttgccctaccttctgtttgtaaggatgattttaatattaattccaggaacacatgtttttatttcctctgctggaataggagaaagcttaatatattcccaagctgaatgttcttgaattatatctgcatttaccactgtatatgcatatagtgacagtataacctgtctatactacagtagttccagtcctaactttctgaattatttttaaagatcttctctaacaagctatgggaatttggcttcatactctttctttgcaacagcagtgttctgggtgataattttgaattgatacctgttcctttttctgggttttgttggctttttgaaaaattgtctttccttatcattggtgggaggcttggtagcaaagtaacattttttggaaaagaggacagaaaaattgaactacagcttgagaacgtattctttttttcctactttgttattgcaaattgaggaatcacttttaactgttttaggtgtgtgtgtccagagtgagcaaggattatgtttttggattgtcaaagaggatgcttagtcttaaaataaaaataaatttaaaaatcatcttataatt

SEQ ID NO: 26794 - DNA, 2859 bp, Homo sapiens
  source 1..2859: mol_type = unassigned DNA
ggtctctggtctcccctctctgagcactctgaggtccttatgtcgtcagaagatcgagaagctcaggaggatgaattgctggccctggcaagtatttacgatggagatgaatttagaaaagcagagtctgtccaaggtggagaaaccaggatctatttggatttgccacagaatttcaagatatttgtgagcggcaattcaaatgagtgtctccagaatagtggctttgaatacaccatttgctttctgcctccacttgtgctgaactttgaactgccaccagattatccatcctcttccccaccttcattcacacttagtggcaaatggctgtcaccaactcagctatctgctctatgcaagcacttagacaacctatgggaagaacaccgtggcagcgtggtcctgtttgcctggatgcaatttcttaaggaagagaccctagcatacttgaatattgtctctccttttgagctcaagattggttctcagaaaaaagtgcagagaaggacagctcaagcttctcccaacacagagctagattttggaggagctgctggatctgatgtagaccaagaggaaattgtggatgagagagcagtgcaggatgtggaatcactgtcaaatctgatccaggaaatcttggactttgatcaagctcagcagataaaatgctttaatagtaaattgttcctgtgcagtatctgtttctgtgagaagctgggtagtgaatgcatgtacttcttggagtgcaggcatgtgtactgcaaagcctgtctgaaggactactttgaaatccagatcagagatggccaggttcaatgcctcaactgcccagaaccaaagtgcccttcggtggccactcctggtcaggtcaaagagttagtggaagcagagttatttgcccgttatgaccgccttctcctccagtcctccttggacctgatggcagatgtggtgtactgcccccggccgtgctgccagctgcctgtgatgcaggaacctggctgcaccatgggtatctgctccagctgcaattttgccttctgtactttgtgcaggttgacctaccatggggtctccccatgtaaggtgactgcagagaaattaatggacttacgaaatgaatacctgcaagcggatgaggctaataaaagacttttggatcaaaggtatggtaagagagtgattcagaaggcactggaagagatggaaagtaaggagtggctagagaagaactcaaagagctgcccatgttgtggaactcccatagagaaattagacggatgtaacaagatgacatgtactggctgtatgcaatatttctgttggatttgcatgggttctctctctagagcaaacccttacaaacatttcaatgaccctggttcaccatgttttaaccggctgttttatgctgtggatgttgacgacgatatttgggaagatgaggtagaagactagttaactactgctcaagatatggaagtggattgtttttccctaatcttccgtcaagtacacaaagtaactttgcgggatatttagggtactattcattcactcttcctgcgtagaagatatggaagaacgaggtttatattttcatgtggtactactgaagaaggtgcattgatacatttttaaatgtaagttgagaaaaatttataagccaaaggttcagaaaattaaactacagaatattaaatattataatgtgcccaaagctctgaatagttaaaaattaaatatttattttcttccccaagctttaggtaaggagaagaggggtcaagagttaaacttagagaccctttgtctctgagaagcatccttctaagacattctgttggagttccctcagtactattccttacaactggagtgggtagaagccttatgaaaattatactgagaacctgatctcgtttactccatgttaatcacattcctaccaacctaaatttctgccaagtcagttctctttggaggaagcccattactccgtaactgactggatggtccagtgtcattttgatctgcttttcagaatggaaatttataatataaatatatgttttaataccacaaacactgtggggcacttgatatttattagtggtgtatatggtccactggtttcaggccaaatctagaatttagtgatactggctcagaagaatttaagttctattcagccttcctgggtgttagaacctagattcaaaatggcttgtctttgctacttttgttccacattctctctctttacctttgccctaccttctgtttgtaaggatgattttaatattaattccaggaacacatgtttttatttcctctgctggaataggagaaagcttaatatattcccaagctgaatgttcttgaattatatctgcatttaccactgtatatgcatatagtgacagtataacctgtctatactacagtagttccagtcctaactttctgaattatttttaaagatcttctctaacaagctatgggaatttggcttcatactctttctttgcaacagcagtgttctgggtgataattttgaattgatacctgttcctttttctgggttttgttggctttttgaaaaattgtctttccttatcattggtgggaggcttggtagcaaagtaacattttttggaaaagaggacagaaaaattgaactacagcttgagaacgtattctttttttcctactttgttattgcaaattgaggaatcacttttaactgttttaggtgtgtgtgtccagagtgagcaaggattatgtttttggattgtcaaagaggatgcttagtcttaaaataaaaataaatttaaaaatcatcttataatt

SEQ ID NO: 26795 - DNA, 2905 bp, Homo sapiens
  source 1..2905: mol_type = unassigned DNA
ggaagaggcggcgcgccggttgagcagggcgtctctaggcctggtcggctggcggcgatggcaggattttcataatatatgtagtatgagttccacatcttggcctcttacccagcttcagcagtctcagctccaccagttagagaataaatgggatttgcatgaactccactctgagctgaaatacagactgcggtgttaatatccttttcttctgattgttattaacaggtccttatgtcgtcagaagatcgagaagctcaggaggatgaattgctggccctggcaagtatttacgatggagatgaatttagaaaagcagagtctgtccaaggtggagaaaccaggatctatttggatttgccacagaatttcaagatatttgtgagcgctatctgctctatgcaagcacttagacaacctatgggaagaacaccgtggcagcgtggtcctgtttgcctggatgcaatttcttaaggaagagaccctagcatacttgaatattgtctctccttttgagctcaagattggttctcagaaaaaagtgcagagaaggacagctcaagcttctcccaacacagagctagattttggaggagctgctggatctgatgtagaccaagaggaaattgtggatgagagagcagtgcaggatgtggaatcactgtcaaatctgatccaggaaatcttggactttgatcaagctcagcagataaaatgctttaatagtaaattgttcctgtgcagtatctgtttctgtgagaagctgggtagtgaatgcatgtacttcttggagtgcaggcatgtgtactgcaaagcctgtctgaaggactactttgaaatccagatcagagatggccaggttcaatgcctcaactgcccagaaccaaagtgcccttcggtggccactcctggtcaggtcaaagagttagtggaagcagagttatttgcccgttatgaccgccttctcctccagtcctccttggacctgatggcagatgtggtgtactgcccccggccgtgctgccagctgcctgtgatgcaggaacctggctgcaccatgggtatctgctccagctgcaattttgccttctgtactttgtgcaggttgacctaccatggggtctccccatgtaaggtgactgcagagaaattaatggacttacgaaatgaatacctgcaagcggatgaggctaataaaagacttttggatcaaaggtatggtaagagagtgattcagaaggcactggaagagatggaaagtaaggagtggctagagaagaactcaaagagctgcccatgttgtggaactcccatagagaaattagacggatgtaacaagatgacatgtactggctgtatgcaatatttctgttggatttgcatgggttctctctctagagcaaacccttacaaacatttcaatgaccctggttcaccatgttttaaccggctgttttatgctgtggatgttgacgacgatatttgggaagatgaggtagaagactagttaactactgctcaagatatggaagtggattgtttttccctaatcttccgtcaagtacacaaagtaactttgcgggatatttagggtactattcattcactcttcctgcgtagaagatatggaagaacgaggtttatattttcatgtggtactactgaagaaggtgcattgatacatttttaaatgtaagttgagaaaaatttataagccaaaggttcagaaaattaaactacagaatattaaatattataatgtgcccaaagctctgaatagttaaaaattaaatatttattttcttccccaagctttaggtaaggagaagaggggtcaagagttaaacttagagaccctttgtctctgagaagcatccttctaagacattctgttggagttccctcagtactattccttacaactggagtgggtagaagccttatgaaaattatactgagaacctgatctcgtttactccatgttaatcacattcctaccaacctaaatttctgccaagtcagttctctttggaggaagcccattactccgtaactgactggatggtccagtgtcattttgatctgcttttcagaatggaaatttataatataaatatatgttttaataccacaaacactgtggggcacttgatatttattagtggtgtatatggtccactggtttcaggccaaatctagaatttagtgatactggctcagaagaatttaagttctattcagccttcctgggtgttagaacctagattcaaaatggcttgtctttgctacttttgttccacattctctctctttacctttgccctaccttctgtttgtaaggatgattttaatattaattccaggaacacatgtttttatttcctctgctggaataggagaaagcttaatatattcccaagctgaatgttcttgaattatatctgcatttaccactgtatatgcatatagtgacagtataacctgtctatactacagtagttccagtcctaactttctgaattatttttaaagatcttctctaacaagctatgggaatttggcttcatactctttctttgcaacagcagtgttctgggtgataattttgaattgatacctgttcctttttctgggttttgttggctttttgaaaaattgtctttccttatcattggtgggaggcttggtagcaaagtaacattttttggaaaagaggacagaaaaattgaactacagcttgagaacgtattctttttttcctactttgttattgcaaattgaggaatcacttttaactgttttaggtgtgtgtgtccagagtgagcaaggattatgtttttggattgtcaaagaggatgcttagtcttaaaataaaaataaatttaaaaatcatcttataatt

SEQ ID NO: 26796 - DNA, 1229 bp, Homo sapiens
  source 1..1229: mol_type = unassigned DNA
gtctctaggcctggtcggctggcggcgatggcaggattttcataatatatgtagtatgagttccacatcttggcctcttacccagcttcagcagtctcagctccaccagttagagaataaatgggatttgcatgaactccactctgagctgaaatacagactgcggtgttaatatccttttcttctgattgttattaacaggtccttatgtcgtcagaagatcgagaagctcaggaggatgaattgctggccctggcaagtatttacgatggagatgaatttagaaaagcagagtctgtccaaggtggagaaaccaggatctatttggatttgccacagaatttcaagatatttgtgagcggcaattcaaatgagtgtctccagaatagtggctttgaatacaccatttgctttctgcctccacttgtgctgaactttgaactgccaccagattatccatcctcttccccaccttcattcacacttagtggcaaatggctgtcaccaactcaggtcaaagagttagtggaagcagagttatttgcccgttatgaccgccttctcctccagtcctccttggacctgatggcagatgtggtgtactgcccccggccgtgctgccagctgcctgtgatgcaggaacctggctgcaccatgggtatctgctccagctgcaattttgccttctgtactttgtgcaggttgacctaccatggggtctccccatgtaaggtgactgcagagaaattaatggacttacgaaatgaatacctgcaagcggatgaggctaataaaagacttttggatcaaaggtatggtaagagagtgattcagaaggcactggaagagatggaaagtaaggagtggctagagaagaactcaaagagctgcccatgttgtggaactcccatagagaaattagacggatgtaacaagatgacatgtactggctgtatgcaatatttctgttggatttgcatgggttctctctctagagcaaacccttacaaacatttcaatgaccctggttcaccatgttttaaccggctgttttatgctgtggatgttgacgacgatatttgggaagatgaggtagaagactagttaactactgctcaagatatggaagtggattgtttttccctaatcttccgtcaagtacacaaagtaactttgcgggatatttagggtactattcattcactcttcctgcgtagaagatatggaag

SEQ ID NO: 26797 - DNA, 3067 bp, Homo sapiens
  source 1..3067: mol_type = unassigned DNA
gtgagtgggccccaggcaagggcggagggcggaactttggggttcggcactgccgggcggccggaagatggcaggattttcataatatatgtagtatgagttccacatcttggcctcttacccagcttcagcagtctcagctccaccagttagagaataaatgggatttgcatgaactccactctgagctgaaatacagactgcggtgttaatatccttttcttctgattgttattaacaggtccttatgtcgtcagaagatcgagaagctcaggaggatgaattgctggccctggcaagtatttacgatggagatgaatttagaaaagcagagtctgtccaaggtggagaaaccaggatctatttggatttgccacagaatttcaagatatttgtgagcggcaattcaaatgagtgtctccagaatagtggctttgaatacaccatttgctttctgcctccacttgtgctgaactttgaactgccaccagattatccatcctcttccccaccttcattcacacttagtggcaaatggctgtcaccaactcagctatctgctctatgcaagcacttagacaacctatgggaagaacaccgtggcagcgtggtcctgtttgcctggatgcaatttcttaaggaagagaccctagcatacttgaatattgtctctccttttgagctcaagattggttctcagaaaaaagtgcagagaaggacagctcaagcttctcccaacacagagctagattttggaggagctgctggatctgatgtagaccaagaggaaattgtggatgagagagcagtgcaggatgtggaatcactgtcaaatctgatccaggaaatcttggactttgatcaagctcagcagataaaatgctttaatagtaaattgttcctgtgcagtatctgtttctgtgagaagctgggtagtgaatgcatgtacttcttggagtgcaggcatgtgtactgcaaagcctgtctgaaggactactttgaaatccagatcagagatggccaggttcaatgcctcaactgcccagaaccaaagtgcccttcggtggccactcctggtcaggtcaaagagttagtggaagcagagttatttgcccgttatgaccgccttctcctccagtcctccttggacctgatggcagatgtggtgtactgcccccggccgtgctgccagctgcctgtgatgcaggaacctggctgcaccatgggtatctgctccagctgcaattttgccttctgtactttgtgcaggttgacctaccatggggtctccccatgtaaggtgactgcagagaaattaatggacttacgaaatgaatacctgcaagcggatgaggctaataaaagacttttggatcaaaggtatggtaagagagtgattcagaaggcactggaagagatggaaagtaaggagtggctagagaagaactcaaagagctgcccatgttgtggaactcccatagagaaattagacggatgtaacaagatgacatgtactggctgtatgcaatatttctgttggatttgcatgggttctctctctagagcaaacccttacaaacatttcaatgaccctggttcaccatgttttaaccggctgttttatgctgtggatgttgacgacgatatttgggaagatgaggtagaagactagttaactactgctcaagatatggaagtggattgtttttccctaatcttccgtcaagtacacaaagtaactttgcgggatatttagggtactattcattcactcttcctgcgtagaagatatggaagaacgaggtttatattttcatgtggtactactgaagaaggtgcattgatacatttttaaatgtaagttgagaaaaatttataagccaaaggttcagaaaattaaactacagaatattaaatattataatgtgcccaaagctctgaatagttaaaaattaaatatttattttcttccccaagctttaggtaaggagaagaggggtcaagagttaaacttagagaccctttgtctctgagaagcatccttctaagacattctgttggagttccctcagtactattccttacaactggagtgggtagaagccttatgaaaattatactgagaacctgatctcgtttactccatgttaatcacattcctaccaacctaaatttctgccaagtcagttctctttggaggaagcccattactccgtaactgactggatggtccagtgtcattttgatctgcttttcagaatggaaatttataatataaatatatgttttaataccacaaacactgtggggcacttgatatttattagtggtgtatatggtccactggtttcaggccaaatctagaatttagtgatactggctcagaagaatttaagttctattcagccttcctgggtgttagaacctagattcaaaatggcttgtctttgctacttttgttccacattctctctctttacctttgccctaccttctgtttgtaaggatgattttaatattaattccaggaacacatgtttttatttcctctgctggaataggagaaagcttaatatattcccaagctgaatgttcttgaattatatctgcatttaccactgtatatgcatatagtgacagtataacctgtctatactacagtagttccagtcctaactttctgaattatttttaaagatcttctctaacaagctatgggaatttggcttcatactctttctttgcaacagcagtgttctgggtgataattttgaattgatacctgttcctttttctgggttttgttggctttttgaaaaattgtctttccttatcattggtgggaggcttggtagcaaagtaacattttttggaaaagaggacagaaaaattgaactacagcttgagaacgtattctttttttcctactttgttattgcaaattgaggaatcacttttaactgttttaggtgtgtgtgtccagagtgagcaaggattatgtttttggattgtcaaagaggatgcttagtcttaaaataaaaataaatttaaaaatcatcttataatt

SEQ ID NO: 26798 - DNA, 4235 bp, Homo sapiens
  source 1..4235: mol_type = unassigned DNA
gcgcagagtcctccctatgccggcggtcgcgccagcgggatccgcctggctcagctgacagctcccgagaacggaagaggcggcgcgccggttgagcagggcgtctctaggcctggtcggctggcggcgatggcaggattttcataatatatgtagtatgagttccacatcttggcctcttacccagcttcagcagtctcagctccaccagttagagaataaatgggatttgcatgaactccactctgagctgaaatacagactgcggtgttaatatccttttcttctgattgttattaacaggtccttatgtcgtcagaagatcgagaagctcaggaggatgaattgctggccctggcaagtatttacgatggagatgaatttagaaaagcagagtctgtccaaggtggagaaaccaggatctatttggatttgccacagaatttcaagatatttgtgagcggcaattcaaatgagtgtctccagaatagtggctttgaatacaccatttgctttctgcctccacttgtgctgaactttgaactgccaccagattatccatcctcttccccaccttcattcacacttagtggcaaatggctgtcaccaactcagctatctgctctatgcaagcacttagacaacctatgggaagaacaccgtggcagcgtggtcctgtttgcctggatgcaatttcttaaggaagagaccctagcatacttgaatattgtctctccttttgagctcaagattggttctcagaaaaaagtgcagagaaggacagctcaagcttctcccaacacagagctagattttggaggagctgctggatctgatgtagaccaagaggaaattgtggatgagagagcagtgcaggatgtggaatcactgtcaaatctgatccaggaaatcttggactttgatcaagctcagcagataaaatgctttaatagtaaattgttcctgtgcagtatctgtttctgtgagaagctgggtagtgaatgcatgtacttcttggagtgcaggcatgtgtactgcaaagcctgtctgaaggactactttgaaatccagatcagagatggccaggttcaatgcctcaactgcccagaaccaaagtgcccttcggtggccactcctggtcaggtcaaagagttagtggaagcagagttatttgcccgttatgaccgccttctcctccagtcctccttggacctgatggcagatgtggtgtactgcccccggccgtgctgccagctgcctgtgatgcaggaacctggctgcaccatgggtatctgctccagctgcaattttgccttctgtactttgtgcaggttgacctaccatggggtctccccatgtaaggtgactgcagagaaattaatggacttacgaaatgaatacctgcaagcggatgaggctaataaaagacttttggatcaaaggtatggtaagagagtgattcagaaggcactggaagagatggaaagtaaggagtggctagagaagaactcaaagagctgcccatgttgtggaactcccatagagaaattagacggatgtaacaagatgacatgtactggctgtatgcaatatttctgttggatttgcatgggttctctctctagagcaaacccttacaaacatttcaatgaccctggttcaccatgttttaaccggctgttttatgctgtggatgttgacgacgatatttgggaagatgaggtagaagactagttaactactgctcaagatatggaagtggattgtttttccctaatcttccgtcaagtacacaaagtaactttgcgggatatttagggtactattcattcactcttcctgcgtagaagatatggaagaacgaggtttatattttcatgtggtactactgaagaaggtgcattgatacatttttaaatgtaagttgagaaaaatttataagccaaaggttcagaaaattaaactacagaatattaaatattataatgtgcccaaagctctgaatagttaaaaattaaatatttattttcttccccaagctttaggtaaggagaagaggggtcaagagttaaacttagagaccctttgtctctgagaagcatccttctaagacattctgttggagttccctcagtactattccttacaactggagtgggtagaagccttatgaaaattatactgagaacctgatctcgtttactccatgttaatcacattcctaccaacctaaatttctgccaagtcagttctctttggaggaagcccattactccgtaactgactggatggtccagtgtcattttgatctgcttttcagaatggaaatttataatataaatatatgttttaataccacaaacactgtggggcacttgatatttattagtggtgtatatggtccactggtttcaggccaaatctagaatttagtgatactggctcagaagaatttaagttctattcagccttcctgggtgttagaacctagattcaaaatggcttgtctttgctacttttgttccacattctctctctttacctttgccctaccttctgtttgtaaggatgattttaatattaattccaggaacacatgtttttatttcctctgctggaataggagaaagcttaatatattcccaagctgaatgttcttgaattatatctgcatttaccactgtatatgcatatagtgacagtataacctgtctatactacagtagttccagtcctaactttctgaattatttttaaagatcttctctaacaagctatgggaatttggcttcatactctttctttgcaacagcagtgttctgggtgataattttgaattgatacctgttcctttttctgggttttgttggctttttgaaaaattgtctttccttatcattggtgggaggcttggtagcaaagtaacattttttggaaaagaggacagaaaaattgaactacagcttgagaacgtattctttttttcctactttgttattgcaaattgaggaatcacttttaactgttttaggtgtgtgtgtccagagtgagcaaggattatgtttttggattgtcaaagaggatgcttagtcttaaaataaaaataaatttaaaaatcatcttataattagaacagagttgctgctatttgttctgtcaccaaggcaactaatcacattttaaaactgttcggcatataacatattcttaaagtaagaaaaaaaaggtcacagaatagcatctcttttacctgggcttgtgactgagcttaggttttagggcccatattttgtttaaaccagatagtttcatggtcttccattcaggacattttgtgtaaaaattgaggttaatttgctgggcacagtggctcacgcctgtaatcccagcactttgggaggcctaggcgggcggatcacgaggtcaggagttcgagaccatcatggctaacacggtgaaaccccgtctctactaaaaatacaaaaaattagctgggcatggtggcaggcgcctgtagtcccagctactcaggaggctgaggcaggagaatggcatgaacctgggaggtggagcttgcagtgagccgagatagcgccactgcactccagcctgagcgacagagcgagactccttctcaaaaaaaaaaaaaaaaaaaattgaggttaaagaataaattaaagataagaaatggaaattaaaatgatttgttctacagtatatacctgagaagagtgatttctgtgatcaaagagttcaattcagatttattcagaaagagctactcagaagctctatagttcgtgagctacttgatattttctagagatcattttatgttaagctgttatacattgttgatgatgtcatagaagtaggaaagaagcctttataatacagttttatgaaagaaatgggagccttttttcccatttatgatattaaaaacaacacaggtatttggtgtttagtctcaaaaatttgtttggtcaccttagtgattcttaggtacaaagtcttcatcactcaattttaacaaagaaaatagggcttataaagttatacttttgaagcatgagttatgagctaattttaagatgtatagttttggtagagtacttttgtctcagtaaaatgaaagatttgggtaactccccaaatgccctgtaaaacaaatgggtttgtggaaggttgtggtgtcagcaaaatatatgatagaataaagagttttgtaccta

SEQ ID NO: 26799 - DNA, 575 bp, Homo sapiens
  source 1..575: mol_type = unassigned DNA
agagaaggggaccgggctgggactgtacactgggcctcagtccctcaaatccgggaccgggcgtccgcagctcggctggccgggactcccttcgggacgctgaggaggaaggggaaggtgtgggccctgctccttcgggacgccccaggctggccagcagctcacacatccgcattgcgccctctgatcccagcgttggggcggatagctagcgttgggcctgcccctgttttggggcagtcgcccaaacgacgccgcacgcctagtggcgagctgaacccagactaggacacccgaagaccaaatggatagagtgagaaggaaatgggggttagcaacctgaattgagatggcaggattttcataatatatgtagtatgagttccacatcttggcctcttacccagcttcagcagtctcagctccaccagttagagaataaatgggatttgcatgaactccactctgagctgaaatacagactgcggtgttaatatccttttcttctgattgttattaacaggtccttatgtcgtcagaagatcgagaagctcaggaggatgaattgctggccc

SEQ ID NO: 26800 - DNA, 667 bp, Homo sapiens
  source 1..667: mol_type = unassigned DNA
ggccggggctccggggacaggccagatgggaagctgctgtccacgcagcaaggcggctgctgagggaaagggagcctctgcatcaccaaatggcaggattttcataatatatgtagtatgagttccacatcttggcctcttacccagcttcagcagtctcagctccaccagttagagaataaatgggatttgcatgaactccactctgagctgaaatacagactgcggtgttaatatccttttcttctgattgttattaacaggtccttatgtcgtcagaagatcgagaagctcaggaggatgaattgctggccctggcaagtatttacgatggagatgaatttagaaaagcagagtctgtccaaggtggagaaaccaggatctatttggatttgccacagaatttcaagatatttgtgagcggcaattcaaatgagtgtctccagaatagtggctttgaatacaccatttgctttctgcctccacttgtgctgaactttgaactgccaccagattatccatcctcttccccaccttcattcacacttagtggcaaatggctgtcaccaactcagctatctgctctatgcaagcacttagacaacctatgggaagaacaccgtggcagcgtggtcctgtttgcctggatgcaatttcttaaggaaga

SEQ ID NO: 26801 - DNA, 582 bp, Homo sapiens
  source 1..582: mol_type = unassigned DNA
gagaacggaagaggcggcgcgccggttgagcagggcgtctctaggcctggtcggctggcggcggtccttatgtcgtcagaagatcgagaagctcaggaggatgaattgctggccctggcaagtatttacgatggagatgaatttagaaaagcagagtctgtccaaggtggagaaaccaggatctatttggatttgccacagaatttcaagatatttgtgagcggcaattcaaatgagtgtctccagaatagtggctttgaatacaccatttgctttctgcctccacttgtgctgaactttgaactgccaccagattatccatcctcttccccaccttcattcacacttagtggcaaatggctgtcaccaactcagctatctgctctatgcaagcacttagacaacctatgggaagaacaccgtggcagcgtggtcctgtttgcctggatgcaatttcttaaggaagagaccctagcatacttgaatattgtctctccttttgagctcaagattggttctcagaaaaaagtgcagagaaggacagctcaagcttctcccaacacagagctagattttggagga

SEQ ID NO: 26802 - DNA, 815 bp, Homo sapiens
  source 1..815: mol_type = unassigned DNA
ggctggcggcggtgagtgggccccaggcaagggcggagggcggaactttggggttcggcactgccgggcggccggaagatggcaggattttcataatatatgtagtatgagttccacatcttggcctcttacccagcttcagcagtctcagctccaccagttagagaataaatgggatttgcatgaactccactctgagctgaaatacagactgcggtgttaatatccttttcttctgattgttattaacaggtccttatgtcgtcagaagatcgagaagctcaggaggatgaattgctggccctggcaagtatttacgatggagatgaatttagaaaagcagagtctgtccaaggtggagaaaccaggatctatttggatttgccacagaatttcaagatatttgtgagcggcaattcaaatgagtgtctccagaatagtggctttgaatacaccatttgctttctgcctccacttgtgctgaactttgaactgccaccagattatccatcctcttccccaccttcattcacacttagtggcaaatggctgtcaccaactcagctatctgctctatgcaagcacttagacaacctatgggaagaacaccgtggcagcgtggtcctgtttgcctggatgcaatttcttaaggaagagaccctagcatacttgaatattgtctctccttttgagctcaagattggttctcagaaaaaagtgcagagaaggacagctcaagcttctcccaacacagagctagattttggaggagctgctggatctgatgtagaccaagaggaaattgtggatgagag

SEQ ID NO: 26803 - DNA, 473 bp, Homo sapiens
  source 1..473: mol_type = unassigned DNA
ggaccgggctgggactgtacactgggcctcagtccctcaaatccgggaccgggcgtccgcagctcggctggccgggactcccttcgggacgctgaggaggaaggggaagatggcaggattttcataatatatgtagtatgagttccacatcttggcctcttacccagcttcagcagtctcagctccaccagttagagaataaatgggatttgcatgaactccactctgagctgaaatacagactgcggtgttaatatccttttcttctgattgttattaacaggtccttatgtcgtcagaagatcgagaagctcaggaggatgaattgctggccctggcaagtatttacgatggagatgaatttagaaaagcagagtctgtccaaggtggagaaaccaggatctatttggatttgccacagaatttcaagatatttgtgagcggcaattcaaatgagtgtctccagaatagtg

SEQ ID NO: 26804 - DNA, 938 bp, Homo sapiens
  source 1..938: mol_type = unassigned DNA
ggaggatgaggccggggctccggggacaggccagatgggaagctgctgtccacgcagcaaggcggctgctgagggaaagggagcctctgcatcaccaagtccttatgtcgtcagaagatcgagaagctcaggaggatgaattgctggccctggcaagtatttacgatggagatgaatttagaaaagcagagtctgtccaaggtggagaaaccaggatctatttggatttgccacagaatttcaagatatttgtgagcggcaattcaaatgagtgtctccagaatagtggctttgaatacaccatttgctttctgcctccacttgtgctgaactttgaactgccaccagattatccatcctcttccccaccttcattcacacttagtggcaaatggctgtcaccaactcagctatctgctctatgcaagcacttagacaacctatgggaagaacaccgtggcagcgtggtcctgtttgcctggatgcaatttcttaaggaagagaccctagcatacttgaatattgtctctccttttgagctcaagattggttctcagaaaaaagtgcagagaaggacagctcaagcttctcccaacacagagctagattttggaggagctgctggatctgatgtagaccaagaggaaattgtggatgagagagcagtgcaggatgtggaatcactgtcaaatctgatccaggaaatcttggactttgatcaagctcagcagataaaatgctttaatagtaaattgttcctgtgcagtatctgtttctgtgagaagctgggtagtgaatgcatgtacttcttggagtgcaggcatgtgtactgcaaagcctgtctgaaggactactttgaaatccagatcagagatggccaggttcaatgcctcaactgcccagaaccaaagtgcccttcggtggccactcctggtcag

SEQ ID NO: 26805 - DNA, 563 bp, Homo sapiens
  source 1..563: mol_type = unassigned DNA
atttcccaagctggttggtgcatgggcttcctcacttttttcctcacgaagaggtctctggtctcccctctctgagcactctgagatggcaggattttcataatatatgtagtatgagttccacatcttggcctcttacccagcttcagcagtctcagctccaccagttagagaataaatgggatttgcatgaactccactctgagctgaaatacagactgcggtgttaatatccttttcttctgattgttattaacaggtccttatgtcgtcagaagatcgagaagctcaggaggatgaattgctggccctggcaagtatttacgatggagatgaatttagaaaagcagagtctgtccaaggtggagaaaccaggatctatttggatttgccacagaatttcaagatatttgtgagcggcaattcaaatgagtgtctccagaatagtggctttgaatacaccatttgctttctgcctccacttgtgctgaactttgaactgccaccagattatccatcctcttccccaccttcattcacacttagtggcaaatggctgtcac

SEQ ID NO: 26806 - DNA, 1191 bp, Homo sapiens
  source 1..1191: mol_type = unassigned DNA
agctgacagctcccgagaacggaagaggcggcgcgccggttgagcagggcgtctctaggcctggtcggctggcggcgatggcaggattttcataatatatgtagtatgagttccacatcttggcctcttacccagcttcagcagtctcagctccaccagttagagaataaatgggatttgcatgaactccactctgagctgaaatacagactgcggtgttaatatccttttcttctgattgttattaacaggtccttatgtcgtcagaagatcgagaagctcaggaggatgaattgctggccctggcaagtatttacgatggagatgaatttagaaaagcagagtctgtccaaggtggagaaaccaggatctatttggatttgccacagaatttcaagatatttgtgagcgagaaattaatggacttacgaaatgaatacctgcaagcggatgaggctaataaaagacttttggatcaaaggtatggtaagagagtgattcagaaggcactggaagagatggaaagtaaggagtggctagagaagaactcaaagagctgcccatgttgtggaactcccatagagaaattagacggatgtaacaagatgacatgtactggctgtatgcaatatttctgttggatttgcatgggttctctctctagagcaaacccttacaaacatttcaatgaccctggttcaccatgttttaaccggctgttttatgctgtggatgttgacgacgatatttgggaagatgaggtagaagactagttaactactgctcaagatatggaagtggattgtttttccctaatcttccgtcaagtacacaaagtaactttgcgggatatttagggtactattcattcactcttcctgcgtagaagatatggaagaacgaggtttatattttcatgtggtactactgaagaaggtgcattgatacatttttaaatgtaagttgagaaaaatttataagccaaaggttcagaaaattaaactacagaatattaaatattataatgtgcccaaagctctgaatagttaaaaattaaatatttattttcttccccaagctttaggtaaggagaagaggggtcaagagttaaacttagagaccctttgtctctgagaagcatccttctaagacattctgttggagttccctcagtactattccttacaactg

SEQ ID NO: 26807 - DNA, 2140 bp, Homo sapiens
  source 1..2140: mol_type = unassigned DNA
ccgaggccagagagaaaagactgcgaggtggccgcagctgtggccggagagcacaaagaatgaaccagcagtggaagagaaaatactgtaagctggctgactgctggtgaagaaaatgctttatttttgtggcaggcatctgtgggatctgtaatagaaatatattggagtaattcaagattctgtggttggcccttttgactgctctctctacaggtttaatttgggcatttactcattttcatggctccaaggaccatgtatgtgttggggatcttcaatattcatgttattttctcctttggtcttatatgattgttacctttatgaagctttagtgattacaaagcactttttttgtccatttttacctgagctttgtaaactctgatttgcaggatggctggctgtggtgaaattgatcattcaataaacatgcttcctacaaacaggaaagcgaacgagtcctgttctaatactgcaccttctttaaccgtccctgaatgtgccatttgtctgcaaacatgtgttcatccagtcagtctgccctgtaagcacgttttctgctatctatgtgtaaaaggagcttcatggcttggaaagcggtgtgctctttgtcgacaagaaattcccgaggatttccttgacaagccaaccttgttgtcaccagaagaactcaaggcagcaagtagaggaaatggtgaatatgcatggtattatgaaggaagaaatgggtggtggcagtacgatgagcgcactagtagagagctggaagatgctttttccaaaggtaaaaagaacactgaaatgttaattgctggctttctgtatgtcgctgatcttgaaaacatggttcaatataggagaaatgaacatggacgtcgcaggaagattaagcgagatataatagatataccaaagaagggagtagctggacttaggctagactgtgatgctaataccgtaaacctagcaagagagagctctgctgacggagcggacagtgtatcagcacagagtggagcttctgttcagcccctagtgtcttctgtaaggcccctaacatcagtagatggtcagttaacaagccctgcaacaccatcccctgatgcaagcacttctctggaagactcttttgctcatttacaactcagtggagacaacacagctgaaaggagtcataggggagaaggagaagaagatcatgaatcaccatcttcaggcagggtaccagcaccagacacctccattgaagaaactgaatcagatgccagtagtgatagtgaggatgtatctgcagttgttgcacagcactccttgacccaacagagacttttggtttctaatgcaaaccagacagtacccgatcgatcagatcgatcgggaactgatcgatcagtagcagggggtggaacagtgagtgtcagtgtcagatctagaaggcctgatggacagtgcacagtaactgaagtttaaataaaaatgtcttcagctccatgctcaaggttgaaagggttacctgtaaatttctgcccacataacattatactcatccctagtagtgcattttgggagttggggtgggaaggggtatgggaaggatagactcataattaaaatgtctaacatgtctctgttgagaaatttatttaatgtaaggaacttgggtgttaatagttgagagctgtttagtaataacccagttttcttgaggtctgtttactttatactttttaaaaacttctgtagttcttttggccagtgtgtttgtattatctgtgcattaatggtcctcatctgactcctgcattgtgtcttatttttctgcatggattggcataagaccattactaaaatttggcacctgtgagatgtttgatattatgaacaggaaacataatttaatgtatgaatagatgtgaatttgggatttcaaaatagatgaataacaactattttatagtaaagttattgaaatggaaatgaaaacagccagtaacttatgtttcagaatgtttgtaacacacttcatggtgttcccataggctttgctgtctagtcttatagtttgaggtttttttggtctgcatttttctttttgattacaaaatttataatttaataaatactagagtttatc

SEQ ID NO: 26808 - DNA, 2267 bp, Homo sapiens
  source 1..2267: mol_type = unassigned DNA
gcgcgcgttcccggcagctgcgggctccgaggccagagagaaaagactgcgaggtggccgcagctgtggccggagagcacaaagaatgaaccagcagtggaagagaaaatactgtaagctggctgactgctggtgaagaaaatgctttatttttgtggcaggcatctgtgggatctgtaatagaaatgggatcttcaatattcatgttattttctcctttggtcttatatgattgttacctttatgaagctttagtgattacaaagcactttttttgtccatttttacctgagctttgtaaactctgatttgcaggatggctggctgtggtgaaattgatcattcaataaacatgcttcctacaaacaggaaagcgaacgagtcctgttctaatactgcaccttctttaaccgtccctgaatgtgccatttgtctgcaaacatgtgttcatccagtcagtctgccctgtaagcacgttttctgctatctatgtgtaaaaggagcttcatggcttggaaagcggtgtgctctttgtcgacaagaaattcccgaggatttccttgacaagccaaccttgttgtcaccagaagaactcaaggcagcaagtagaggaaatggtgaatatgcatggtattatgaaggaagaaatgggtggtggcagtacgatgagcgcactagtagagagctggaagatgctttttccaaaggtaaaaagaacactgaaatgttaattgctggctttctgtatgtcgctgatcttgaaaacatggttcaatataggagaaatgaacatggacgtcgcaggaagattaagcgagatataatagatataccaaagaagggagtagctggacttaggctagactgtgatgctaataccgtaaacctagcaagagagagctctgctgacggagcggacagtgtatcagcacagagtggagcttctgttcagcccctagtgtcttctgtaaggcccctaacatcagtagatggtcagttaacaagccctgcaacaccatcccctgatgcaagcacttctctggaagactcttttgctcatttacaactcagtggagacaacacagctgaaaggagtcataggggagaaggagaagaagatcatgaatcaccatcttcaggcagggtaccagcaccagacacctccattgaagaaactgaatcagatgccagtagtgatagtgaggatgtatctgcagttgttgcacagcactccttgacccaacagagacttttggtttctaatgcaaaccagacagtacccgatcgatcagatcgatcgggaactgatcgatcagtagcagggggtggaacagtgagtgtcagtgtcagatctagaaggcctgatggacagtgcacagtaactgaagtttaaataaaaatgtcttcagctccatgctcaaggttgaaagggttacctgtaaatttctgcccacataacattatactcatccctagtagtgcattttgggagttggggtgggaaggggtatgggaaggatagactcataattaaaatgtctaacatgtctctgttgagaaatttatttaatgtaaggaacttgggtgttaatagttgagagctgtttagtaataacccagttttcttgaggtctgtttactttatactttttaaaaacttctgtagttcttttggccagtgtgtttgtattatctgtgcattaatggtcctcatctgactcctgcattgtgtcttatttttctgcatggattggcataagaccattactaaaatttggcacctgtgagatgtttgatattatgaacaggaaacataatttaatgtatgaatagatgtgaatttgggatttcaaaatagatgaataacaactattttatagtaaagttattgaaatggaaatgaaaacagccagtaacttatgtttcagaatgtttgtaacacacttcatggtgttcccataggctttgctgtctagtcttatagtttgaggtttttttggtctgcatttttctttttgattacaaaatttataatttaataaatactagagtttatcaaaaacagtttgtctcttgtttgagggtggaaagggtgtggaaacattttgacatttgtgaccaaaggtcacttaaaaagtggtggttttaattggttgttttcagcttaatcacctgctcagaaaagtttgatttttttcttagagattatttaaacagaatctataggcagtgtgtatataataaacatgtatggaaataaaactaaa

SEQ ID NO: 26809 - DNA, 2369 bp, Homo sapiens
  source 1..2369: mol_type = unassigned DNA
tggaactgcactctttcagagcctctgggccctaatacaaagcaagcacactctaaagaagccagaagaatgcaagcagcgaagtcgccgctccccacaggcaagagagtaccggcagacagcggcgcgagacaggggcagaacgatgaggcgccggagttagctcgccggtgcgggtgcgggtgcgcggcgcgtcgcggcccctcctccgcgacgcgccgggtggtcacgtgacggccgcgcgcgttcccggcagctgcgggctccgaggccagagagaaaagactgcgaggtggccgcagctgtggccggagagcacaaagaatgaaccagcagtggaagagaaaatactgtaagctggctgactgctggtgaagaaaatgctttatttttgtggcaggcatctgtgggatctgtaatagaaatgatggctggctgtggtgaaattgatcattcaataaacatgcttcctacaaacaggaaagcgaacgagtcctgttctaatactgcaccttctttaaccgtccctgaatgtgccatttgtctgcaaacatgtgttcatccagtcagtctgccctgtaagcacgttttctgctatctatgtgtaaaaggagcttcatggcttggaaagcggtgtgctctttgtcgacaagaaattcccgaggatttccttgacaagccaaccttgttgtcaccagaagaactcaaggcagcaagtagaggaaatggtgaatatgcatggtattatgaaggaagaaatgggtggtggcagtacgatgagcgcactagtagagagctggaagatgctttttccaaaggtaaaaagaacactgaaatgttaattgctggctttctgtatgtcgctgatcttgaaaacatggttcaatataggagaaatgaacatggacgtcgcaggaagattaagcgagatataatagatataccaaagaagggagtagctggacttaggctagactgtgatgctaataccgtaaacctagcaagagagagctctgctgacggagcggacagtgtatcagcacagagtggagcttctgttcagcccctagtgtcttctgtaaggcccctaacatcagtagatggtcagttaacaagccctgcaacaccatcccctgatgcaagcacttctctggaagactcttttgctcatttacaactcagtggagacaacacagctgaaaggagtcataggggagaaggagaagaagatcatgaatcaccatcttcaggcagggtaccagcaccagacacctccattgaagaaactgaatcagatgccagtagtgatagtgaggatgtatctgcagttgttgcacagcactccttgacccaacagagacttttggtttctaatgcaaaccagacagtacccgatcgatcagatcgatcgggaactgatcgatcagtagcagggggtggaacagtgagtgtcagtgtcagatctagaaggcctgatggacagtgcacagtaactgaagtttaaataaaaatgtcttcagctccatgctcaaggttgaaagggttacctgtaaatttctgcccacataacattatactcatccctagtagtgcattttgggagttggggtgggaaggggtatgggaaggatagactcataattaaaatgtctaacatgtctctgttgagaaatttatttaatgtaaggaacttgggtgttaatagttgagagctgtttagtaataacccagttttcttgaggtctgtttactttatactttttaaaaacttctgtagttcttttggccagtgtgtttgtattatctgtgcattaatggtcctcatctgactcctgcattgtgtcttatttttctgcatggattggcataagaccattactaaaatttggcacctgtgagatgtttgatattatgaacaggaaacataatttaatgtatgaatagatgtgaatttgggatttcaaaatagatgaataacaactattttatagtaaagttattgaaatggaaatgaaaacagccagtaacttatgtttcagaatgtttgtaacacacttcatggtgttcccataggctttgctgtctagtcttatagtttgaggtttttttggtctgcatttttctttttgattacaaaatttataatttaataaatactagagtttatcaaaaacagtttgtctcttgtttgagggtggaaagggtgtggaaacattttgacatttgtgaccaaaggtcacttaaaaagtggtggttttaattggttgttttcagcttaatcacctgctcagaaaagtttgatttttttcttagagattatttaaacagaatctataggcagtgtgtatataataaacatgtatggaaat

SEQ ID NO: 26810 - DNA, 5347 bp, Homo sapiens
  source 1..5347: mol_type = unassigned DNA
gcttgtccggtggctgctgcgctgccgcaacgaatagggtttctggctgcgtaggagggacgggggcgcggagctctgggaaactgcgccaggcgcccgaaaggtgaacacgggagtcgcgcgtctcccccgcagcagcggtaaagcggaagttatgctgcagccggagcccgggcttcctcccggagccgcgtcccggggcccggctgccccgagctgagcggagcatcctttccgggtgaggggaggagaggacttggcgcgttcccctcgctgccccgggagccgcagccgcggtgttcatgccgcggagcagccaggctcctccgacgaaaacctgcatttatttgctggcgggacgtttgccttgaaaatggacaaagacgccgccctccggggtattcctgtttgcctgaccctgagagcgcctttttgcttcaagacgtgttggatgctcctgttctccgaattctgatacgcttctgggcataatactgaaacacaaaactgcttttgctctctctgtggttggccgaaaataggattctttttcgtgcaggtgtcgttgtttagtcggctttactaacatattgaaatggctctacccaaagacgccatcccctcgctgtccgagtgccagtgcgggatctgcatggaaatcctcgtggagcccgtcaccctcccgtgtaaccacacgctgtgtaaaccgtgcttccagtcgaccgtcgaaaaggcgagtttatgctgtcccttctgtcgccgccgggtatcgtcgtggactcggtaccatacccgaagaaattctctcgtcaacgtggaactgtggacgataattcaaaaacactatcccagggagtgcaagcttagagcgtctggccaagaatcagaggaagtggctgatgactatcagccagttcgtctgctcagtaaacctggggaactgagaagagaatatgaagaggaaataagcaaggtggcggcagagcgacgggccagcgaggaagaagaaaacaaagccagtgaagaatacatacagaggttgttggcagaggaggaagaagaggaaaaaagacaggcagaaaaaaggcgaagagcgatggaagaacaactgaaaagtgatgaggaactggcaagaaagctaagcattgatattaacaatttctgtgagggaagtatctcggcttctcccttgaattccagaaaatctgatccagttacacccaagtctgaaaagaaaagtaagaacaaacaaagaaacactggagatattcagaagtatttgacaccgaaatctcagtttgggtcagcctcacactctgaagctgtacaagaagtcaggaaagactccgtatctaaggacattgacagtagtgataggaaaagcccaacagggcaagacacagaaatagaagatatgccgacactttctccacagatatcccttggagttggagaacaaggtgcagattcttcaatagagtcccctatgccatggttatgtgcctgtggtgccgaatggtaccatgaaggaaacgtcaaaacaagaccaagcaatcatgggaaagagttatgtgtcttaagtcacgagcgacctaaaaccagagttccctactcgaaagaaactgcagttatgccttgtggcagaacagaaagtgggtgcgcccccacatcaggggtgacacagacaaatggaaacaacacaggtgagacagaaaatgaagagtcgtgcctactgatcagtaaggagatttccaaaagaaaaaaccaagaatcttcctttgaagcagtcaaggatccatgcttttctgcaaaaagaagaaaagtgtcccccgaatcttccccagatcaagaggaaacagaaataaactttacccaaaaactgatagatttggagcatctactgtttgagagacataaacaagaagaacaggacaggttattggcattacaacttcagaaggaggtggataaagagcaaatggtgccaaaccggcaaaaaggatccccagatgagtatcacttacgcgctacatcctcccctccagacaaagtgctaaatggacagaggaagaatcccaaagatgggaacttcaaaaggcaaactcacacaaagcatccaacaccagagagaggctcaagggacaaaaataggcaagtgtctttaaagatgcagttgaagcagtcagttaatagaagaaagatgccaaattctactagagatcactgtaaggtatccaaaagtgctcactccctacagcctagcatttcacagaaaagtgtttttcagatgtttcagagatgcacaaagtaaggcctggtaaagggagtgctttgtgatctagtaaagctggaatgtgaagctctttcctatcatggaatcttcatccatgtgtcattcatgctgctctctaggcacactcattgtccttaatgaaggtctgtgtgattgtaaggactgcatagacacatgagcttctgcacagctcagcggtaagcaggggtcccctgtcgtttcccttcttaataacagatgtgtattaagctttacaattcttagagatatcttaagctttggccaactccaggaaatcttcaagtgccattgtctttccaaaaactgcatgttttatggcctttgctcacctttttgtcgtgactggtaatcaaagcaagattatactattctgagtgattaaggaacccatgcagggtttaaaatccattttcttgctattgtccaatgtttacagagtactcaaaaggttttcctaaagtaatctaatttccatctccaatttaattcaattttcagcattgtagcatttcctttggtgtttgttttttttttttagacggagtttcaaaatttggattcatattcatatgtgggaaatcccagatttttttttttttttttttttttttttttttttggagacagagtcttgctctgtcacgcaggctggtgtgcaatggcgcgatctcagctcactgcaacctccgcctcccgagttcaagcgattcttctgcctcagcctcccgagtagctgggatcataggcatgtgccactacacccagctacccagctaatttttttttttttttgtacttttagtagagatgggatttcaccatgttggccaggctggtcttgaactcctgtcctcaggtgatccacctgcttcggcctcccagagtgctgggattataggcgtgagccaccacgcccggcctgtttcctttggtttaaagtggattcgaatcagtgttaaatcagaaaatcagggttttctaggaaattgggaattagttgccagaaaggaaactgaactatgcagaaggagttaagagctgggatgaggctggatggggtgactgacagtccagatcattgaaacagattgggtcgtcggaaactggtccagatgaggctggatggggtgactgacagtctggatcattgaaactgattaggtcgtcagaaacgggtccagacgaggatgaggctgaggctggatggggtgactgacagtctggatcattgaaactgattgggtggttggtcagaaacgggtccagatgaggatgaggctgaggctggatggggtgactgacagtctggatcattgaaactgattgggtggttggtcagaaacgggtccagatgaggatgaggctggatggggtgactgacagtctggatcattgaaactgattgggtcgtcagaaactggtccagatgaggctgggtggggtgactgacagtttggatcattgaaactgattgggtggtcagaaactggtccagatgaggatgtggctggatggggtgactgacagtctggatcattgaaactgattgggtggtcagaaactggtccagatgaggatgtggctggatggggtgactgacagtctggatcattgaaactgattgggtggtgagaaatgggtccagatgaggatgaggctggatggggtgactgacagtctggatcattgaaactgattgggtggtgagaaatgggtccagatgaggatgaggctggatggggtgactgacagtctggatcattgaaactggtccactatgacgcagcaggggcagtttggcagagcatcctcttcccttgtccttgtgaaagaacacaggaaacatttgggttttacagcttttcacaccctactatcaggcatcagaatcaaaattagttactaaattgggtgaatttttggaaacctgcatttctatgcatctgctattccagaaaaaaatgggaatgtattacaggagagttacctcacagtgtcttatgttgtggaacctgaaacataaccacgtgttttcttatatgatcatttgtgttgatactgcttttatttgagtttatgaacagaaatagaaagtatggtgcttgggttttgccctttcttactcctgaaagttaaatcagaagacactgatttcattttgtgaaatttagctcagagactattgatcttttgtttcattaatatgaacaactattagtaaaaaatagctttaacagcatttctgctgatatctagtaatctattcttttaatgtgaaaataagataaaatgtcctggagctaattctagcttaaatttgccagtatttctgtatgtcattaagtttttttcctctaaggttggtaatagaattttgttaatctttgcatacctgatggcatctatgtcaatgctgattgggtaattataaattctgtgctaatttaaaacttaatttgcctcttaaggtgattgtcctctgagtaatgattgtagttaaatgaagtatagcttgcaactatactatcacatgggtcgttaagtaaaaataaataaaccaaatttgtctgagacaggctaagatcaatcttctcatcaaaccaatttttctctaagagcaatttcactttcagttttagggtggacattcttgaatgcctcaaattaaacgttatctatttaatcttcctggaatagtctgtgaccaaaaaggagggtgtgatatatttaggtgtaaatatatcacatatatggtgtgatatatttgggatttatatattcagctcattctctgtgaagaagtcttcctgactaaaattggtttcaagataaactaatttctgttagtatttctactctgcctaccatgtatgcctttttgttagaaactaataaatgtatcagtcactagcaggtactggtcctttttcctctcatttttgtggaaaggatatgcaaacactgaatttctcagggagtactaaggctgtgcagaggctgagaatctgaaaaataaaatactaaaaataaaaa

SEQ ID NO: 26811 - DNA, 5347 bp, Homo sapiens; identical to SEQ ID NO: 26810
  source 1..5347: mol_type = unassigned DNA

SEQ ID NO: 26812 - DNA, 5119 bp, Homo sapiens
  source 1..5119: mol_type = unassigned DNA
gagggccgccgggactcgcactcggcggttgttccagaagaaagagacagcgatggcggcagaggcttcgaagactgggccttctaggtcttcctaccagcgaatggggaggaagagtcagccctggggtgccgctgaaatccagtgcaccaggtgtggaaggagggtatccagatcatccggtcaccattgtgaacttcaatgtggacatgctttttgtgaactatgcttgttaatgactgaagaatgcaccacaattatatgccctgattgtgaggttgctacagctgtaaatactagacaacgctactacccaatggctggatatattaaggaagactccataatggaaaaactgcagcctaagacgataaagaattgttctcaggactttaagaagactgctgatcagctaactactggtttagaacgttcagcctccacagacaagactcttttgaactcatcagctgtaatgttggacactaatactgcagaagaaattgatgaagcattgaatacagcacaccatagtttcgaacagttaagcattgctggaaaagcacttgaacacatgcagaagcaaacgatagaggaaagagaaagagttatagaagttgtggagaaacagtttgaccaacttttggctttttttgattccaggaaaaagaacctgtgtgaagaatttgcaagaactactgatgattatctatcaaatttaataaaggctaaaagctacattgaagagaaaaaaaataatttgaatgcagctatgaacatagcaagagcattacaattatcgccttctctaagaacatactgtgacctgaatcagattatccggactttgcagttaacttcagatagtgaattagcacaagttagttctccacaactaaggaaccctcccaggttgagtgtgaattgcagtgagatcatctgtatgttcaacaatatgggaaagattgaatttagggactcaacaaaatgttatccccaagaaaatgaaattagacagaatgttcaaaagaaatataataacaaaaaggaactttcttgttacgatacatacccaccgctagaaaagaaaaaggttgacatgtctgtcctaaccagtgaagcaccaccacctcctttgcaacctgagacaaatgatgtacatttagaagcaaaaaacttccagccacagaaagacgttgcaacagcatcccctaaaaccattgctgtgttacctcagatgggatctagccctgatgtgataattgaagaaattattgaagacaacgtggaaagttctgcagagctagtttttgtaagccatgtaatagatccttgccatttctacattcggaagtattcacaaataaaagacgccaaagtactggagaagaaggtgaatgaattttgcaataggagttcacaccttgatccttcagacattttggaactaggtgcaagaatatttgtcagcagtattaaaaatggaatgtggtgtcgaggaactatcacagaattaattccaatagagggtagaaataccagaaaaccttgtagtccaaccagattatttgtccatgaagttgcactaatacaaatattcatggtagattttggaaattctgaagtcctgattgtcactggagttgttgatacccatgtgagaccagaacactctgctaagcaacatattgcactaaatgatttatgtctggttctaaggaaatctgaaccatatactgaagggctgctaaaagacatccagccattagcacaaccatgctcattgaaagacattgttccacagaattcaaatgaaggctgggaagaggaagctaaagtggaatttttgaaaatggtaaataacaaggctgtttcaatgaaagtttttagagaagaagatggtgtgcttattgtagatctgcaaaaaccaccaccgaataaaataagcagtgatatgcctgtgtctcttagagatgcgctagtttttatggaactagcaaagtttaagtcacaatcactaagaagtcactttgaaaaaaatactactttacactatcatccacctattttgcctaaagaaatgacagatgtttcagtaacggtttgtcatataaatagtcctggagatttctatcttcagttgatagagggcctggatattttatttctattaaagacaatcgaggaattctataaaagtgaagatggagaaaatctggaaatcctctgtccagttcaagatcaagcctgtgtagctaaatttgaagatggaatttggtaccgagcaaaagttatcggattgcctggacatcaggaagttgaagttaaatatgtggactttggtaatactgcaaaaataacaatcaaagacgtgcgtaaaataaaggatgagtttctgaatgccccagagaaggcaattaaatgtaagttggcctatattgaaccatataaaaggacaatgcagtggtccaaagaagctaaagaaaaatttgaagaaaaggctcaagataaatttatgacatgttcagttatcaaaattctggaagataatgtgctcttagttgagcttttcgattctcttggtgctcctgaaatgactactactagtattaatgaccagctagttaaagagggcctagcatcttatgaaataggatacatcctcaaagataattctcaaaagcatattgaagtttgggatccttctccagaagaaattatttcaaatgaagtacacaacttaaatcctgtgtctgcaaaatctctacctaatgagaattttcagtcactttataataaggaattgcctgtgcatatctgtaatgtaatatctcctgagaagatttatgttcagtggttgttaactgaaaacttacttaatagtttagaagaaaagatgatagctgcttatgaaaactcaaaatgggaacctgttaaatgggaaaatgatatgcactgtgctgttaagatccaagataaaaatcagtggcgaagaggccagatcatcagaatggttacagacacattggtagaggtcttgctgtatgatgtgggtgttgaactagtagtgaatgttgactgtttaagaaaacttgaagaaaatctaaagacaatgggaagactctctttggaatgttctctggttgacataagaccagctggtgggagtgacaagtggacagcaacagcttgtgactgtctttcattgtacctgactggagctgtagcaactataatcttacaggtggatagtgaggaaaacaacacaacatggccattacctgtgaaaattttctgcagagatgaaaaaggagagcgtgttgatgtttctaaatatttgattaaaaagggtttggctttgagagaaaggagaattaataacttagataacagccattcattatctgagaagtctctggaagtccccctggaacaggaagattcagtagttactaactgtattaaaactaactttgaccctgacaagaaaactgctgacataatcagtgaacagaaagtgtctgaatttcaggagaaaattctagaaccaagaaccactagagggtataagccaccagctattcctaacatgaacgtatttgaggcaacagtcagctgtgttggtgatgatggaactatatttgtagtacctaaactatcagaatttgagctaataaaaatgacaaatgaaattcaaagtaatttaaaatgccttggtcttttggagccttatttctggaaaaaaggagaagcatgtgcagtaagaggatccgatactctgtggtatcgtggcaaggtgatggaggttgtaggtggcgctgtcagagtacaatatttagatcatggattcactgaaaagattccgcagtgccatctttaccctattttgctgtatcctgatataccccagttttgtattccttgtcagctccataataccacacctgttgggaatgtctggcaaccagatgcaatagaagttcttcaacaactgctttcaaagagacaggtggacattcacattatggagttacctaaaaatccatgggagaaattgtctattcacctctattttgatggaatgtcactttcttattttatggcatactataaatactgtacttctgaacatactgaggagatgttgaaagaaaaaccaagatcagatcatgataaaaagtatgaagaggaacaatgggaaataaggtttgaggaattgctttcggctgaaacagacactcctcttttaccaccatatttgtcttcatctctgccttccccaggagaactctatgctgttcaagttaagcacgttgtctcacctaatgaagtgtatatttgccttgattctatagaaacttctaaccagtctaaccagcatagtgacacagatgatagtggagtcagcggggaatcagaatccgagagccttgatgaagcactgcagagggttaataagaaggtagaggcgcttcctcctctgacggattttagaacagaaatgccttgccttgcagaatatgatgatggcttatggtatagagcgaagattgttgccattaaagaatttaatcctttatctatcttagtacaatttgttgattatggatcaactgcaaagctgacattaaacagactgtgccaaattccttctcatcttatgcggtatccagctcgagccataaaggttctcttggcagggtttaaacctcccttaagggatctaggggagacaagaataccatattgtcccaaatggagcatggaggcactgtgggctatgatagactgtcttcaaggaaaacaactctatgctgtgtccatggctccagcaccagaacagatagtgacattatatgacgatgaacagcatccagttcatatgccgttggtagaaatggggcttgcagataaagatgaataagtgcctaagtgtatacagtgagagcatctatagaagcctagaagaattctgttatgtttagactatgtcttatctttagactatttcaggcttaattttcctaacttgttcagcactagtgctttacctctcatttttaattgaactgttaggaattgtgtggggaaaaaaagtaaataaatgttcgcttccaaa

SEQ ID NO: 26813 - DNA, 1490 bp, Homo sapiens
  source 1..1490: mol_type = unassigned DNA
gcgatggcggcagaggcttcgaagactgggccttctaggtcttcctaccagcgaatggggaggaagagtcagccctggggtgccgctgaaatccagtgcaccaggtgtggaaggagggtatccagatcatccggtcaccattgtgaacttcaatgtggacatgctttttgtgaactatgcttgttaatgactgaagaatgcaccacaattatatgccctgattgtgaggttgctacagctgtaaatactagacaacgctactacccaatggctggatatattaaggaagactccataatggaaaaactgcagcctaagacgataaagaattgttctcaggactttaagaagactgctgatcagctaactactggtttagaacgttcagcctccacagacaagactcttttgaactcatcagctgtaatgttggacactaatactgcagaagaaattgatgaagcattgaatacagcacaccatagtttcgaacagttaagcattgctggaaaagcacttgaacacatgcagaagcaaacgatagaggaaagagaaagagttatagaagttgtggagaaacagtttgaccaacttttggctttttttgattccaggaaaaagaacctgtgtgaagaatttgcaagaactactgatgattatctatcaaatttaataaaggctaaaagctacattgaagagaaaaaaaataatttgaatgcagctatgaacatagcaagagcattacaattatcgccttctctaagaacatactgtgacctgaatcagattatccggactttgcagttaacttcagatagtgaattagcacaagttagttctccacaactaaggaaccctcccaggttgagtgtgaattgcagtgagatcatctgtatgttcaacaatatgggaaagattgaatttagggactcaacaaaatgttatccccaagaaaatgaaattagacagaatgttcaaaagaaatataataacaaaaaggaactttcttgttacgatacatacccaccgctagaaaagaaaaaggttgacatgtctgtcctaaccagtgaagcaccaccacctcctttgcaacctgagacaaatgatgtacatttagaagcaaaaaacttccagccacagaaagacgttgcaacagcatcccctaaaaccattgctgtgttacctcagatgggatctagccctgatgtgataattgaagaaattattgaagacaacgtggaaacatgcggcacagatgatcttggggagacacctagatatccaaaaaagcctcttcagaaaaactcatctgttccttttggatcaaaagcagatactgtaacaactgtctgagcttgatgtagtggagtttactgtatgtgtagttctgcagagctagtttttgtaagccatgtaatagatccttgccatttctacattcggaagtattcacaaataaaagacgccaaagtactggagaagaaggtgaa

SEQ ID NO: 26814 - DNA, 4979 bp, Homo sapiens
  source 1..4979: mol_type = unassigned DNA
ggactcgcactcggcggttgttccagaagaaagagacagcgatggcggcagaggcttcgaagactgggccttctaggtcttcctaccagcgaatggggaggaagagtcagccctggggtgccgctgaaatccagtgcaccaggtgtggaaggagggtatccagatcatccggtcaccattgtgaacttcaatgtggacatgctttttgtgaactatgcttgttaatgactgaagaatgcaccacaattatatgccctgattgtgaggttgctacagctgtaaatactagacaacgctactacccaatggctggatatattaaggaagactccataatggaaaaactgcagcctaagacgataaagaattgttctcaggactttaagaagactgctgatcagctaactactggtttagaacgttcagcctccacagacaagactcttttgaactcatcagctgtaatgttggacactaatactgcagaagaaattgatgaagcattgaatacagcacaccatagtttcgaacagttaagcattgctggaaaagcacttgaacacatgcagaagcaaacgatagaggaaagagaaagagttatagaagttgtggagaaacagtttgaccaacttttggctttttttgattccaggaaaaagaacctgtgtgaagaatttgcaagaactactgatgattatctatcaaatttaataaaggctaaaagctacattgaagagaaaaaaaataatttgaatgcagctatgaacatagcaagagcattacaattatcgccttctctaagaacatactgtgacctgaatcagattatccggactttgcagttaacttcagatagtgaattagcacaagttagttctccacaactaaggaaccctcccaggttgagtgtgaattgcagtgagatcatctgtatgttcaacaatatgggaaagattgaatttagggactcaacaaaatgttatccccaagaaaatgaaattagacagaatgttcaaaagaaatataataacaaaaaggaactttcttgttacgatacatacccaccgctagaaaagaaaaaggttgacatgtctgtcctaaccagtgaagcaccaccacctcctttgcaacctgagacaaatgatgtacatttagaagcaaaaaacttccagccacagaaagacgttgcaacagcatcccctaaaaccattgctgtgttacctcagatgggatctagccctgatgtgataattgaagaaattattgaagacaacgtggaaagttctgcagagctagtttttgtaagccatgtaatagatccttgccatttctacattcggaagtattcacaaataaaagacgccaaagtactggagaagaaggtgaatgaattttgcaataggagttcacaccttgatccttcagacattttggaactaggtgcaagaatatttgtcagcagtattaaaaatggaatgtggtgtcgaggaactatcacagaattaattccaatagagggtagaaataccagaaaaccttgtagtccaaccagattatttgtccatgaagttgcactaatacaaatattcatggtagattttggaaattctgaagtcctgattgtcactggagttgttgatacccatgtgagaccagaacactctgctaagcaacatattgcactaaatgatttatgtctggttctaaggaaatctgaaccatatactgaagggctgctaaaagacatccagccattagcacaaccatgctcattgaaagacattgttccacagaattcaaatgaaggctgggaagaggaagctaaagtggaatttttgaaaatggtaaataacaaggctgtttcaatgaaagtttttagagaagaagatggtgtgcttattgtagatctgcaaaaaccaccaccgaataaaataagcagtgatatgcctgtgtctcttagagatgcgctagtttttatggaactagcaaagtttaagtcacaatcactaagaagtcactttgaaaaaaatactactttacactatcatccacctattttgcctaaagaaatgacagatgtttcagtaacggtttgtcatataaatagtcctggagatttctatcttcagttgatagagggcctggatattttatttctattaaagacaatcgaggaattctataaaagtgaagatggagaaaatctggaaatcctctgtccagttcaagatcaagcctgtgtagctaaatttgaagatggaatttggtaccgagcaaaagttatcggattgcctggacatcaggaagttgaagttaaatatgtggactttggtaatactgcaaaaataacaatcaaagacgtgcgtaaaataaaggatgagtttctgaatgccccagagaaggcaattaaatgtaagttggcctatattgaaccatataaaaggacaatgcagtggtccaaagaagctaaagaaaaatttgaagaaaaggctcaagataaatttatgacatgttcagttatcaaaattctggaagataatgtgctcttagttgagcttttcgattctcttggtgctcctgaaatgactactactagtattaatgaccagctagttaaagagggcctagcatcttatgaaataggatacatcctcaaagataattctcaaaagcatattgaagtttgggatccttctccagaagaaattatttcaaatgaagtacacaacttaaatcctgtgtctgcaaaatctctacctaatgagaattttcagtcactttataataaggaattgcctgtgcatatctgtaatgtaatatctcctgagaagatttatgttcagtggttgttaactgaaaacttacttaatagtttagaagaaaagatgatagctgcttatgaaaactcaaaatgggaacctgttaaatgggaaaatgatatgcactgtgctgttaagatccaagataaaaatcagtggcgaagaggccagatcatcagaatggttacagacacattggtagaggtcttgctgtatgatgtgggtgttgaactagtagtgaatgttgactgtttaagaaaacttgaagaaaatctaaagacaatgggaagactctctttggaatgttctctggttgacataagaccagctggtgggagtgacaagtggacagcaacagcttgtgactgtctttcattgtacctgactggagctgtagcaactataatcttacaggtggatagtgaggaaaacaacacaacatggccattacctgtgaaaattttctgcagagatgaaaaaggagagcgtgttgatgtttctaaatatttgattaaaaagggtttggctttgagagaaaggagaattaataacttagataacagccattcattatctgagaagtctctggaagtccccctggaacaggaagattcagtagttactaactgtattaaaactaactttgaccctgacaagaaaactgctgacataatcagtgaacagaaagtgtctgaatttcaggagaaaattctagaaccaagaaccactagagggtataagccaccagctattcctaacatgaacgtatttgaggcaacagtcagctgtgttggtgatgatggaactatatttgtagtacctaaactatcagaatttgagctaataaaaatgacaaatgaaattcaaagtaatttaaaatgccttggtcttttggagccttatttctggaaaaaaggagaagcatgtgcagtaagaggatccgatactctgtggtatcgtggcaaggtgatggaggttgtaggtggcgctgtcagagtacaatatttagatcatggattcactgaaaagattccgcagtgccatctttaccctattttgctgtatcctgatataccccagttttgtattccttgtcagctccataataccacacctgttgggaatgtctggcaaccagatgcaatagaagttcttcaacaactgctttcaaagagacaggtggacattcacattatgaaaccaagatcagatcatgataaaaagtatgaagaggaacaatgggaaataaggtttgaggaattgctttcggctgaaacagacactcctcttttaccaccatatttgtcttcatctctgccttccccaggagaactctatgctgttcaagttaagcacgttgtctcacctaatgaagtgtatatttgccttgattctatagaaacttctaaccagtctaaccagcatagtgacacagatgatagtggagtcagcggggaatcagaatccgagagccttgatgaagcactgcagagggttaataagaaggtagaggcgcttcctcctctgacggattttagaacagaaatgccttgccttgcagaatatgatgatggcttatggtatagagcgaagattgttgccattaaagaatttaatcctttatctatcttagtacaatttgttgattatggatcaactgcaaagctgacattaaacagactgtgccaaattccttctcatcttatgcggtatccagctcgagccataaaggttctcttggcagggtttaaacctcccttaagggatctaggggagacaagaataccatattgtcccaaatggagcatggaggcactgtgggctatgatagactgtcttcaaggaaaacaactctatgctgtgtccatggctccagcaccagaacagatagtgacattatatgacgatgaacagcatccagttcatatgccgttggtagaaatggggcttgcagataaagatgaataagtgcctaagtgtatacagtgagagcatctatagaagcctagaagaattctgttatgtttagactatgtcttatctttagactatttcaggcttaattttcctaacttgttcagcactagtgctttacctctcatttttaattgaactgttaggaattgtgtggggaaaaaaagtaaataaatgttcgcttcc

SEQ ID NO: 26815 - DNA, 3726 bp, Homo sapiens
  source 1..3726: mol_type = unassigned DNA
gttccagaagaaagagacagcgatggcggcagaggcttcgaagactgggccttctaggtcttcctaccagcgaatggggaggaagagtcagccctggggtgccgctgaaatccagtgcaccaggtgtggaaggagggtatccagatcatccggtcaccattgtgaacttcaatgtggacatgctttttgtgaactatgcttgttaatgactgaagaatgcaccacaattatatgccctgattgtgaggataaagaattgttctcaggactttaagaagactgctgatcagctaactactggtttagaacgttcagcctccacagacaagactcttttgaactcatcagctgtaatgttggacactaatactgcagaagaaattgatgaagcattgaatacagcacaccatagtttcgaacagttaagcattgctggaaaagcacttgaacacatgcagaagcaaacgatagaggaaagagaaagagttatagaagttgtggagaaacagtttgaccaacttttggctttttttgattccaggaaaaagaacctgtgtgaagaatttgcaagaactactgatgattatctatcaaatttaataaaggctaaaagctacattgaagagaaaaaaaataatttgaatgcagctatgaacatagcaagagcattacaattatcgccttctctaagaacatactgtgacctgaatcagattatccggactttgcagttaacttcagatagtgaattagcacaagttagttctccacaactaaggaaccctcccaggttgagtgtgaattgcagtgagatcatctgtatgttcaacaatatgggaaagattgaatttagggactcaacaaaatgttatccccaagaaaatgaaattagacagaatgttcaaaagaaatataataacaaaaaggaactttcttgttacgatacatacccaccgctagaaaagaaaaaggttgacatgtctgtcctaaccagtgaagcaccaccacctcctttgcaacctgagacaaatgatgtacatttagaagcaaaaaacttccagccacagaaagacgttgcaacagcatcccctaaaaccattgctgtgttacctcagatgggatctagccctgatgtgataattgaagaaattattgaagacaacgtggaaagttctgcagagctagtttttgtaagccatgtaatagatccttgccatttctacattcggaagtattcacaaataaaagacgccaaagtactggagaagaaggtgaatgaattttgcaataggagttcacaccttgatccttcagacattttggaactaggtgcaagaatatttgtcagcagtattaaaaatggaatgtggtgtcgaggaactatcacagaattaattccaatagagggtagaaataccagaaaaccttgtagtccaaccagattatttgtccatgaagttgcactaatacaaatattcatggtagattttggaaattctgaagtcctgattgtcactggagttgttgatacccatgtgagaccagaacactctgctaagcaacatattgcactaaatgatttatgtctggttctaaggaaatctgaaccatatactgaagggctgctaaaagacatccagccattagcacaaccatgctcattgaaagacattgttccacagaattcaaatgaaggctgggaagaggaagctaaagtggaatttttgaaaatggtaaataacaaggctgtttcaatgaaagtttttagagaagaagatggtgtgcttattgtagatctgcaaaaaccaccaccgaataaaataagcagtgatatgcctgtgtctcttagagatgcgctagtttttatggaactagcaaagtttaagtcacaatcactaagaagtcactttgaaaaaaatactactttacactatcatccacctattttgcctaaagaaatgacagatgtttcagtaacggtttgtcatataaatagtcctggagatttctatcttcagttgatagagggcctggatattttatttctattaaagacaatcgaggaattctataaaagtgaagatggagaaaatctggaaatcctctgtccagttcaagatcaagcctgtgtagctaaatttgaagatggaatttggtaccgagcaaaagttatcggattgcctggacatcaggaagttgaagttaaatatgtggactttggtaatactgcaaaaataacaatcaaagacgtgcgtaaaataaaggatgagtttctgaatgccccagagaaggcaattaaatgtaagttggcctatattgaaccatataaaaggacaatgcagtggtccaaagaagctaaagaaaaatttgaagaaaaggctcaagataaatttatgacatgttcagttatcaaaattctggaagataatgtgctcttagttgagcttttcgattctcttggtgctcctgaaatgactactactagtattaatgaccagctagttaaagagggcctagcatcttatgaaataggatacatcctcaaagataattctcaaaagcatattgaagtttgggatccttctccagaagaaattatttcaaatgaagtacacaacttaaatcctgtgtctgcaaaatctctacctaatgagaattttcagtcactttataataaggaattgcctgtgcatatctgtaatgtaatatctcctgagaagatttatgttcagtggttgttaactgaaaacttacttaatagtttagaagaaaagatgatagctgcttatgaaaactcaaaatgggaacctgttaaatgggaaaatgatatgcactgtgctgttaagatccaagataaaaatcagtggcgaagaggccagatcatcagaatggttacagacacattggtagaggtcttgctgtatgatgtgggtgttgaactagtagtgaatgttgactgtttaagaaaacttgaagaaaatctaaagacaatgggaagactctctttggaatgttctctggttgacataagaccagctggtgggagtgacaagtggacagcaacagcttgtgactgtctttcattgtacctgactggagctgtagcaactataatcttacaggtggatagtgaggaaaacaacacaacatggccattacctgtgaaaattttctgcagagatgaaaaaggagagcgtgttgatgtttctaaatatttgattaaaaagggtttggctttgagagaaaggagaattaataacttagataacagccattcattatctgagaagtctctggaagtccccctggaacaggaagattcagtagttactaactgtattaaaactaactttgaccctgacaagaaaactgctgacataatcagtgaacagaaagtgtctgaatttcaggagaaaattctagaaccaagaaccactagagggtataagccaccagctattcctaacatgaacgtatttgaggcaacagtcagctgtgttggtgatgatggaactatatttgtagtacctaaactatcagaatttgagctaataaaaatgacaaatgaaattcaaagtaatttaaaatgccttggtcttttggagccttatttctggaaaaaaggagaagcatgtgcagtaagaggatccgatactctgtggtatcgtggcaaggtgatggaggttgtaggtggcgctgtcagagtacaatatttagatcatggat

SEQ ID NO: 26816 - DNA, 569 bp, Homo sapiens
  source 1..569: mol_type = unassigned DNA
ccgagggctgtgtcagaaggctgggcagccatggcgtcctatttcgatgaacacgactgcgagccgtcggaccctgagcaggagacgcgaaccaacatgctgctggagctcgcaaggtcacttttcaataggatggactttgaagacttggggttggtagtagattgggaccaccacctgcctccaccagctgccaagactgtggttgagaacctccccaggacagtcatcagaggctctcaggctgagctcaagtgccccgtgtgtcttttggaatttgaggaggaggagactgccattgagatgccttgccatcaccttttccattccagctgcattctgccctggctaagcaagacaaattcctgtcccttgtgccgctatgagctgcccactgatgacgacacttatgaggagcacagacgagataaggctcgaaaacagcagcagcaacaccgactggagaacctccatggagccatgtacacgtgaggaggttggggctgagtgctggccctctgcgtcttccttattaaccttgaatcctcattaaaggtttctttacccac

SEQ ID NO: 26817 - DNA, 1249 bp, Homo sapiens
  source 1..1249: mol_type = unassigned DNA
aagaaacaagctgggcagctctgggagagaggagtgtcagacagctgttgtcaacaggcacctggccagagtgaaaaggaggggcagattccatccaagtcccagcggcgccagctgacactctctgccaatgcccaggtgctgagcgacagtgtcccaccggtccctgtgcccagaatggcctgcaccaagaccctgcaacagtcccagcccatctccgcaggagccaccacaaccaccaccgctgtggcccctgctgggggtcattctggctccacagaatgtgacctggagtgtctggtgtgccgggagccctacagctgtccccggttgcccaagctgctggcctgccagcatgccttctgcgccatctgcctgaagctcctgctgtgcgtgcaggacaacacctggtccatcacctgcccgctgtgccgcaaggtcaccgccgtccccgggggcctcatctgcagcctgcgcgaccatgaggcggtggtggggcagctggcccagccatgcacagaggtatcgctctgtcctcaggggctggtggatcctgctgacttggcagcaggacaccccagcttggtgggagaggatggacaggatgaagtaagtgcaaaccacgtggcagcccggcgcctggccgcgcacctactcctgctggccttgctcattatcctcatcgggcccttcatctacccgggtgtcttacgatgggtgctcaccttcatcatcgccctggccctgctgatgtccaccctcttctgctgtctccccagcacccggggcagctgctggccctcctccaggactctcttctgcagagagcagaaacacagccacatctcttccattgcctgagtgccctctgatgaggctatccctgcagccctttctgcccttgggcccccggacttccacaatgaacagggtaaggggttacggactaagactggctcctttgggaaatcacatgccagcgggacttgcaagccacaaccgagatggccagcctgggtcaagaattacacgcttggatgacaggcttgcacttgcccttgggatagcatagctaaaactgttggtggctaggggagcagacacaaactacttgaacatgacaagatgggggaagctcctgttcctcttattccaatgttcttggtttttctttatataacttgatgaaagtattgcagtattgatgccattgtagaatagaactggaattccattctttttgcaattt

SEQ ID NO: 26818 - DNA, 1677 bp, Homo sapiens
  source 1..1677: mol_type = unassigned DNA
cccgagctccattgcggaagctgaggctcgccatattgtgcggcggcgccggcgtccgcggcagctgataccagagtcttgctccggccgcggccagcggagccctgggctggggcaggagccgcaatgtctcaggctgtgcagacaaacggaactcaaccattaagcaaaacatgggaactcagtttatatgagttacaacgaacacctcaggaggcaataacagatggcttagaaattgtggtttcacctcgaagtctacacagtgaattaatgtgcccaatttgtttggatatgttgaagaacaccatgactacaaaggagtgtttacatcgtttttgtgcagactgcatcatcacagcccttagaagtggactgcagcgaggcaagaaacaacagattgaaaatggtagtggagcagaagataatggtgacagttcacactgcagtaatgcatccacacatagcaatcaggaagcaggccctagtaacaaacggaccaaaacatctgatgattctgggctagagcttgataataacaatgcagcaatggcaattgatccagtaatggatggtgctagtgaaattgaattagtattcaggcctcatcccacacttatggaaaaagatgacagtgcacagacgagatacataaagacttctggtaacgccactgttgatcacttatccaagtatctggctgtgaggttagctttagaagaacttcgaagcaaaggtgaatcaaaccagatgaaccttgatacagccagtgagaagcagtataccatttatatagcaacagccagtggccagttcactgtattaaatggctctttttctttggaattggtcagtgagaaatactggaaagtgaacaaacccatggaactttattacgcacctacaaaggagcacaaatgagcctttaaaaaccaattctgagactgaacttttttatagcctatttctttaatattaaagatgtactggcattacttttatggacagatcttggatatgttgttcaattttctttctgagccagactagtttacgctattcaaatcttttcccctttatttaagatttcctttttggaagggactgcaattattcagtatttttttctttcctttaaaaaaatatatctgaagtttcttgtgtttttttttttccccacaaagtgtgtttccacttggagcaccattttgacccaggaatttttcatagtttctgtattcttataagattcagttggctgtccttttcctgctcccctcaaaagatttttagtcatacagaatgttaaatattatgtattctgactttttttttcccccggagtcttgtatatttatagttttctatataaactgtagtatcttcatgaagacccaaggctcaaatttactgtccttaaaaacaattctcataggattattcttttcatggtattttcttccataatatctcattttaaaaagaagttctttatgaacttagtgtccattgtcatgcaatgtttttttttttccattctttttccctgtaattttggaatttctggtcctgggaagaatcaaacaaaatcttaagttctatgagaacttggttcattgacatattctgctgaagaaagaaaaattaaattggtagtaaaatatagtcttcaagtat

SEQ ID NO: 26819 - DNA, 3606 bp, Homo sapiens
  source 1..3606: mol_type = unassigned DNA
cggcgcaccctccctcgcgccgcgggcctccccgcgccgtgcacgtcctcgtcccgcgcctccgcccctcgctcgctcgctccttcccgccctccccgcagcgccggccgagccggcttcccctcagtctctcatgaatattgagcggcccctgttgtatttcccgagctccattgcggaagctgaggctcgccatattgtgcggcggcgccggcgtccgcggcagctgataccagagtcttgctccggccgcggccagcggagccctgggctggggcaggagccgcaatgtctcaggctgtgcagacaaacggaactcaaccattaagcaaaacatgggaactcagtttatatgagttacaacgaacacctcaggaggcaataacagatggcttagaaattgtggtttcacctcgaagtctacacagtgaattaatgtgcccaatttgtttggatatgttgaagaacaccatgactacaaaggagtgtttacatcgtttttgtgcagactgcatcatcacagcccttagaagtggcaacaaagaatgtcctacctgtcggaaaaaactagtttccaaaagatcactaaggccagacccaaactttgatgcactcatcagcaaaatttatccaagtcgtgatgagtatgaagctcatcaagagagagtattagccaggatcaacaagcacaataatcagcaagcactcagtcacagcattgaggaaggactgaagatacaggccatgaacagactgcagcgaggcaagaaacaacagattgaaaatggtagtggagcagaagataatggtgacagttcacactgcagtaatgcatccacacatagcaatcaggaagcaggccctagtaacaaacggaccaaaacatctgatgattctgggctagagcttgataataacaatgcagcaatggcaattgatccagtaatggatggtgctagtgaaattgaattagtattcaggcctcatcccacacttatggaaaaagatgacagtgcacagacgagatacataaagacttctggtaacgccactgttgatcacttatccaagtatctggctgtgaggttagctttagaagaacttcgaagcaaaggtgaatcaaaccagatgaaccttgatacagccagtgagaagcagtataccatttatatagcaacagccagtggccagttcactgtattaaatggctctttttctttggaattggtcagtgagaaatactggaaagtgaacaaacccatggaactttattacgcacctacaaaggagcacaaatgagcctttaaaaaccaattctgagactgaacttttttatagcctatttctttaatattaaagatgtactggcattacttttatggacagatcttggatatgttgttcaattttctttctgagccagactagtttacgctattcaaatcttttcccctttatttaagatttcctttttggaagggactgcaattattcagtatttttttctttcctttaaaaaaatatatctgaagtttcttgtgtttttttttttccccacaaagtgtgtttccacttggagcaccattttgacccaggaatttttcatagtttctgtattcttataagattcagttggctgtccttttcctgctcccctcaaaagatttttagtcatacagaatgttaaatattatgtattctgactttttttttcccccggagtcttgtatatttatagttttctatataaactgtagtatcttcatgaagacccaaggctcaaatttactgtccttaaaaacaattctcataggattattcttttcatggtattttcttccataatatctcattttaaaaagaagttctttatgaacttagtgtccattgtcatgcaatgtttttttttttccattctttttccctgtaattttggaatttctggtcctgggaagaatcaaacaaaatcttaagttctatgagaacttggttcattgacatattctgctgaagaaagaaaaattaaattggtagtaaaatatagtcttcaagtatacgtttgagagtgcttttttttgtattagttctgctgtcacttcatttcctgtattatatgtgatgtttttccccattaaaataccagagataatggagatattttgcactttagccttgatgaaaagtacaagatatgttcaaagcttccctaatttttttcttatttgtagccacataagtttcaagaataacatggcacacagaacaatggaaaaaagtttgtttccattggaaaattatatcattttgggttgccacatcagtttataaatttggcgctcttttaattacactctgtagaaggttaatagagcttgagccctgctttaatatgtagtgaaagataattctgtagaaaaacgtcagccagtagggtaaagtcattctactgttcttaatttttatattgaggaacaatattgggtgtttgggagccagaaagctttgttgacagatcagaaataagattgacttgggtgttatatttcatctctctccagactctaggtatatttccaactttatatatcacagtatttaaaaagacatgtttgcattgagaaattaaccctaaagggttttcaatagggtgtagacctccagtacctttgtaactaaagtctgtctagtcattgtaaatatttatctgtcagttttgacagattggggccagcttgatgttttaaatcttcagcccggtatgaaaacttaaaggtatatattcaattttttaccattttatggaaaatatttaaaatctgtttttacagggttttttttttttttttttttttgtaatctgtgccatgaaatttgaaaaccaccaaaaatcaagggaacttttatatattcaattccttttctggtgtaatgttaaagttgtatagattattaatgcatgcccactgaatataaccctggttttgtgataaaactgcttagattttgttgatgacattagattagtagttgcattaaataactaaattcccattgtgattaattgaaattttgtctttaagcagagagttatttgtgactataagctttgtgcttagagaatgtatgtgtttttatctgtcagtatgggaggatataaactgcatcattagtgaaattattggttgtgtaatcctttgtgaaatataattctaggtatttgatagggtattgagtgtattttgtgtgtgtgtggatgtgtgttttggggtacggggagaggcgatgctattggccatcactaccaaccagggtttcaaaaagtattacctaagtaatttcttttatcactatctcaactgaggaagaaaaggctcaccacaagtggtgtgaaggctttgggtacttagttctaaatttttttatggtaacatatacatagccacatttacagttttaaccattttaaggcatgtaattcagtggggttaggtacattcacaatgttgtgtaatgatcaccgctgtctacttgtaaaactttttcatcaccccaaacagaaactctgtgtgcaattaaagtaatgcatttctcttcttcttaacccct

SEQ ID NO: 26820 - DNA, 942 bp, Homo sapiens
  source 1..942: mol_type = unassigned DNA
ggatgtgtgtctgcatcgtgggggtggggtagggggcactttgtgcagatatcgctccttccttctggggggtcggagtcggggttccagtgtagaggagctcctcgacctcggggttcctcggggagaccccttcagcttcacacattcctggagtgccgcctcctgctctggagtatctgttgctgctttctaaaacccaatgtctcaggctgtgcagacaaacggaactcaaccattaagcaaaacatgggaactcagtttatatgagttacaacgaacacctcaggaggcaataacagatggcttagaaattgtggtttcacctcgaagtctacacagtgaattaatgtgcccaatttgtttggatatgttgaagaacaccatgactacaaaggagtgtttacatcgtttttgtgcagactgcatcatcacagcccttagaagtggcaacaaagaatgtcctacctgtcggaaaaaactagtttccaaaagatcactaaggccagacccaaactttgatgcactcatcagcaaaatttatccaagtcgtgatgagtatgaagctcatcaagagagagtattagccaggatcaacaagcacaataatcagcaagcactcagtcacagcattgaggaaggactgaagatacaggccatgaacagactgcagcgaggcaagaaacaacagattgaaaatggtagtggagcagaagataatggtgacagttcacactgcagtaatgcatccacacatagcaatcaggaagcaggccctagtaacaaacggaccaaaacatctgatgattctgggctagagcttgataataacaatgcagcaatggcaattgatccagtaatggatggtgctagtgaaattgaattagtattcaggcctcatcccacacttatggaaaaagatgacagtgcacagacgagata

SEQ ID NO: 26821 - DNA, 1019 bp, Homo sapiens
  source 1..1019: mol_type = unassigned DNA
ggctggtcccaaccttgcgtgggcttcgcgtgggcccggcctcgccgctgcggtcgcccgcctggcatggccaactgggtgttctgtaatcgctgcttccagccgccccacaggacgtcgtgcttcagcctcaccaactgcgggcacgtgtactgcgacgcctgcctcggcaaaggtaaaaagaatgaatgcttgatttgtaaagctccttgtcgtacagttttgctttcaaagcataccgacgcagatatccaggcattcttcatgagcatagacagtctgtgtaagaagtactccagggaaacctcccagtatctcaggctttcccgaggctgttgccgtctcaagttatgcccagccacatcctccaaggaggtgcccagaggctcgacccatggaagccaagcagcagccagagatccccaagaacactgggtcagcacaacacgggcacccagaccaggatgccggcggtcccagagccagccagaggcccagggaaacaccatccaggacgcacctcaccccctcaccctgctccatcccagcaggaccctcattcacaccaagtccccttggggccagaagttgcttgagttcataaaacatgtctgttatcacagacatcagagccacaggccgtgcgctccagggtggttttgccaagtgctgcagaggccaggtgctgtctcaggagagaagacccagcagacccggccagcccctccagccacctgtctgctctgcctctcgtgcctctcaggcttccggcatgggccgtggaggtcacaggctctgcccagtgacctcgtggccccactgtttgtcagttacactgtggaggtgagcatcacaaacgcagggtggagttttcccgcagctgtgtgacgtgaggtggtattgtaacatttatgctctaatatcaacgtaacataaatattggcatttgttacaatatgttaacacatcatggatttattgttatttttaaatgaattaataaatacttttagatttgt

SEQ ID NO: 26822 - DNA, 2332 bp, Homo sapiens
  source 1..2332: mol_type = unassigned DNA
agagctgcccgccttcgggccctgcgcggggaggctggtcccaaccttgcgtgggcttcgcgtgggcccggcctcgccgctgcggtcgcccgcctggcatggccaactgggtgttctgtaatcgctgcttccagccgccccacaggacgtcgtgcttcagcctcaccaactgcgggcacgtgtactgcgacgcctgcctcggcaaaggtaaaaagaatgaatgcttgatttgtaaagctccttgtcgtacagttttgctttcaaagcataccgacgcagatatccaggcattcttcatgagcatagacagtctgtgtaagaagtactccagggaaacctcccagattttagaatttcaagaaaaacacaggaagagattgttagccttctatagagaaaagatttctaggttggaagaatcccttaggaagtcagtgctgcagatagaacaactacaaagtatgagatcatcacaacaaacagctttcagcacaataaaaagttcagtttcaacaaaaccacacggatgcctgctgccacctcactcatcagcccccgacagactggagtcgatggaagttgatctctctccttctccgattagaaaatctgagatagcagccggccctgcgagaatctccatgattagtccacctcaagatggacgaatggccccctgtgcccggagagtgtgtcatttccagaggttcaccatgtttctgcatagacgtctgtcctcactggctgctcctcctagcgttcagttctggaaggcacggggaactcaccaactctaaaacacttccaatatatgctgaggtacaaagggccgtcttgtttccgttccagcaggctgagggcaccctggacacgttcagaacacccgctgtgtctgttgtgtttcctctttgccaatttgaaaggaaaaagtcattttgatttgcatttatgtgactattaatgattctgagtgttttcaatttattcctctgtgttttttctacaaattatctgctttattcctttgtcatttatgtggaagccctcagtgtgcaggatattaaccttttacccaatttgctttgtaattttatatttgacctttgaattttagagacaatatttttatgtactcatatatattgttattatcccttttattttataggttctcatgcttagggagtttttttttcacatacttaaatcatttttttctaactgggtggtttttaaaactttttcttagagcagttttaggttcacagaaaaattgaaaggaaggtacagatttcccatatacaccatgactccacacacgcacagctcccccatcatcctcatcctccaccagagcagtccatgtgttaaaactgatgatcctacttgaatacatcattatcacccaacgtccatggtttacattagggttcactctaggtgtcgaatgttctatgggtttgaacaaatatctagtgacatgtgtccccatcgtagcagcatatggaatagtgccacaccctaaaaatcctctgtgcgccacctgttcatccttcccccacctcccaccaacccttgacagccactgatctttttacggtccctttttcagactctcctggagttggaattgtacagtatgtggcttctcagattgactcctttcacttagcaatacacacttatggttcccccatctcttctcatggtttgctagctcattttttcagtcactgaataatattccattatctggatgtatcatagttcatccattcacctactgaagggcatcttggttgcttccaagttttggcaattatgaattaagctgctatagatgtccatgtgccagggttttgtgtagacatgttttcagctcctttgggtaaatactaaggagtgtgaatgctggatcagatggtgagagggtgtttagttttgaaagaaattgccaaactaccttccaaagtggcagcagcttttcgcattcccactagcaacgaatgagagttcctgttgctccacgtcctcacatttgatgatgtcagtgttctggattttggccagctgataggtatgtagtggtatcttgctgttttattttgcatttcattgataacatatgactaggagcatcttatgctgatttttcatctgcatatcttctttgctgaagtgtctgttaaggtatttggcccattttttaattggattgttttcttattgttgagttttaagagtcctgtgtatattttggatgacatttcttttttgtgtgtcttttttttggatgacatttccttatcagataaatatgtatcttgaaaat

SEQ ID NO: 26823 - DNA, 1074 bp, Homo sapiens
  source 1..1074: mol_type = unassigned DNA
ggtcccaaccttgcgtgggcttcgcgtgggcccggcctcgccgctgcggtcgcccgcctggcatggccaactgggtgttctgtaatcgctgcttccagccgccccacaggacgtcgtgcttcagcctcaccaactgcgggcacgtgtactgcgacgcctgcctcggcaaaggtaaaaagaatgaatgcttgatttgtaaagctccttgtcgtacagttttgctttcaaagcataccgacgcagatatccaggcattcttcatgagcatagacagtctgtgtaagaagtactccagggaaacctcccagattttagaatttcaagaaaaacacaggaagagattgttagccttctatagagaaaagatttctaggttggaagaatcccttaggaagtcagtgctgcagatagaacaactacaaagtatgagatcatcacaacaaacagctttcagcacaataaaaagttcagtttcaacaaaaccacacggatgcctgctgccacctcactcatcagcccccgacagactggagtcgatggaagttgatctctctccttctccgattagaaaatctgagatagcagccggccctgcgagaatctccatgattagtccacctcaagatggacgaatggggccacatctaacagcttctttctgtttcatcccatggttgaccttgtctaagccccctgtgcccggagagtgtgtcatttccagaggttcaccatgtttctgcatagacgtctgtcctcactggctgctcctcctagcgttcagttctggaaggcacggggaactcaccaactctaaaacacttccaatatatgctgaggtacaaagggccgtcttgtttccgttccagcaggctgagggcaccctggacacgttcagaacacccgctgtgtctgttgtgtttcctctttgccaatttgaaaggaaaaagtcattttgatttgcatttatgtgactattaatgattctgagtgttttcaatttattcctctgtgttttttctacaaattatctgctttattcctttgtcatttatgtggaagccctcagtgtgcagg

SEQ ID NO: 26824 - DNA, 5313 bp, Homo sapiens
  source 1..5313: mol_type = unassigned DNA
cagcgcgcggcaggcggcgagctcgggggccgcagaaaatgaaactgaagccgtggtcacgtgacaggacatgtagtatatagcaggctgccagcgactcctgctcttgcttctggatctgcagggcagtcccagcaggacccatggagtgtccttcgtgccagcatgtctccaaggaggaaacccccaagttctgcagccagtgcggagagaggctgcctcctgcagcccccatagcagattctgagaacaataactccacaatggcgtcggcctcggagggtgaaatggagtgtgggcaggagctgaaggaggaagggggcccgtgcttgttcccgggctcagacagttggcaagaaaaccccgaggagccctgttccaaagcctcctggaccgtccaagaaagcaaaaagaagaaaaggaagaagaaaaagaaggggaacaagtccgcttcctcagagctggcttccttgcccctttctcctgccagcccctgtcacctgactttgctttcaaacccgtggcctcaggacacagccctgccccacagccaagcccagcagagtggccccactggccagccgagccagcccccaggcacagccaccacgccactggagggtgacggcctctccgcgcccaccgaggttggcgacagccccctgcaggcccaggctttgggagaggcaggagtggccacaggaagtgaggctcagagcagcccgcaattccaggaccacacggaaggggaggaccaggacgcttccatcccctctgggggcagaggcctgtcccaggaggggaccggtccccccacctctgctggtgaaggccattctaggactgaagatgctgcccaggagctcctgttgcctgagtcaaaaggaggcagctctgagcccgggacagaactgcagaccaccgagcaacaggcaggggcctcagcctctatggcagttgatgctgtagctgagccagccaatgcagttaaaggggccgggaaggaaatgaaagagaagacccagagaatgaaacagccaccagcaaccactcctcctttcaaaacacactgccaggaagctgagaccaagaccaaggacgagatggctgctgctgaagaaaaagtcggtaagaatgaacaaggggagcctgaagacctcaagaagccagaggggaagaacagaagtgcagctgctgtgaaaaacgagaaggagcaaaaaaaccaggaagcagatgtccaggaagtgaaggcaagcacgctgagcccgggtggaggagtcaccgtgttcttccacgccatcatctctcttcatttcccattcaatcctgacctccataaagtcttcatcagaggaggagaagaatttggggagtcaaaatgggacagcaatatctgtgagctgcactacaccagagacttgggtcatgaccgcgttcttgttgaaggcattgtctgcatttccaagaagcacctagataaatacattccttacaagtacgtcatttataatggggaatcttttgagtatgagttcatttacaagcaccagcagaagaagggcgagtacgtcaaccgctgtctgttcataaaatcttcacttctgggctcaggagactggcatcagtactatgacatagtttatatgaagcctcatgggagactccagaaagtcatgaaccacatcacagacgggccgaggaaggacctggtgaaggggaagcagattgccgctgcgctcatgctggacagcaccttcagcatcctgcagacctgggacaccatcaacctgaacagcttcttcacccagttcgagcagttttgctttgtcctgcaacagcctatgatttatgaaggacaggcacagctgtggaccgatttgcagtacagggagaaagaggtgaagagatacctgtggcaacatctgaaaaaacacgtggtaccattgccggacggaaaaagcacggactttttgcctgtggactgcccagtgaggagtaaactgaaaacaggcctgattgtcctttttgtagtggaaaaaattgagcttttattagaaggcagcctggactggttgtgtcacctcctaacctcagatgccagctcaccagatgagtttcaccgtgacctaagccacatccttgggatacctcagagctggcggctgtacctggtgaacctgtgccaaagatgcatggacacaaggacgtacacctggctgggcgccctgcctgtcctgcactgctgtatggagctggccccgcggcacaaggatgcctggagacagcctgaggacacctgggccgctctggagggactctccttctcaccgttccgggaacaaatgctagatacgagttccctacttcagtttatgagagagaagcagcatttgctgagcatagacgagcctctcttccggtcctggtttagtctgctacctctgagtcacctggttatgtatatggaaaacttcattgagcacctgggtcgttttcctgctcatatcctggactgtctttcagggatttactaccggcttccgggacttgagcaagtcttgaatacgcaggatgttcaggatgttcagaacgttcagaacattttagaaatgctgttgcgactcctggacacttaccgggacaagattcccgaggaggccttgtcaccatcctacctgactgtgtgtctgaaactgcatgaagccatctgcagcagcacaaagctacttaagttttacgagctgccagccttatctgccgagattgtctgcagaatgattagacttctatctctggtggattctgcaggacagagagatgaaactggaaataattcagtccaaacagtcttccaagggacccttgctgctacgaaaaggtggctccgagaagtttttacaaagaacatgctcacatcttcaggtgcctcattcacatacgtcaaggaaattgaggtctggaggcggctggtggaaatccaattccccgcggagcatggctggaaggagtcgttgctgggagacatggaatggaggctcacaaaggaggaacccctctcccagatcactgcctactgcaatagttgctgggacaccaaaggcttagaggacagtgtggccaagaccttcgagaaatgcatcattgaagccgtgagctcagcctgccaggtgaacaatctctcctcctgggaaacggattcgggctcacagctgtgttctgccatgacccagctaagggctatgaagcacccgctgggtctcagctcctccgctaactcagagattgggaagtgggcaccctcctccctcgccaagggcaatggcgctgaaatctagttctctccggattcctcagtgtgctgcacagtccctgctgctcgcaccatcctgcatgtgttccatatggaatcacggccgtgcgcgtgtggcacaagtcacacgggcttgcaggccgttcctcagatggccctgtcatcactgtggctgctggtttgattgattgttaacacttgctcagtaggtgtgcgggaagagactccaaaggttgacagaacatttatggaagcaaaatatgtgaaatggaaaattgtatcaatttatttagctcttttcggcaaaggggaagagattgtgcccccctgtctcccaggaacagtctcgcaggcaatgccacatgaggaagctccctgctggccacggctgccctgctcacatttcctaattggacacttaacccctgtacaagcacagccttgcggccacaggggaagtccagaaacattgaggtcattgaattccggggaccaaggggttctaattttttaagtgactgatacctttgataaggttttcctttccctttttcgttaactctttgttgagatattgttcgtatgccatacggtacatctgtcaaaagttccagttcagcaggttttggggtagtcacagatatgtacagtcatcaccacagttaatgacagagcattttcatcacttcaaagagaaacccggcccctttagccatcatcctcctcccctctagtcacccactcccctctgcaggcataaacaattgctgaacataaacaactgcttctgtggctttctctgttctgactgtcatatgaatggaatcatatcatatgtggccttttgggtatggcttatttcactgagcataatgtttttttgttgttggtggtggtggttgtttgttgtttttgagacagagtttcactctttttgcccaggctggagtgcaatggtgcgatcctggctcaccgcaaccgctgcctcccgggttcaagtgattctcctgcctcagcctcccaagtgctggaattacagctactttttgtttaaagagtcttttaattgtttaaagaacaatgtgccgccacactcggttccttttgtatttttagaagagacagggtttctccatgttggtcaggctggtctcgaactcccgacctcaggtgatccacccaccttggcctcccgaagtgccgagattacaggtgtgagccaccgcgcccggccgagcataatgttttgaaagaccgctcaggctggacacggttgctcacgcctgtaatcacggcactttgggagcccaggagttcaagacaagcctgggtaacagagtaagaccctgtctctataaaaactaaaaaataaacaaaaaaaattagccaggcatggccgggcacacctgtggtcccagctacttgggaggctgaggtgggaggctcccttgggcccagaaggtcaaggcagcagtgagccatgatcacaccactgcacttcaacctgggggacagagcaagaccctgtctcaaaaagcaataacaacaaaagtccatccatattgtagcttgtgtccgtttacgttaagtattccttacccaaaatgcttgagaccagaagtgttttggatttcagatgttttcaaattttggaatatttgcatttacataatgagatgtcttccagatgggacccagagtctaaccacaaaattcacttgtttcatatacatcttatacacatagcctgaaggtaattttatacaatatttttaacaattttgtgcatgagacaaagtttgtattaagtatttgtatgttgaatttttcacttgtggcatcattatactcaaaaagtttggattttgtagtattttggatttggggattaggaatgctcaacctatatttcatttttttccatggccaaatattccccgtttatccatgtgtccattgacggccatctatgttgcttcttcggctattataaatctgctgat

SEQ ID NO: 26825 - DNA, 11651 bp, Homo sapiens
  source 1..11651: mol_type = unassigned DNA
atggtctgtgatggggactgggagcactgctacctcccctctgccttcagccagcacaaggtcttcgtcaccccccaggcacccctcgaggccatccaagcctacctggcaggtcactaccgggtcccgaagcagaccctgtcggcggcagccgtgttcaatgaccggctgtgtgttgggatcgtggcctcggagcgagcaggtgttggaaagtctctgtacgtgaagaggttgcacgacaaaatgaagatgcagttaaacgtgaaaaatgtgcctctgaaaacaattcgactgatcgaccctcaggtggatgagagccgagtcctgggcgccctgctgcccttcctggatgcgcagtatcagaaggtccccgtgctctttcacctggacgtgacctcctcagtgcagactggaatttgggtgtttcttttcaagctcctcattttacaatacttaatggatataaatgggaaaatgtggcttcggaacccctgccatttgtatatcgttgaaatcctggaaaggaggacgtcagtgccgtcgaggagctcttcagcgctgcgtacacgtgtaccccagttcagttttcttgacatcttcccaaaagtcacctgcaggcctcccaaagaggtgatagacatggagctgagtgccctgaggagtgacacagagcctgggatggatctgtgggagttctgcagcgaaactttccaaagaccttaccagtatttaagacgattcaatcaaaaccaagacctagacacgtttcagtatcaagaaggctctgtcgaaggcaccccggaggaatgcctccagcatttcctgtttcactgcggggtaataaacccatcctggtcagagcttcggaactttgctcggttcctgaattatcagctcagagattgtgaggcctctctcttctgcaatccgagttttattggcgacacactgaggggcttcaagaagttcgtggtgaccttcatgatctttatggcaagagattttgccacaccatcactccacacctctgaccaaagcccggggaagcacatggtcaccatggatggggttagggaagaagatctagcgcccttctccctccggaagaggtgggagtcggagcctcacccatacgttttcttcaatgacgaccacacaaccatgacattcatcggcttccatctgcagcccaacatcaacggcagtgtcgatgccatcagtcacttgactgggaaggtcatcaagagagacgtcatgaccagggacctgtaccagggcctgctgctccagagggtgcccttcaatgtcgactttgataaactgcccagacacaagaaacttgagaggctctgcctgaccttagggatcccccaggccaccgaccccgacaaaacgtatgagctcacaaccgacaatatgcttaaaatccttgccatcgagatgcggttccggtgtgggatcccggttatcatcatgggagaaactggctgtgggaaaaccaggcttattaaattccttagcgacctgcggcgtggtggtaccaatgctgacaccataaagctggtcaaggtgcacggaggaacaactgcagacatgatctactccagagtcagggaggctgaaaatgtggccttcgccaataaggaccaacatcagttggacaccatcttgttttttgatgaagccaacacaacggaagctataagctgtatcaaagaagtcctgtgtgatcatatggtggatggccagcctctggctgaggactctggcctgcatattatagctgcctgcaatccataccggaagcactctgaggagatgatctgccgtttggagtcagctggtttgggctacagggttagtatggaggagacggccgacaggctgggctccattcctctgaggcagctggtataccgggtccatgctctgcccccgagcctgattcctctggtgtgggactttggacaactgagtgacgttgctgaaaagctctacatccagcagattgtccagagactggttgagtccatcagcctagatgaaaacgggactcgcgtgatcacagaagtcctctgcgcctctcagggtttcatgaggaaaacagaagatgagtgcagctttgtcagcctcagggacgtggagcgctgtgtgaaagttttcaggtggttccacgagcacagcgcgatgctcttagcgcagctgaatgcctttctctccaagtccagcgtcagcaaaaatcacaccgagagagatcccgtcctctggtcgttgatgctggccatcggggtgtgttaccatgcctctttagaaaagaaagactcatatcggaaagccatcgccaggttctttccgaaaccgtatgacgacagcaggctgcttctggatgaaataacacgggcacaggatctttttctggacggcgtacctctgaggaaaaccatcgccaagaacttggccttgaaggagaacgtcttcatgatggtcgtctgcatcgagctgaagattcccctcttcctggtggggaagcccggcagctccaagtctctcgccaagaccatcgtggcagacgccatgcagggcccggctgcctactcagatctcttccgcagcctgaagcaggtccacctggtgtccttccagtgcagcccgcactccaccccacagggcatcatcagcaccttccggcagtgcgcccgctttcagcaggggaaggacctgcagcagtacgtctctgtggtggtgttagatgaggtggggctggcggaagactcacccaaaatgcccctgaagactctgcacccgctgctggaagacggatgcattgaagacgatcccgccccccacaaaaaggtcggcttcgtgggcatctccaactgggcccttgaccctgccaagatgaaccggggcatttttgtgtcacgtggcagccccaacgagacagagctcatagagagcgccaagggcatctgctcctcagacatcctcgtccaggaccgagtccaagggtactttgcgtcctttgccaaagcctacgaaacggtgtgtaagcgccaggacaaggaattcttcgggcttcgtgactactacagcctcatcaaaatggtctttgctgcagcaaaggcttcaaatagaaagccttccccgcaagacattgcacaggctgtccttaggaacttcagtggcaaggatgacatccaagctttggacatctttctggccaatttgcccgaggccaagtgctcagaggaagtcagccccatgcagctgatcaaacagaacatctttgggccttctcagaaggtgccgggtggagagcaggaagatgctgagtcccgctacttactcgtgctgaccaaaaactacgtggcactgcagatcctgcagcagacattcttcgagggggaccagcagccggagattatttttggttctggtttccccaaggaccaagagtacacccagctctgcagaaacatcaatcgtgtgaagatctgcatggaaacaggcaagatggtgttgcttctcaacctgcagaacctctacgagagcctctacgacgcactcaaccagtactacgtccacctcggcggccagaagtacgtggacctcggtctggggacccaccgcgtcaaatgtcgggttcaccccaacttccgcctgattgtcattgaagagaaagacgtcgtgtacaaacactttcccatccccctcattaaccggctggagaagcactatctggatatcaacacggtgctggagaaatggcagaagagcatcgtggaggagctctgtgcgtgggtggagaagttcatcaatgtcaaagcacatcatttccagaagaggcacaaatacagcccctctgacgtcttcatcggctaccactcggacgcctgcgcgtctgtggtgctgcaggtcatagagaggcagggtccccgggccttgacggaggaacttcaccagaaggtgtctgaggaggccaaatcgatcctgctgaactgcgctacgcccgatgccgtggtccggctgagcgcctactcgctgggcgggttcgcagcggagtggctgtcgcaggagtactttcacagacagaggcacaactcctttgcagatttccttcaggcacacctgcacacggcagacctggagcgccacgccatcttcacagagatcaccactttctccaggctgctaacaagtcacgactgtgaaattttagaatcagaggtcacaggcagggctccgaaacccacactcctgtggctgcagcagtttgacaccgagtactcattcctcaaagaagtccgaaactgtttaacgaatacagccaaatgtaaaatcctcatttttcagacagattttgaagatggaatccgtagcgcccagctcattgcctcagctaagtattctgttataaatgaaatcaacaaaatacgagaaaatgaggaccgtatcttcgtctatttcatcacaaaactgtcccgggtgggaagaggaacagcctatgtgggcttccacggagggctgtggcagtctgtccacatcgatgacctccggagatccaccctcatggtttctgatgtgaccaggctgcagcatgtcaccatcagccagctgttcgcgcccggagacttgcctgagctgggcttggaacaccgggcggaagacggccatgaggaggcgatggagacggaggccagcacatcaggggaggtggcagaggtggcagaggaggccatggaaacagaaagttctgagaaggtgggaaaggaaacctctgaactcggaggcagtgatgtgtcgatcctggacaccaccaggctgctgagaagctgtgtgcagagcgccgtgggcatgctcagagaccagaacgagagctgcacgcgcaatatgcggagggtggtgctcctcctgggcctcttgaatgaggatgacgcgtgccacgcctctttcttgcgggtatccaagatgcgcctcagtgtctttttaaagaagcaagaagagagccagtttcaccctctggagtggttggcaagggaagcctgcaaccaggacgctctccaggaggcgggcacattcaggcacaccctctggaagcgggtccaaggtgctgtcacccctctgctggcgagcatgatatcattcatcgacagagacggcaacctagagttactgaccaggccagatactccgccctgggcaagagatctttggatgtttattttcagtgacacgatgcttctgaacattcctcttgtgatgaataatgaaagacataaaggtgagatggcctacatcgtggtgcagaaccacatgaacctttccgagaacgcttccaacaacgtccctttcagctggaaaatcaaggactatctggaggagctgtgggtccaggctcagtacatcacagacgcagaaggactgcccaagaagttcgtggacatctttcagcagactcctctgggcaggtttcttgcccagctccatggagagccgcagcaggaacttcttcagtgttacttgaaggatttcattctcttgaccatgcgtgtgtcaacggaggaggaattaaagtttctgcagatggctctgtggtcctgcactaggaaactgaaagcggcgtcagaagcgcccgaggaagaggtttccttaccgtgggtgcaccttgcctaccagcgtttcagaagccgtctgcagaacttttccagaatcctgaccatctaccctcaggttctccacagcctgatggaagcccgttggaaccatgagctggctggatgtgagatgaccctggacgcatttgccgcaatggcctgcacggagatgctgacaagaaacaccctgaagcccagtccccaggcgtggctacagttggtgaagaatctttccatgccgctggagctcatctgctccgatgagcacatgcaaggcagcgggagcctggcccaggctgtcatcagggaagtcagagcccagtggagtcggattttctccaccgcactcttcgtggagcacgtgctcctaggaaccgagagccgcgtccccgagttacaggggctggtgaccgagcacgtcttcttactagacaagtgtcttcgagagaactctgacgtgaagacgcacgggccttttgaggccgtgatgcgcactctctgtgaatgcaaggagacagccagcaagaccctcagcaggtttgggattcagccgtgctccatctgcctgggagatgcaaaggaccccgtctgtctgccctgcgaccacgtgcactgcctgcgctgcctcagggcctggtttgcctcagagcagatgatatgcccctactgtttaactgccttgccagacgaattctctccagctgtttcccaagcgcacagggaagccattgaaaagcatgcccgcttccggcagatgtgcaacagtttcttcgtagacctggtgtccaccatttgcttcaaggacaacgctccgcctgagaaggaagtgattgagagcctgctctctctcctcttcgtccaaaaggggcgcttaagagatgctgcccagagacactgtgaacacacaaaatctctctctccattcaatgatgttgtggataagactcctgtcatccgctcagtgatactgaaactgcttttgaagtacagctttcatgatgtaaaagattatattcaggaatatttgaccctgttaaaaaagaaagcattcataactgaagataaaactgaactgtacatgctcttcatcaactgcctggaggattcaatacttgagaagaccagtgcttactccagaaatgatgaactgaaccacctagaagaggaaggtcgtttccttaaggcatattctccagcaagccggggccgagagcctgccaacgaggcctcggttgaatacctgcaagaggtggcccggatccgcctctgcctcgacagagctgcagatttcctctcggagcctgagggaggcccagagatggccaaggagaagcagtgctacctgcagcaagtcaagcagttctgtatccgggtggagaacgactggcaccgggtgtacctggtgcggaagctcagcagccagcgggggatggagttcgtgcagggcctctccaagcccggccgcccgcaccagtgggtgtttcccaaggacgttgtcaagcagcaggggctgcggcaggaccacccaggccagatggataggtacctggtgtacggcgatgaatacaaggctctccgtgatgctgtggccaaagctgtcctcgagtgcaagccactgggcattaagactgctctgaaggcctgcaagaccccccaaagccagcagtcagcctacttcctgttaacactgtttagagaggtggctattttgtacagatcccacaatgcaagcctccaccccacgccagagcaatgtgaagctgtgagcaaattcattggcgaatgcaagatcctttcacctcctgatatcagccgttttgcaacatcgctcgtggacaattctgtgccattgttgagggcggggcctagtgacagcaaccttgatggaacggtgacagaaatggccattcatgctgcagccgtccttctgtgtggacagaatgaactcttggagcccctaaagaatctggccttctccccagccaccatggcgcatgcttttcttccaaccatgcctgaagacttgctggctcaagctcggaggtggaagggtctggagcgagtccactggtacacttgtcccaacggccatccttgctccgtgggagagtgtggcaggccgatggaacagagcatctgcattgactgccatgcgccgattggaggcattgaccacaaacctcgggacggctttcatctggtcaaagacaaggcagacagaacgcagaccggccacgtgctgggcaacccgcagcggagagacgtggtgacatgtgaccgagggctgcccccagtggtcttcctccttatccggctactcactcacttggctctgcttctgggagcgtcccagagttcccaggctctgataaacatcattaagcctccagtgagggatccaaaaggctttctgcagcagcacatcctgaaggacctggagcagttggccaagatgctgggacacagtgccgacgagaccatcggcgtggtccacctcgtcctgcgcaggcttctccaagagcagcaccagctctctagcagaaggcttttaaattttgacacagaattgtcaactaaagaaatgaggaacaactgggaaaaggaaatcgcagctgtgatttctcctgaactggagcatctagataaaacccttcccaccatgaataatctcatcagccaagataagcgtatcagctctaaccctgtggccaaaataatatatggtgacccagtgaccttcctgccccacctgccccggaaaagtgtggtccattgctctaagatttggagctgcaggaaaagaattacagttgagtacctccagcacattgtggaacagaaaaatggcaaagaaagagtgcccatcctctggcatttcctgcagaaggaagcagagctgaggctggtaaagttcctgcctgagattttggccttgcaaagggatctagtgaagcagttccagaacgtccagcaagttgaatacagctccatcagaggcttcctcagcaagcacagctcagatgggttgaggcagctgcttcacaacaggatcacagtctttctgtccacatggaacaaactgaggagatcgcttgagacgaacggtgagatcaacctacccaaagactactgcagcactgacttggatctggacactgagtttgagatcctcttgccacgccgacggggcctgggcctctgtgctaccgctctcgtcagctacttgattcgcctacacaatgaaattgtctacgccgtggaaaaactctccaaggaaaacaacagctattccgtggatgccgccgaggtcactgaactgcatgtcatcagttatgaagtggagcgggacctgactccactgattctctccaactgccagtaccaggtggaggagggcagagagaccgtgcaggagttcgatctggagaagattcagcggcagatcgtcagccgcttcctccagggcaagccccggctgagcctcaagggaatacccactctggtgtacagacacgactggaactatgaacatctctttatggacatcaagaacaaaatggcacaggactccctccccagctcggtcattagtgccatcagtggacagctgcagtcctacagcgatgcctgtgaagtgctgtctgtcgtagaagtcactctggggtttctgagcacagctggtggggatccaaacatgcagctgaatgtgtatactcaagacatcctgcaaatgggtgatcagacgattcacgtgttaaaggccttaaacagatgccagttaaaacacaccattgccctctggcagttcctgtctgctcataagtctgaacagctgctgcggctgcacaaagagccatttggggaaatcagttcaaggtacaaagcggatctgagcccggaaaatgctaagctcctcagcacattcctaaatcagactggcctagacgccttcctgctagagctgcacgaaatgataatcttgaaactaaagaacccccaaacccaaaccgaggagcgcttccgccctcagtggagcctgagagacactctcgtaagttacatgcaaactaaagaaagtgaaattcttcctgaaatggcatctcagttcccagaagagatactgctcgccagctgtgtctcagtgtggaaaacagctgctgtgctgaaatggaatcgagaaatgagatagaattatttcctcagctatctttggatgactttggagagaagactcctctctcctcgtctgcggcgtggacttgatcatggactggtgcctttgcattcagaaggagagctgtcagcgtagcaccgaattcaagaccaaggcgtgctacctgagctgacagctttttgaaagccgagctgtttctgaaccatgtacatacatgttctgaaactttctcatcattttatgagtactgttcattgagagatgacaatgaagattagatgaaattggaaataaaccaacattgtttacattccaggagacttgtagctcagccacacacgcagtaatgacctgtgcccgttcgcctctggcactgcccacccctctttttttttttcttctaattctgtactcacaaaagagaatctcattttcttctttcttccattcccttaaattctgagtactgtacatatatttctgggttcccacgatgatgtgaaaaactaccagactgttttttgtcttctcacaaagacaagaaaaatcagggcattttgtgagtgccttaagatcaaactaacaagatctgaccctctcccctcacagtgagccactgccccacttcagagggtaagagccaaaagcctcattgtgaaaggcactggacttggaccagggacaccatcagggccttggttttctcacgcataaaatggagagtggattaatcgccaaagattcttctgatctgacattttgaaattgtgagagaaactagatgactgtaaacttggtcacaggcctggttctggcagttctttgcggacttttttctagcattatgccaaataaacatgcagtctcagtgtgctctcgcatgtatgaatatctagtcctttctgtggttctcagccaagacataaaaactaggactcagagcacatacaaaaccagttatgtttcggaaagagggaaaagagtccccgagcccggatcttgtgctgcttttctcactgacgtgttgccttttttctttacaaaatctgctttgatacttaggacctctctggactaatttctcttcctagacagctcagcacagctattgatatgttagaggcagtatccttaatattcattctaaatgagttaacgacttaacttgaaattgggcctaaggagtgagaactacaaaaatacaaaatgcttgtccaggactcagccatgcacaccttgagcagcgccggcaggaggcacggaaggaactgtgctccgttctcctcactgtcatggtgccaccagtgtctgatgaagggcagagtgacccagactgcaggcagtaactgacttcacacagtccctggcatttagtcatctgtgattgttttatcactctggactgtgcagagccacctgccaccgagatctgcattccgactgcctatgaacgggtgtgggggccgggggctggcttgctgaagtcttcaacttgcactcggagctcctttgatacctcagagctggctgtcaggtggcagctcacacccagactcactggccacacctcagcagggggggagtcgagtgtcagtctctttctgtgaaggctttttttttcctttggcctgggaatttttcccatttttatgaaggggttttaaattgtttcattttgtgtgctgtgcttcaaagccttaactgtcaaatcttgcattatcttgtttgtacagaaatatactggcctagcagaggcaaaaaaaaaaaaaatgaattttattttacttgtcacacctgtcttaataaactggagttttgctgct

SEQ ID NO: 26826 - DNA, 4796 bp, Homo sapiens
  source 1..4796: mol_type = unassigned DNA
cagcgcgcggcaggcggcgagctcgggggccgcagaaaatgaaactgaagccgtggtcacgtgacaggacatgtagtatatagcaggctgccagcgactcctgctcttgcttctggatctgcagggcagtcccagcaggacccatggagtgtccttcgtgccagcatgtctccaaggaggaaacccccaagttctgcagccagtgcggagagaggctgcctcctgcagcccccatagcagattctgagaacaataactccacaatggcgtcggcctcggagggtgaaatggagtgtgggcaggagctgaaggaggaagggggcccgtgcttgttcccgggctcagacagttggcaagaaaaccccgaggagccctgttccaaagcctcctggaccgtccaagaaagcaaaaagaagaaaaggaagaagaaaaagaaggggaacaagtccgcttcctcagagctggcttccttgcccctttctcctgccagcccctgtcacctgactttgctttcaaacccgtggcctcaggacacagccctgccccacagccaagcccagcagagtggccccactggccagccgagccagcccccaggcacagccaccacgccactggagggtgacggcctctccgcgcccaccgaggttggcgacagccccctgcaggcccaggctttgggagaggcaggagtggccacaggaagtgaggctcagagcagcccgcaattccaggaccacacggaaggggaggaccaggacgcttccatcccctctgggggcagaggcctgtcccaggaggggaccggtccccccacctctgctggtgaaggccattctaggactgaagatgctgcccaggagctcctgttgcctgagtcaaaaggaggcagctctgagcccgggacagaactgcagaccaccgagcaacaggcaggggcctcagcctctatggcagttgatgctgtagctgagccagccaatgcagttaaaggggccgggaaggaaatgaaagagaagacccagagaatgaaacagccaccagcaaccactcctcctttcaaaacacactgccaggaagctgagaccaagaccaaggacgagatggctgctgctgaagaaaaagtcggtaagaatgaacaaggggagcctgaagacctcaagaagccagaggggaagaacagaagtgcagctgctgtgaaaaacgagaaggagcaaaaaaaccaggaagcagatgtccaggaagtgaaggcaagcacgctgagcccgggtggaggagtcaccgtgttcttccacgccatcatctctcttcatttcccattcaatcctgacctccataaagtcttcatcagaggaggagaagaatttggggagtcaaaatgggacagcaatatctgtgagctgcactacaccagagacttgggtcatgaccgcgttcttgttgaaggcattgtctgcatttccaagaagcacctagataaatacattccttacaagtacgtcatttataatggggaatcttttgagtatgagttcatttacaagcaccagcagaagaagggcgagtacgtcaaccgctgtctgttcataaaatcttcacttctgggctcaggagactggcatcagtactatgacatagtttatatgaagcctcatgggagactccagaaagtcatgaaccacatcacagacgggccgaggaaggacctggtgaaggggaagcagattgccgctgcgctcatgctggacagcaccttcagcatcctgcagacctgggacaccatcaacctgaacagcttcttcacccagttcgagcagttttgctttgtcctgcaacagcctatgatttatgaaggacaggcacagctgtggaccgatttgcagtacagggagaaagaggtgaagagatacctgtggcaacatctgaaaaaacacgtggtaccattgccggacggaaaaagcacggactttttgcctgtggactgcccagtgaggagtaaactgaaaacaggcctgattgtcctttttgtagtggaaaaaattgagcttttattagaaggcagcctggactggttgtgtcacctcctaacctcagatgccagctcaccagatgagtttcaccgtgacctaagccacatccttgggatacctcagagctggcggctgtacctggtgaacctgtgccaaagatgcatggacacaaggacgtacacctggctgggcgccctgcctgtcctgcactgctgtatggagctggccccgcggcacaaggatgcctggagacagcctgaggacacctgggccgctctggagggactctccttctcaccgttccgggaacaaatgctagatacgagttccctacttcagtttatgagagagaagcagcatttgctgagcatagacgagcctctcttccggtcctggtttagtctgctacctctgagtcacctggttatgtatatggaaaacttcattgagcacctgggtcgttttcctgctcatatcctggactgtctttcagggatttactaccggcttccgggacttgagcaagtcttgaatacgcaggatgttcaggatgttcagaacgttcagaacattttagaaatgctgttgcgactcctggacacttaccgggacaagattcccgaggaggccttgtcaccatcctacctgactgtgtgtctgaaactgcatgaagccatctgcagcagcacaaagctacttaagttttacgagctgccagccttatctgccgagattgtctgcagaatgattagacttctatctctggtggattctgcaggacagagagatgaaactggaaataattcagtccaaacagtcttccaagggacccttgctgctacgaaaaggtggctccgagaagtttttacaaagaacatgctcacatcttcaggtgcctcattcacatacgtcaaggaaattgaggtctggaggcggctggtggaaatccaattccccgcggagcatggctggaaggagtcgttgctgggagacatggaatggaggctcacaaaggaggaacccctctcccagatcactgcctactgcaatagttgctgggacaccaaaggcttagaggacagtgtggccaagaccttcgagaaatgcatcattgaagccgtgagctcagcctgccagtctcagaccagtatccttcaggggttctcttactctgatttgcggaaatttggcatcgtcttgtctgctgtgatcactaagtcctggcctaggaccgcggacaacttcaatgacattttaaagcatctgctcacgttggcagatgtcaagcacgtcttcagattgtgtggaaccgacgagaaaatactagcaaatgtcacagaggatgccaagaggctgatagctgttgccgactctgtgttgacgaaagttgttggtgacctcctaagtggcacgattttagttggacaactggagctgattataaagcacaagaatcagtttcttgacatctggcaactgagggaaaaaagtctttcaccccaggatgaacaatgtgctgtggaggaagcactggattggagaagggaggaactgttacttctaaagaaagagaaaagatgtgttgatagtctcctgaagatgtgtgggaacgtgaaacatctgatacaagtggactttggagtgcttgcagtaagacactcacaagacctcagcagtaaaagattaaatgacaccgtgacagtgagactgtccacctcctcgaactcgcagagggcaacgcattaccacctgagctcccaggtccaagaaatggctgggaagatagacttgctcagagacagccacatcttccagctcttctggcgggaagccgcagagccgctgagtgagcctaaggaggaccaggaagccgcagagttgctgagtgagcccgaagaagaatcagaaaggcacatccttgagcttgaagaggtgtatgactatttgtatcagccttcttacagaaagttcattaagttgcaccaggatctaaagtcaggagaggtcacccttgcagagattgatgtcatcttcaaggactttgtgaataaatacacggacctggattcagaacttaagatcatgtgcaccgtggaccaccaggaccaaagagattggatcaaggaccgagtcgaacagatcaaggaataccatcacctgcaccaggctgtccacgcagccaaggtcatcttgcaggtcaaagagagcctgggactgaacggtgacttcagtgttctcaacactttactaaattttactgataacttcgacgactttcgccgtgaaacactggaccagatcaaccaggagctcatccaggccaaaaagctgctccaggacatcagcgaggcccggtgcaaggggctgcaggctctgtccctgagaaaggagttcatctgctgggtccgggaggctcttggaggcatcaatgagctgaaggtgtttgtggacctggcctccatctcagcgggggagaatgacattgatgtggaccgggtggcctgcttccatgacgctgtgcagggctacgcatccctgctatttaagctggaccccagcgtggacttcagtgcattcatgaagcatctgaaaaagctgtggaaggctctggataaggaccagtacctgcccaggaaactggtgagtcttattctgtctctaatgcagattttgttgaatagagcattgcttagcaacgttagggcagtgactgtggaaatggtggcacacctgtgtggtaggtttgtacacagccgttttcaatga

SEQ ID NO: 26827 - DNA, 17730 bp, Homo sapiens
  source 1..17730: mol_type = unassigned DNA
gacagcgcgcggcaggcggcgagctcgggggccgcagaaaatgaaactgaagccgtggtcacgtgacaggacatgtagtatatagcaggctgccagcgactcctgctcttgcttctggatctgcagggcagtcccagcaggacccatggagtgtccttcgtgccagcatgtctccaaggaggaaacccccaagttctgcagccagtgcggagagaggctgcctcctgcagcccccatagcagattctgagaacaataactccacaatggcgtcggcctcggagggtgaaatggagtgtgggcaggagctgaaggaggaagggggcccgtgcttgttcccgggctcagacagttggcaagaaaaccccgaggagccctgttccaaagcctcctggaccgtccaagaaggagctacatcagaggttttggtagatgctgctgtagacctcatatccgatgaatgggaagctgctaatgccatacccagcaagagaaggaagcaggatgcagccccgcttgaggccgccagcgtgccttctgcagactgtgagcagagcaaaaagaagaaaaggaagaagaaaaagaaggggaacaagtccgcttcctcagagctggcttccttgcccctttctcctgccagcccctgtcacctgactttgctttcaaacccgtggcctcaggacacagccctgccccacagccaagcccagcagagtggccccactggccagccgagccagcccccaggcacagccaccacgccactggagggtgacggcctctccgcgcccaccgaggttggcgacagccccctgcaggcccaggctttgggagaggcaggagtggccacaggaagtgaggctcagagcagcccgcaattccaggaccacacggaaggggaggaccaggacgcttccatcccctctgggggcagaggcctgtcccaggaggggaccggtccccccacctctgctggtgaaggccattctaggactgaagatgctgcccaggagctcctgttgcctgagtcaaaaggaggcagctctgagcccgggacagaactgcagaccaccgagcaacaggcaggggcctcagcctctatggcagttgatgctgtagctgagccagccaatgcagttaaaggggccgggaaggaaatgaaagagaagacccagagaatgaaacagccaccagcaaccactcctcctttcaaaacacactgccaggaagctgagaccaagaccaaggacgagatggctgctgctgaagaaaaagtcggtaagaatgaacaaggggagcctgaagacctcaagaagccagaggggaagaacagaagtgcagctgctgtgaaaaacgagaaggagcaaaaaaaccaggaagcagatgtccaggaagtgaaggcaagcacgctgagcccgggtggaggagtcaccgtgttcttccacgccatcatctctcttcatttcccattcaatcctgacctccataaagtcttcatcagaggaggagaagaatttggggagtcaaaatgggacagcaatatctgtgagctgcactacaccagagacttgggtcatgaccgcgttcttgttgaaggcattgtctgcatttccaagaagcacctagataaatacattccttacaagtacgtcatttataatggggaatcttttgagtatgagttcatttacaagcaccagcagaagaagggcgagtacgtcaaccgctgtctgttcataaaatcttcacttctgggctcaggagactggcatcagtactatgacatagtttatatgaagcctcatgggagactccagaaagtcatgaaccacatcacagacgggccgaggaaggacctggtgaaggggaagcagattgccgctgcgctcatgctggacagcaccttcagcatcctgcagacctgggacaccatcaacctgaacagcttcttcacccagttcgagcagttttgctttgtcctgcaacagcctatgatttatgaaggacaggcacagctgtggaccgatttgcagtacagggagaaagaggtgaagagatacctgtggcaacatctgaaaaaacacgtggtaccattgccggacggaaaaagcacggactttttgcctgtggactgcccagtgaggagtaaactgaaaacaggcctgattgtcctttttgtagtggaaaaaattgagcttttattagaaggcagcctggactggttgtgtcacctcctaacctcagatgccagctcaccagatgagtttcaccgtgacctaagccacatccttgggatacctcagagctggcggctgtacctggtgaacctgtgccaaagatgcatggacacaaggacgtacacctggctgggcgccctgcctgtcctgcactgctgtatggagctggccccgcggcacaaggatgcctggagacagcctgaggacacctgggccgctctggagggactctccttctcaccgttccgggaacaaatgctagatacgagttccctacttcagtttatgagagagaagcagcatttgctgagcatagacgagcctctcttccggtcctggtttagtctgctacctctgagtcacctggttatgtatatggaaaacttcattgagcacctgggtcgttttcctgctcatatcctggactgtctttcagggatttactaccggcttccgggacttgagcaagtcttgaatacgcaggatgttcaggatgttcagaacgttcagaacattttagaaatgctgttgcgactcctggacacttaccgggacaagattcccgaggaggccttgtcaccatcctacctgactgtgtgtctgaaactgcatgaagccatctgcagcagcacaaagctacttaagttttacgagctgccagccttatctgccgagattgtctgcagaatgattagacttctatctctggtggattctgcaggacagagagatgaaactggaaataattcagtccaaacagtcttccaagggacccttgctgctacgaaaaggtggctccgagaagtttttacaaagaacatgctcacatcttcaggtgcctcattcacatacgtcaaggaaattgaggtctggaggcggctggtggaaatccaattccccgcggagcatggctggaaggagtcgttgctgggagacatggaatggaggctcacaaaggaggaacccctctcccagatcactgcctactgcaatagttgctgggacaccaaaggcttagaggacagtgtggccaagaccttcgagaaatgcatcattgaagccgtgagctcagcctgccagtctcagaccagtatccttcaggggttctcttactctgatttgcggaaatttggcatcgtcttgtctgctgtgatcactaagtcctggcctaggaccgcggacaacttcaatgacattttaaagcatctgctcacgttggcagatgtcaagcacgtcttcagattgtgtggaaccgacgagaaaatactagcaaatgtcacagaggatgccaagaggctgatagctgttgccgactctgtgttgacgaaagttgttggtgacctcctaagtggcacgattttagttggacaactggagctgattataaagcacaagaatcagtttcttgacatctggcaactgagggaaaaaagtctttcaccccaggatgaacaatgtgctgtggaggaagcactggattggagaagggaggaactgttacttctaaagaaagagaaaagatgtgttgatagtctcctgaagatgtgtgggaacgtgaaacatctgatacaagtggactttggagtgcttgcagtaagacactcacaagacctcagcagtaaaagattaaatgacaccgtgacagtgagactgtccacctcctcgaactcgcagagggcaacgcattaccacctgagctcccaggtccaagaaatggctgggaagatagacttgctcagagacagccacatcttccagctcttctggcgggaagccgcagagccgctgagtgagcctaaggaggaccaggaagccgcagagttgctgagtgagcccgaagaagaatcagaaaggcacatccttgagcttgaagaggtgtatgactatttgtatcagccttcttacagaaagttcattaagttgcaccaggatctaaagtcaggagaggtcacccttgcagagattgatgtcatcttcaaggactttgtgaataaatacacggacctggattcagaacttaagatcatgtgcaccgtggaccaccaggaccaaagagattggatcaaggaccgagtcgaacagatcaaggaataccatcacctgcaccaggctgtccacgcagccaaggtcatcttgcaggtcaaagagagcctgggactgaacggtgacttcagtgttctcaacactttactaaattttactgataacttcgacgactttcgccgtgaaacactggaccagatcaaccaggagctcatccaggccaaaaagctgctccaggacatcagcgaggcccggtgcaaggggctgcaggctctgtccctgagaaaggagttcatctgctgggtccgggaggctcttggaggcatcaatgagctgaaggtgtttgtggacctggcctccatctcagcgggggagaatgacattgatgtggaccgggtggcctgcttccatgacgctgtgcagggctacgcatccctgctatttaagctggaccccagcgtggacttcagtgcattcatgaagcatctgaaaaagctgtggaaggctctggataaggaccagtacctgcccaggaaactgtgtgactccgccaggaacttggaatggctgaagactgtgaatgagagtcatgggtctgtggaacgctcatccctgaccctggccacggccatcaaccaaagaggcatctatgtgatccaggcgcccaaaggtggccaaaagatttccccagacacggttctgcacttgatccttcctgagagccctggcagccacgaggagtcacgagagtactctttagaggaggtgaaggagcttttgaacaagttgatgctgatgtctggcaagaaggatcgtaacaacacggaagtggagaggttttcagaggtcttctgcagtgtgcagaggctcagccaggccttcatcgacctgcactctgctgggaatatgctgttcaggacgtggatcgccatggcctactgctcccccaagcagggtgtgtccctccaaatggactttggcttggacctggtgacggagcttaaagaaggtggagatgtcactgagctgctggcagccctctgcaggcagatggagcacttccttgacagctggaagagatttgtgacccagaagcgaatggagcacttttacctgaacttctacacggcagagcagctggtttacctgagcactgagctcaggaagcagcccccgagtgatgccgccctaacgatgctatccttcatcaaaagcaactgcaccctgagggatgtcttaagggcctctgtggggtgtgggagtgaggccgccaggtaccgcatgaggagagtcatggaagagctcccgctgatgctcttatcagagttcagcctggtggacaagctgaggatcatcatggagcagtccatgaggtgccttcctgccttcctgcccgactgcctcgacctagagacccttggccactgtctggctcacctggcagggatgggtgggtctcccgtggagcgttgtctcccgagaggtctgcaggtcggccagcccaacctcgtcgtctgtggccactccgaggtgttgccagccgccctggctgtctacatgcaaaccccaagccagcccctgcccacttacgatgaggtgctgctctgcaccccggcaaccacctttgaggaggtggcactgttgctgcgccgctgcctgaccctgggctccctggggcacaaggtctacagcctgctgttcgcagatcagctgagctacgaggtggcacgccaagcggaggagcttttccacaatctgtgcacgcagcagcaccgagaagactaccagctcgtcatggtctgtgatggggactgggagcactgctacctcccctctgccttcagccagcacaaggtcttcgtcaccccccaggcacccctcgaggccatccaagcctacctggcaggtcactaccgggtcccgaagcagaccctgtcggcggcagccgtgttcaatgaccggctgtgtgttgggatcgtggcctcggagcgagcaggtgttggaaagtctctgtacgtgaagaggttgcacgacaaaatgaagatgcagttaaacgtgaaaaatgtgcctctgaaaacaattcgactgatcgaccctcaggtggatgagagccgagtcctgggcgccctgctgcccttcctggatgcgcagtatcagaaggtccccgtgctctttcacctggacgtgacctcctcagtgcagactggaatttgggtgtttcttttcaagctcctcattttacaatacttaatggatataaatgggaaaatgtggcttcggaacccctgccatttgtatatcgttgaaatcctggaaaggaggacgtcagtgccgtcgaggagctcttcagcgctgcgtacacgtgtaccccagttcagttttcttgacatcttcccaaaagtcacctgcaggcctcccaaagaggtgatagacatggagctgagtgccctgaggagtgacacagagcctgggatggatctgtgggagttctgcagcgaaactttccaaagaccttaccagtatttaagacgattcaatcaaaaccaagacctagacacgtttcagtatcaagaaggctctgtcgaaggcaccccggaggaatgcctccagcatttcctgtttcactgcggggtaataaacccatcctggtcagagcttcggaactttgctcggttcctgaattatcagctcagagattgtgaggcctctctcttctgcaatccgagttttattggcgacacactgaggggcttcaagaagttcgtggtgaccttcatgatctttatggcaagagattttgccacaccatcactccacacctctgaccaaagcccggggaagcacatggtcaccatggatggggttagggaagaagatctagcgcccttctccctccggaagaggtgggagtcggagcctcacccatacgttttcttcaatgacgaccacacaaccatgacattcatcggcttccatctgcagcccaacatcaacggcagtgtcgatgccatcagtcacttgactgggaaggtcatcaagagagacgtcatgaccagggacctgtaccagggcctgctgctccagagggtgcccttcaatgtcgactttgataaactgcccagacacaagaaacttgagaggctctgcctgaccttagggatcccccaggccaccgaccccgacaaaacgtatgagctcacaaccgacaatatgcttaaaatccttgccatcgagatgcggttccggtgtgggatcccggttatcatcatgggagaaactggctgtgggaaaaccaggcttattaaattccttagcgacctgcggcgtggtggtaccaatgctgacaccataaagctggtcaaggtgcacggaggaacaactgcagacatgatctactccagagtcagggaggctgaaaatgtggccttcgccaataaggaccaacatcagttggacaccatcttgttttttgatgaagccaacacaacggaagctataagctgtatcaaagaagtcctgtgtgatcatatggtggatggccagcctctggctgaggactctggcctgcatattatagctgcctgcaatccataccggaagcactctgaggagatgatctgccgtttggagtcagctggtttgggctacagggttagtatggaggagacggccgacaggctgggctccattcctctgaggcagctggtataccgggtccatgctctgcccccgagcctgattcctctggtgtgggactttggacaactgagtgacgttgctgaaaagctctacatccagcagattgtccagagactggttgagtccatcagcctagatgaaaacgggactcgcgtgatcacagaagtcctctgcgcctctcagggtttcatgaggaaaacagaagatgagtgcagctttgtcagcctcagggacgtggagcgctgtgtgaaagttttcaggtggttccacgagcacagcgcgatgctcttagcgcagctgaatgcctttctctccaagtccagcgtcagcaaaaatcacaccgagagagatcccgtcctctggtcgttgatgctggccatcggggtgtgttaccatgcctctttagaaaagaaagactcatatcggaaagccatcgccaggttctttccgaaaccgtatgacgacagcaggctgcttctggatgaaataacacgggcacaggatctttttctggacggcgtacctctgaggaaaaccatcgccaagaacttggccttgaaggagaacgtcttcatgatggtcgtctgcatcgagctgaagattcccctcttcctggtggggaagcccggcagctccaagtctctcgccaagaccatcgtggcagacgccatgcagggcccggctgcctactcagatctcttccgcagcctgaagcaggtccacctggtgtccttccagtgcagcccgcactccaccccacagggcatcatcagcaccttccggcagtgcgcccgctttcagcaggggaaggacctgcagcagtacgtctctgtggtggtgttagatgaggtggggctggcggaagactcacccaaaatgcccctgaagactctgcacccgctgctggaagacggatgcattgaagacgatcccgccccccacaaaaaggtcggcttcgtgggcatctccaactgggcccttgaccctgccaagatgaaccggggcatttttgtgtcacgtggcagccccaacgagacagagctcatagagagcgccaagggcatctgctcctcagacatcctcgtccaggaccgagtccaagggtactttgcgtcctttgccaaagcctacgaaacggtgtgtaagcgccaggacaaggaattcttcgggcttcgtgactactacagcctcatcaaaatggtctttgctgcagcaaaggcttcaaatagaaagccttccccgcaagacattgcacaggctgtccttaggaacttcagtggcaaggatgacatccaagctttggacatctttctggccaatttgcccgaggccaagtgctcagaggaagtcagccccatgcagctgatcaaacagaacatctttgggccttctcagaaggtgccgggtggagagcaggaagatgctgagtcccgctacttactcgtgctgaccaaaaactacgtggcactgcagatcctgcagcagacattcttcgagggggaccagcagccggagattatttttggttctggtttccccaaggaccaagagtacacccagctctgcagaaacatcaatcgtgtgaagatctgcatggaaacaggcaagatggtgttgcttctcaacctgcagaacctctacgagagcctctacgacgcactcaaccagtactacgtccacctcggcggccagaagtacgtggacctcggtctggggacccaccgcgtcaaatgtcgggttcaccccaacttccgcctgattgtcattgaagagaaagacgtcgtgtacaaacactttcccatccccctcattaaccggctggagaagcactatctggatatcaacacggtgctggagaaatggcagaagagcatcgtggaggagctctgtgcgtgggtggagaagttcatcaatgtcaaagcacatcatttccagaagaggcacaaatacagcccctctgacgtcttcatcggctaccactcggacgcctgcgcgtctgtggtgctgcaggtcatagagaggcagggtccccgggccttgacggaggaacttcaccagaaggtgtctgaggaggccaaatcgatcctgctgaactgcgctacgcccgatgccgtggtccggctgagcgcctactcgctgggcgggttcgcagcggagtggctgtcgcaggagtactttcacagacagaggcacaactcctttgcagatttccttcaggcacacctgcacacggcagacctggagcgccacgccatcttcacagagatcaccactttctccaggctgctaacaagtcacgactgtgaaattttagaatcagaggtcacaggcagggctccgaaacccacactcctgtggctgcagcagtttgacaccgagtactcattcctcaaagaagtccgaaactgtttaacgaatacagccaaatgtaaaatcctcatttttcagacagattttgaagatggaatccgtagcgcccagctcattgcctcagctaagtattctgttataaatgaaatcaacaaaatacgagaaaatgaggaccgtatcttcgtctatttcatcacaaaactgtcccgggtgggaagaggaacagcctatgtgggcttccacggagggctgtggcagtctgtccacatcgatgacctccggagatccaccctcatggtttctgatgtgaccaggctgcagcatgtcaccatcagccagctgttcgcgcccggagacttgcctgagctgggcttggaacaccgggcggaagacggccatgaggaggcgatggagacggaggccagcacatcaggggaggtggcagaggtggcagaggaggccatggaaacagaaagttctgagaaggtgggaaaggaaacctctgaactcggaggcagtgatgtgtcgatcctggacaccaccaggctgctgagaagctgtgtgcagagcgccgtgggcatgctcagagaccagaacgagagctgcacgcgcaatatgcggagggtggtgctcctcctgggcctcttgaatgaggatgacgcgtgccacgcctctttcttgcgggtatccaagatgcgcctcagtgtctttttaaagaagcaagaagagagccagtttcaccctctggagtggttggcaagggaagcctgcaaccaggacgctctccaggaggcgggcacattcaggcacaccctctggaagcgggtccaaggtgctgtcacccctctgctggcgagcatgatatcattcatcgacagagacggcaacctagagttactgaccaggccagatactccgccctgggcaagagatctttggatgtttattttcagtgacacgatgcttctgaacattcctcttgtgatgaataatgaaagacataaaggtgagatggcctacatcgtggtgcagaaccacatgaacctttccgagaacgcttccaacaacgtccctttcagctggaaaatcaaggactatctggaggagctgtgggtccaggctcagtacatcacagacgcagaaggactgcccaagaagttcgtggacatctttcagcagactcctctgggcaggtttcttgcccagctccatggagagccgcagcaggaacttcttcagtgttacttgaaggatttcattctcttgaccatgcgtgtgtcaacggaggaggaattaaagtttctgcagatggctctgtggtcctgcactaggaaactgaaagcggcgtcagaagcgcccgaggaagaggtttccttaccgtgggtgcaccttgcctaccagcgtttcagaagccgtctgcagaacttttccagaatcctgaccatctaccctcaggttctccacagcctgatggaagcccgttggaaccatgagctggctggatgtgagatgaccctggacgcatttgccgcaatggcctgcacggagatgctgacaagaaacaccctgaagcccagtccccaggcgtggctacagttggtgaagaatctttccatgccgctggagctcatctgctccgatgagcacatgcaaggcagcgggagcctggcccaggctgtcatcagggaagtcagagcccagtggagtcggattttctccaccgcactcttcgtggagcacgtgctcctaggaaccgagagccgcgtccccgagttacaggggctggtgaccgagcacgtcttcttactagacaagtgtcttcgagagaactctgacgtgaagacgcacgggccttttgaggccgtgatgcgcactctctgtgaatgcaaggagacagccagcaagaccctcagcaggtttgggattcagccgtgctccatctgcctgggagatgcaaaggaccccgtctgtctgccctgcgaccacgtgcactgcctgcgctgcctcagggcctggtttgcctcagagcagatgatatgcccctactgtttaactgccttgccagacgaattctctccagctgtttcccaagcgcacagggaagccattgaaaagcatgcccgcttccggcagatgtgcaacagtttcttcgtagacctggtgtccaccatttgcttcaaggacaacgctccgcctgagaaggaagtgattgagagcctgctctctctcctcttcgtccaaaaggggcgcttaagagatgctgcccagagacactgtgaacacacaaaatctctctctccattcaatgatgttgtggataagactcctgtcatccgctcagtgatactgaaactgcttttgaagtacagctttcatgatgtaaaagattatattcaggaatatttgaccctgttaaaaaagaaagcattcataactgaagataaaactgaactgtacatgctcttcatcaactgcctggaggattcaatacttgagaagaccagtgcttactccagaaatgatgaactgaaccacctagaagaggaaggtcgtttccttaaggcatattctccagcaagccggggccgagagcctgccaacgaggcctcggttgaatacctgcaagaggtggcccggatccgcctctgcctcgacagagctgcagatttcctctcggagcctgagggaggcccagagatggccaaggagaagcagtgctacctgcagcaagtcaagcagttctgtatccgggtggagaacgactggcaccgggtgtacctggtgcggaagctcagcagccagcgggggatggagttcgtgcagggcctctccaagcccggccgcccgcaccagtgggtgtttcccaaggacgttgtcaagcagcaggggctgcggcaggaccacccaggccagatggataggtacctggtgtacggcgatgaatacaaggctctccgtgatgctgtggccaaagctgtcctcgagtgcaagccactgggcattaagactgctctgaaggcctgcaagaccccccaaagccagcagtcagcctacttcctgttaacactgtttagagaggtggctattttgtacagatcccacaatgcaagcctccaccccacgccagagcaatgtgaagctgtgagcaaattcattggcgaatgcaagatcctttcacctcctgatatcagccgttttgcaacatcgctcgtggacaattctgtgccattgttgagggcggggcctagtgacagcaaccttgatggaacggtgacagaaatggccattcatgctgcagccgtccttctgtgtggacagaatgaactcttggagcccctaaagaatctggccttctccccagccaccatggcgcatgcttttcttccaaccatgcctgaagacttgctggctcaagctcggaggtggaagggtctggagcgagtccactggtacacttgtcccaacggccatccttgctccgtgggagagtgtggcaggccgatggaacagagcatctgcattgactgccatgcgccgattggaggcattgaccacaaacctcgggacggctttcatctggtcaaagacaaggcagacagaacgcagaccggccacgtgctgggcaacccgcagcggagagacgtggtgacatgtgaccgagggctgcccccagtggtcttcctccttatccggctactcactcacttggctctgcttctgggagcgtcccagagttcccaggctctgataaacatcattaagcctccagtgagggatccaaaaggctttctgcagcagcacatcctgaaggacctggagcagttggccaagatgctgggacacagtgccgacgagaccatcggcgtggtccacctcgtcctgcgcaggcttctccaagagcagcaccagctctctagcagaaggcttttaaattttgacacagaattgtcaactaaagaaatgaggaacaactgggaaaaggaaatcgcagctgtgatttctcctgaactggagcatctagataaaacccttcccaccatgaataatctcatcagccaagataagcgtatcagctctaaccctgtggccaaaataatatatggtgacccagtgaccttcctgccccacctgccccggaaaagtgtggtccattgctctaagatttggagctgcaggaaaagaattacagttgagtacctccagcacattgtggaacagaaaaatggcaaagaaagagtgcccatcctctggcatttcctgcagaaggaagcagagctgaggctggtaaagttcctgcctgagattttggccttgcaaagggatctagtgaagcagttccagaacgtccagcaagttgaatacagctccatcagaggcttcctcagcaagcacagctcagatgggttgaggcagctgcttcacaacaggatcacagtctttctgtccacatggaacaaactgaggagatcgcttgagacgaacggtgagatcaacctacccaaagactactgcagcactgacttggatctggacactgagtttgagatcctcttgccacgccgacggggcctgggcctctgtgctaccgctctcgtcagctacttgattcgcctacacaatgaaattgtctacgccgtggaaaaactctccaaggaaaacaacagctattccgtggatgccgccgaggtcactgaactgcatgtcatcagttatgaagtggagcgggacctgactccactgattctctccaactgccagtaccaggtggaggagggcagagagaccgtgcaggagttcgatctggagaagattcagcggcagatcgtcagccgcttcctccagggcaagccccggctgagcctcaagggaatacccactctggtgtacagacacgactggaactatgaacatctctttatggacatcaagaacaaaatggcacaggactccctccccagctcggtcattagtgccatcagtggacagctgcagtcctacagcgatgcctgtgaagtgctgtctgtcgtagaagtcactctggggtttctgagcacagctggtggggatccaaacatgcagctgaatgtgtatactcaagacatcctgcaaatgggtgatcagacgattcacgtgttaaaggccttaaacagatgccagttaaaacacaccattgccctctggcagttcctgtctgctcataagtctgaacagctgctgcggctgcacaaagagccatttggggaaatcagttcaaggtacaaagcggatctgagcccggaaaatgctaagctcctcagcacattcctaaatcagactggcctagacgccttcctgctagagctgcacgaaatgataatcttgaaactaaagaacccccaaacccaaaccgaggagcgcttccgccctcagtggagcctgagagacactctcgtaagttacatgcaaactaaagaaagtgaaattcttcctgaaatggcatctcagttcccagaagagatactgctcgccagctgtgtctcagtgtggaaaacagctgctgtgctgaaatggaatcgagaaatgagatagaattatttcctcagctatctttggatgactttggagagaagactcctctctcctcgtctgcggcgtggacttgatcatggactggtgcctttgcattcagaaggagagctgtcagcgtagcaccgaattcaagaccaaggcgtgctacctgagctgacagctttttgaaagccgagctgtttctgaaccatgtacatacatgttctgaaactttctcatcattttatgagtactgttcattgagagatgacaatgaagattagatgaaattggaaataaaccaacattgtttacattccaggagacttgtagctcagccacacacgcagtaatgacctgtgcccgttcgcctctggcactgcccacccctctttttttttttcttctaattctgtactcacaaaagagaatctcattttcttctttcttccattcccttaaattctgagtactgtacatatatttctgggttcccacgatgatgtgaaaaactaccagactgttttttgtcttctcacaaagacaagaaaaatcagggcattttgtgagtgccttaagatcaaactaacaagatctgaccctctcccctcacagtgagccactgccccacttcagagggtaagagccaaaagcctcattgtgaaaggcactggacttggaccagggacaccatcagggccttggttttctcacgcataaaatggagagtggattaatcgccaaagattcttctgatctgacattttgaaattgtgagagaaactagatgactgtaaacttggtcacaggcctggttctggcagttctttgcggacttttttctagcattatgccaaataaacatgcagtctcagtgtgctctcgcatgtatgaatatctagtcctttctgtggttctcagccaagacataaaaactaggactcagagcacatacaaaaccagttatgtttcggaaagagggaaaagagtccccgagcccggatcttgtgctgcttttctcactgacgtgttgccttttttctttacaaaatctgctttgatacttaggacctctctggactaatttctcttcctagacagctcagcacagctattgatatgttagaggcagtatccttaatattcattctaaatgagttaacgacttaacttgaaattgggcctaaggagtgagaactacaaaaatacaaaatgcttgtccaggactcagccatgcacaccttgagcagcgccggcaggaggcacggaaggaactgtgctccgttctcctcactgtcatggtgccaccagtgtctgatgaagggcagagtgacccagactgcaggcagtaactgacttcacacagtccctggcatttagtcatctgtgattgttttatcactctggactgtgcagagccacctgccaccgagatctgcattccgactgcctatgaacgggtgtgggggccgggggctggcttgctgaagtcttcaacttgcactcggagctcctttgatacctcagagctggctgtcaggtggcagctcacacccagactcactggccacacctcagcagggggggagtcgagtgtcagtctctttctgtgaaggctttttttttcctttggcctgggaatttttcccatttttatgaaggggttttaaattgtttcattttgtgtgctgtgcttcaaagccttaactgtcaaatcttgcattatcttgtttgtacagaaatatactggcctagcagaggcaaaaaaaaaaaaaatgaattttattttacttgtcacacctgtcttaataaactggagttttgctgctaaagaa

SEQ ID NO: 26828 - DNA, 21055 bp, Homo sapiens
  source 1..21055: mol_type = unassigned DNA
cagcgcgcggcaggcggcgagctcgggggccgcagaaaatgaaactgaagccgtggtcacgtgacaggacatgtagtatatagcaggctgccagcgactcctgctcttgcttctggatctgcagggcagtcccagcaggacccatggagtgtccttcgtgccagcatgtctccaaggaggaaacccccaagttctgcagccagtgcggagagaggctgcctcctgcagcccccatagcagattctgagaacaataactccacaatggcgtcggcctcggagggtgaaatggagtgtgggcaggagctgaaggaggaagggggcccgtgcttgttcccgggctcagacagttggcaagaaaaccccgaggagccctgttccaaagcctcctggaccgtccaagaaagcaaaaagaagaaaaggaagaagaaaaagaaggggaacaagtccgcttcctcagagctggcttccttgcccctttctcctgccagcccctgtcacctgactttgctttcaaacccgtggcctcaggacacagccctgccccacagccaagcccagcagagtggccccactggccagccgagccagcccccaggcacagccaccacgccactggagggtgacggcctctccgcgcccaccgaggttggcgacagccccctgcaggcccaggctttgggagaggcaggagtggccacaggaagtgaggctcagagcagcccgcaattccaggaccacacggaaggggaggaccaggacgcttccatcccctctgggggcagaggcctgtcccaggaggggaccggtccccccacctctgctggtgaaggccattctaggactgaagatgctgcccaggagctcctgttgcctgagtcaaaaggaggcagctctgagcccgggacagaactgcagaccaccgagcaacaggcaggggcctcagcctctatggcagttgatgctgtagctgagccagccaatgcagttaaaggggccgggaaggaaatgaaagagaagacccagagaatgaaacagccaccagcaaccactcctcctttcaaaacacactgccaggaagctgagaccaagaccaaggacgagatggctgctgctgaagaaaaagtcggtaagaatgaacaaggggagcctgaagacctcaagaagccagaggggaagaacagaagtgcagctgctgtgaaaaacgagaaggagcaaaaaaaccaggaagcagatgtccaggaagtgaaggcaagcacgctgagcccgggtggaggagtcaccgtgttcttccacgccatcatctctcttcatttcccattcaatcctgacctccataaagtcttcatcagaggaggagaagaatttggggagtcaaaatgggacagcaatatctgtgagctgcactacaccagagacttgggtcatgaccgcgttcttgttgaaggcattgtctgcatttccaagaagcacctagataaatacattccttacaagtacgtcatttataatggggaatcttttgagtatgagttcatttacaagcaccagcagaagaagggcgagtacgtcaaccgctgtctgttcataaaatcttcacttctgggctcaggagactggcatcagtactatgacatagtttatatgaagcctcatgggagactccagaaagtcatgaaccacatcacagacgggccgaggaaggacctggtgaaggggaagcagattgccgctgcgctcatgctggacagcaccttcagcatcctgcagacctgggacaccatcaacctgaacagcttcttcacccagttcgagcagttttgctttgtcctgcaacagcctatgatttatgaaggacaggcacagctgtggaccgatttgcagtacagggagaaagaggtgaagagatacctgtggcaacatctgaaaaaacacgtggtaccattgccggacggaaaaagcacggactttttgcctgtggactgcccagtgaggagtaaactgaaaacaggcctgattgtcctttttgtagtggaaaaaattgagcttttattagaaggcagcctggactggttgtgtcacctcctaacctcagatgccagctcaccagatgagtttcaccgtgacctaagccacatccttgggatacctcagagctggcggctgtacctggtgaacctgtgccaaagatgcatggacacaaggacgtacacctggctgggcgccctgcctgtcctgcactgctgtatggagctggccccgcggcacaaggatgcctggagacagcctgaggacacctgggccgctctggagggactctccttctcaccgttccgggaacaaatgctagatacgagttccctacttcagtttatgagagagaagcagcatttgctgagcatagacgagcctctcttccggtcctggtttagtctgctacctctgagtcacctggttatgtatatggaaaacttcattgagcacctgggtcgttttcctgctcatatcctggactgtctttcagggatttactaccggcttccgggacttgagcaagtcttgaatacgcaggatgttcaggatgttcagaacgttcagaacattttagaaatgctgttgcgactcctggacacttaccgggacaagattcccgaggaggccttgtcaccatcctacctgactgtgtgtctgaaactgcatgaagccatctgcagcagcacaaagctacttaagttttacgagctgccagccttatctgccgagattgtctgcagaatgattagacttctatctctggtggattctgcaggacagagagatgaaactggaaataattcagtccaaacagtcttccaagggacccttgctgctacgaaaaggtggctccgagaagtttttacaaagaacatgctcacatcttcaggtgcctcattcacatacgtcaaggaaattgaggtctggaggcggctggtggaaatccaattccccgcggagcatggctggaaggagtcgttgctgggagacatggaatggaggctcacaaaggaggaacccctctcccagatcactgcctactgcaatagttgctgggacaccaaaggcttagaggacagtgtggccaagaccttcgagaaatgcatcattgaagccgtgagctcagcctgccagtctcagaccagtatccttcaggggttctcttactctgatttgcggaaatttggcatcgtcttgtctgctgtgatcactaagtcctggcctaggaccgcggacaacttcaatgacattttaaagcatctgctcacgttggcagatgtcaagcacgtcttcagattgtgtggaaccgacgagaaaatactagcaaatgtcacagaggatgccaagaggctgatagctgttgccgactctgtgttgacgaaagttgttggtgacctcctaagtggcacgattttagttggacaactggagctgattataaagcacaagaatcagtttcttgacatctggcaactgagggaaaaaagtctttcaccccaggatgaacaatgtgctgtggaggaagcactggattggagaagggaggaactgttacttctaaagaaagagaaaagatgtgttgatagtctcctgaagatgtgtgggaacgtgaaacatctgatacaagtggactttggagtgcttgcagtaagacactcacaagacctcagcagtaaaagattaaatgacaccgtgacagtgagactgtccacctcctcgaactcgcagagggcaacgcattaccacctgagctcccaggtccaagaaatggctgggaagatagacttgctcagagacagccacatcttccagctcttctggcgggaagccgcagagccgctgagtgagcctaaggaggaccaggaagccgcagagttgctgagtgagcccgaagaagaatcagaaaggcacatccttgagcttgaagaggtgtatgactatttgtatcagccttcttacagaaagttcattaagttgcaccaggatctaaagtcaggagaggtcacccttgcagagattgatgtcatcttcaaggactttgtgaataaatacacggacctggattcagaacttaagatcatgtgcaccgtggaccaccaggaccaaagagattggatcaaggaccgagtcgaacagatcaaggaataccatcacctgcaccaggctgtccacgcagccaaggtcatcttgcaggtcaaagagagcctgggactgaacggtgacttcagtgttctcaacactttactaaattttactgataacttcgacgactttcgccgtgaaacactggaccagatcaaccaggagctcatccaggccaaaaagctgctccaggacatcagcgaggcccggtgcaaggggctgcaggctctgtccctgagaaaggagttcatctgctgggtccgggaggctcttggaggcatcaatgagctgaaggtgtttgtggacctggcctccatctcagcgggggagaatgacattgatgtggaccgggtggcctgcttccatgacgctgtgcagggctacgcatccctgctatttaagctggaccccagcgtggacttcagtgcattcatgaagcatctgaaaaagctgtggaaggctctggataaggaccagtacctgcccaggaaactgtgtgactccgccaggaacttggaatggctgaagactgtgaatgagagtcatgggtctgtggaacgctcatccctgaccctggccacggccatcaaccaaagaggcatctatgtgatccaggcgcccaaaggtggccaaaagatttccccagacacggttctgcacttgatccttcctgagagccctggcagccacgaggagtcacgagagtactctttagaggaggtgaaggagcttttgaacaagttgatgctgatgtctggcaagaaggatcgtaacaacacggaagtggagaggttttcagaggtcttctgcagtgtgcagaggctcagccaggccttcatcgacctgcactctgctgggaatatgctgttcaggacgtggatcgccatggcctactgctcccccaagcagggtgtgtccctccaaatggactttggcttggacctggtgacggagcttaaagaaggtggagatgtcactgagctgctggcagccctctgcaggcagatggagcacttccttgacagctggaagagatttgtgacccagaagcgaatggagcacttttacctgaacttctacacggcagagcagctggtttacctgagcactgagctcaggaagcagcccccgagtgatgccgccctaacgatgctatccttcatcaaaagcaactgcaccctgagggatgtcttaagggcctctgtggggtgtgggagtgaggccgccaggtaccgcatgaggagagtcatggaagagctcccgctgatgctcttatcagagttcagcctggtggacaagctgaggatcatcatggagcagtccatgaggtgccttcctgccttcctgcccgactgcctcgacctagagacccttggccactgtctggctcacctggcagggatgggtgggtctcccgtggagcgttgtctcccgagaggtctgcaggtcggccagcccaacctcgtcgtctgtggccactccgaggtgttgccagccgccctggctgtctacatgcaaaccccaagccagcccctgcccacttacgatgaggtgctgctctgcaccccggcaaccacctttgaggaggtggcactgttgctgcgccgctgcctgaccctgggctccctggggcacaaggtctacagcctgctgttcgcagatcagctgagctacgaggtggcacgccaagcggaggagcttttccacaatctgtgcacgcagcagcaccgagaagactaccagctcgtcatggtctgtgatggggactgggagcactgctacctcccctctgccttcagccagcacaaggtcttcgtcaccccccaggcacccctcgaggccatccaagcctacctggcaggtcactaccgggtcccgaagcagaccctgtcggcggcagccgtgttcaatgaccggctgtgtgttgggatcgtggcctcggagcgagcaggtgttggaaagtctctgtacgtgaagaggttgcacgacaaaatgaagatgcagttaaacgtgaaaaatgtgcctctgaaaacaattcgactgatcgaccctcaggtggatgagagccgagtcctgggcgccctgctgcccttcctggatgcgcagtatcagaaggtccccgtgctctttcacctggacgtgacctcctcagtgcagactggaatttgggtgtttcttttcaagctcctcattttacaatacttaatggatataaatgggaaaatgtggcttcggaacccctgccatttgtatatcgttgaaatcctggaaaggaggacgtcagtgccgtcgaggagctcttcagcgctgcgtacacgtgtaccccagttcagttttcttgacatcttcccaaaagtcacctgcaggcctcccaaagaggtgatagacatggagctgagtgccctgaggagtgacacagagcctgggatggatctgtgggagttctgcagcgaaactttccaaagaccttaccagtatttaagacgattcaatcaaaaccaagacctagacacgtttcagtatcaagaaggctctgtcgaaggcaccccggaggaatgcctccagcatttcctgtttcactgcggggtaataaacccatcctggtcagagcttcggaactttgctcggttcctgaattatcagctcagagattgtgaggcctctctcttctgcaatccgagttttattggcgacacactgaggggcttcaagaagttcgtggtgaccttcatgatctttatggcaagagattttgccacaccatcactccacacctctgaccaaagcccggggaagcacatggtcaccatggatggggttagggaagaagatctagcgcccttctccctccggaagaggtgggagtcggagcctcacccatacgttttcttcaatgacgaccacacaaccatgacattcatcggcttccatctgcagcccaacatcaacggcagtgtcgatgccatcagtcacttgactgggaaggtcatcaagagagacgtcatgaccagggacctgtaccagggcctgctgctccagagggtgcccttcaatgtcgactttgataaactgcccagacacaagaaacttgagaggctctgcctgaccttagggatcccccaggccaccgaccccgacaaaacgtatgagctcacaaccgacaatatgcttaaaatccttgccatcgagatgcggttccggtgtgggatcccggttatcatcatgggagaaactggctgtgggaaaaccaggcttattaaattccttagcgacctgcggcgtggtggtaccaatgctgacaccataaagctggtcaaggtgcacggaggaacaactgcagacatgatctactccagagtcagggaggctgaaaatgtggccttcgccaataaggaccaacatcagttggacaccatcttgttttttgatgaagccaacacaacggaagctataagctgtatcaaagaagtcctgtgtgatcatatggtggatggccagcctctggctgaggactctggcctgcatattatagctgcctgcaatccataccggaagcactctgaggagatgatctgccgtttggagtcagctggtttgggctacagggttagtatggaggagacggccgacaggctgggctccattcctctgaggcagctggtataccgggtccatgctctgcccccgagcctgattcctctggtgtgggactttggacaactgagtgacgttgctgaaaagctctacatccagcagattgtccagagactggttgagtccatcagcctagatgaaaacgggactcgcgtgatcacagaagtcctctgcgcctctcagggtttcatgaggaaaacagaagatgagtgcagctttgtcagcctcagggacgtggagcgctgtgtgaaagttttcaggtggttccacgagcacagcgcgatgctcttagcgcagctgaatgcctttctctccaagtccagcgtcagcaaaaatcacaccgagagagatcccgtcctctggtcgttgatgctggccatcggggtgtgttaccatgcctctttagaaaagaaagactcatatcggaaagccatcgccaggttctttccgaaaccgtatgacgacagcaggctgcttctggatgaaataacacgggcacaggatctttttctggacggcgtacctctgaggaaaaccatcgccaagaacttggccttgaaggagaacgtcttcatgatggtcgtctgcatcgagctgaagattcccctcttcctggtggggaagcccggcagctccaagtctctcgccaagaccatcgtggcagacgccatgcagggcccggctgcctactcagatctcttccgcagcctgaagcaggtccacctggtgtccttccagtgcagcccgcactccaccccacagggcatcatcagcaccttccggcagtgcgcccgctttcagcaggggaaggacctgcagcagtacgtctctgtggtggtgttagatgaggtggggctggcggaagactcacccaaaatgcccctgaagactctgcacccgctgctggaagacggatgcattgaagacgatcccgccccccacaaaaaggtcggcttcgtgggcatctccaactgggcccttgaccctgccaagatgaaccggggcatttttgtgtcacgtggcagccccaacgagacagagctcatagagagcgccaagggcatctgctcctcagacatcctcgtccaggaccgagtccaagggtactttgcgtcctttgccaaagcctacgaaacggtgtgtaagcgccaggacaaggaattcttcgggcttcgtgactactacagcctcatcaaaatggtctttgctgcagcaaaggcttcaaatagaaagccttccccgcaagacattgcacaggctgtccttaggaacttcagtggcaaggatgacatccaagctttggacatctttctggccaatttgcccgaggccaagtgctcagaggaagtcagccccatgcagctgatcaaacagaacatctttgggccttctcagaaggtgccgggtggagagcaggaagatgctgagtcccgctacttactcgtgctgaccaaaaactacgtggcactgcagatcctgcagcagacattcttcgagggggaccagcagccggagattatttttggttctggtttccccaaggaccaagagtacacccagctctgcagaaacatcaatcgtgtgaagatctgcatggaaacaggcaagatggtgttgcttctcaacctgcagaacctctacgagagcctctacgacgcactcaaccagtactacgtccacctcggcggccagaagtacgtggacctcggtctggggacccaccgcgtcaaatgtcgggttcaccccaacttccgcctgattgtcattgaagagaaagacgtcgtgtacaaacactttcccatccccctcattaaccggctggagaagcactatctggatatcaacacggtgctggagaaatggcagaagagcatcgtggaggagctctgtgcgtgggtggagaagttcatcaatgtcaaagcacatcatttccagaagaggcacaaatacagcccctctgacgtcttcatcggctaccactcggacgcctgcgcgtctgtggtgctgcaggtcatagagaggcagggtccccgggccttgacggaggaacttcaccagaaggtgtctgaggaggccaaatcgatcctgctgaactgcgctacgcccgatgccgtggtccggctgagcgcctactcgctgggcgggttcgcagcggagtggctgtcgcaggagtactttcacagacagaggcacaactcctttgcagatttccttcaggcacacctgcacacggcagacctggagcgccacgccatcttcacagagatcaccactttctccaggctgctaacaagtcacgactgtgaaattttagaatcagaggtcacaggcagggctccgaaacccacactcctgtggctgcagcagtttgacaccgagtactcattcctcaaagaagtccgaaactgtttaacgaatacagccaaatgtaaaatcctcatttttcagacagattttgaagatggaatccgtagcgcccagctcattgcctcagctaagtattctgttataaatgaaatcaacaaaatacgagaaaatgaggaccgtatcttcgtctatttcatcacaaaactgtcccgggtgggaagaggaacagcctatgtgggcttccacggagggctgtggcagtctgtccacatcgatgacctccggagatccaccctcatggtttctgatgtgaccaggctgcagcatgtcaccatcagccagctgttcgcgcccggagacttgcctgagctgggcttggaacaccgggcggaagacggccatgaggaggcgatggagacggaggccagcacatcaggggaggtggcagaggtggcagaggaggccatggaaacagaaagttctgagaaggtgggaaaggaaacctctgaactcggaggcagtgatgtgtcgatcctggacaccaccaggctgctgagaagctgtgtgcagagcgccgtgggcatgctcagagaccagaacgagagctgcacgcgcaatatgcggagggtggtgctcctcctgggcctcttgaatgaggatgacgcgtgccacgcctctttcttgcgggtatccaagatgcgcctcagtgtctttttaaagaagcaagaagagagccagtttcaccctctggagtggttggcaagggaagcctgcaaccaggacgctctccaggaggcgggcacattcaggcacaccctctggaagcgggtccaaggtgctgtcacccctctgctggcgagcatgatatcattcatcgacagagacggcaacctagagttactgaccaggccagatactccgccctgggcaagagatctttggatgtttattttcagtgacacgatgcttctgaacattcctcttgtgatgaataatgaaagacataaaggtgagatggcctacatcgtggtgcagaaccacatgaacctttccgagaacgcttccaacaacgtccctttcagctggaaaatcaaggactatctggaggagctgtgggtccaggctcagtacatcacagacgcagaaggactgcccaagaagttcgtggacatctttcagcagactcctctgggcaggtttcttgcccagctccatggagagccgcagcaggaacttcttcagtgttacttgaaggatttcattctcttgaccatgcgtgtgtcaacggaggaggaattaaagtttctgcagatggctctgtggtcctgcactaggaaactgaaagcggcgtcagaagcgcccgaggaagaggtttccttaccgtgggtgcaccttgcctaccagcgtttcagaagccgtctgcagaacttttccagaatcctgaccatctaccctcaggttctccacagcctgatggaagcccgttggaaccatgagctggctggatgtgagatgaccctggacgcatttgccgcaatggcctgcacggagatgctgacaagaaacaccctgaagcccagtccccaggcgtggctacagttggtgaagaatctttccatgccgctggagctcatctgctccgatgagcacatgcaaggcagcgggagcctggcccaggctgtcatcagggaagtcagagcccagtggagtcggattttctccaccgcactcttcgtggagcacgtgctcctaggaaccgagagccgcgtccccgagttacaggggctggtgaccgagcacgtcttcttactagacaagtgtcttcgagagaactctgacgtgaagacgcacgggccttttgaggccgtgatgcgcactctctgtgaatgcaaggagacagccagcaagaccctcagcaggtttgggattcagccgtgctccatctgcctgggagatgcaaaggaccccgtctgtctgccctgcgaccacgtgcactgcctgcgctgcctcagggcctggtttgcctcagagcagatgatatgcccctactgtttaactgccttgccagacgaattctctccagctgtttcccaagcgcacagggaagccattgaaaagcatgcccgcttccggcagatgtgcaacagtttcttcgtagacctggtgtccaccatttgcttcaaggacaacgctccgcctgagaaggaagtgattgagagcctgctctctctcctcttcgtccaaaaggggcgcttaagagatgctgcccagagacactgtgaacacacaaaatctctctctccattcaatgatgttgtggataagactcctgtcatccgctcagtgatactgaaactgcttttgaagtacagctttcatgatgtaaaagattatattcaggaatatttgaccctgttaaaaaagaaagcattcataactgaagataaaactgaactgtacatgctcttcatcaactgcctggaggattcaatacttgagaagaccagtgcttactccagaaatgatgaactgaaccacctagaagaggaaggtcgtttccttaaggcatattctccagcaagccggggccgagagcctgccaacgaggcctcggttgaatacctgcaagaggtggcccggatccgcctctgcctcgacagagctgcagatttcctctcggagcctgagggaggcccagagatggccaaggagaagcagtgctacctgcagcaagtcaagcagttctgtatccgggtggagaacgactggcaccgggtgtacctggtgcggaagctcagcagccagcgggggatggagttcgtgcagggcctctccaagcccggccgcccgcaccagtgggtgtttcccaaggacgttgtcaagcagcaggggctgcggcaggaccacccaggccagatggataggtacctggtgtacggcgatgaatacaaggctctccgtgatgctgtggccaaagctgtcctcgagtgcaagccactgggcattaagactgctctgaaggcctgcaagaccccccaaagccagcagtcagcctacttcctgttaacactgtttagagaggtggctattttgtacagatcccacaatgcaagcctccaccccacgccagagcaatgtgaagctgtgagcaaattcattggcgaatgcaagatcctttcacctcctgatatcagccgttttgcaacatcgctcgtggacaattctgtgccattgttgagggcggggcctagtgacagcaaccttgatggaacggtgacagaaatggccattcatgctgcagccgtccttctgtgtggacagaatgaactcttggagcccctaaagaatctggccttctccccagccaccatggcgcatgcttttcttccaaccatgcctgaagacttgctggctcaagctcggaggtggaagggtctggagcgagtccactggtacacttgtcccaacggccatccttgctccgtgggagagtgtggcaggccgatggaacagagcatctgcattgactgccatgcgccgattggaggcattgaccacaaacctcgggacggctttcatctggtcaaagacaaggcagacagaacgcagaccggccacgtgctgggcaacccgcagcggagagacgtggtgacatgtgaccgagggctgcccccagtggtcttcctccttatccggctactcactcacttggctctgcttctgggagcgtcccagagttcccaggctctgataaacatcattaagcctccagtgagggatccaaaaggctttctgcagcagcacatcctgaaggacctggagcagttggccaagatgctgggacacagtgccgacgagaccatcggcgtggtccacctcgtcctgcgcaggcttctccaagagcagcaccagctctctagcagaaggcttttaaattttgacacagaattgtcaactaaagaaatgaggaacaactgggaaaaggaaatcgcagctgtgatttctcctgaactggagcatctagataaaacccttcccaccatgaataatctcatcagccaagataagcgtatcagctctaaccctgtggccaaaataatatatggtgacccagtgaccttcctgccccacctgccccggaaaagtgtggtccattgctctaagatttggagctgcaggaaaagaattacagttgagtacctccagcacattgtggaacagaaaaatggcaaagaaagagtgcccatcctctggcatttcctgcagaaggaagcagagctgaggctggtaaagttcctgcctgagattttggccttgcaaagggatctagtgaagcagttccagaacgtccagcaagttgaatacagctccatcagaggcttcctcagcaagcacagctcagatgggttgaggcagctgcttcacaacaggatcacagtctttctgtccacatggaacaaactgaggagatcgcttgagacgaacggtgagatcaacctacccaaagactactgcagcactgacttggatctggacactgagtttgagatcctcttgccacgccgacggggcctgggcctctgtgctaccgctctcgtcagctacttgattcgcctacacaatgaaattgtctacgccgtggaaaaactctccaaggaaaacaacagctattccgtggatgccgccgaggtcactgaactgcatgtcatcagttatgaagtggagcgggacctgactccactgattctctccaactgccagtaccaggtggaggagggcagagagaccgtgcaggagttcgatctggagaagattcagcggcagatcgtcagccgcttcctccagggcaagccccggctgagcctcaagggaatacccactctggtgtacagacacgactggaactatgaacatctctttatggacatcaagaacaaaatggcacaggactccctccccagctcggtcattagtgccatcagtggacagctgcagtcctacagcgatgcctgtgaagtgctgtctgtcgtagaagtcactctggggtttctgagcacagctggtggggatccaaacatgcagctgaatgtgtatactcaagacatcctgcaaatgggtgatcagacgattcacgtgttaaaggccttaaacagatgccagttaaaacacaccattgccctctggcagttcctgtctgctcataagtctgaacagctgctgcggctgcacaaagagccatttggggaaatcagttcaaggtacaaagcggatctgagcccggaaaatgctaagctcctcagcacattcctaaatcagactggcctagacgccttcctgctagagctgcacgaaatgataatcttgaaactaaagaacccccaaacccaaaccgaggagcgcttccgccctcagtggagcctgagagacactctcgtaagttacatgcaaactaaagaaagtgaaattcttcctgaaatggcatctcagttcccagaagagatactgctcgccagctgtgtctcagtgtggaaaacagctgctgtgctgaaatggaatcgagaaatgagatagaattatttcctcagctatctttggatgactttggagagaagactcctctctcctcgtctgcggcgtggacttgatcatggactggtgcctttgcattcagaaggagagctgtcagcgtagcaccgaattcaagaccaaggcgtgctacctgagctgacagctttttgaaagccgagctgtttctgaaccatgtacatacatgttctgaaactttctcatcattttatgagtactgttcattgagagatgacaatgaagattagatgaaattggaaataaaccaacattgtttacattccaggagacttgtagctcagccacacacgcagtaatgacctgtgcccgttcgcctctggcactgcccacccctctttttttttttcttctaattctgtactcacaaaagagaatctcattttcttctttcttccattcccttaaattctgagtactgtacatatatttctgggttcccacgatgatgtgaaaaactaccagactgttttttgtcttctcacaaagacaagaaaaatcagggcattttgtgagtgccttaagatcaaactaacaagatctgaccctctcccctcacagtgagccactgccccacttcagagggtaagagccaaaagcctcattgtgaaaggcactggacttggaccagggacaccatcagggccttggttttctcacgcataaaatggagagtggattaatcgccaaagattcttctgatctgacattttgaaattgtgagagaaactagatgactgtaaacttggtcacaggcctggttctggcagttctttgcggacttttttctagcattatgccaaataaacatgcagtctcagtgtgctctcgcatgtatgaatatctagtcctttctgtggttctcagccaagacataaaaactaggactcagagcacatacaaaaccagttatgtttcggaaagagggaaaagagtccccgagcccggatcttgtgctgcttttctcactgacgtgttgccttttttctttacaaaatctgctttgatacttaggacctctctggactaatttctcttcctagacagctcagcacagctattgatatgttagaggcagtatccttaatattcattctaaatgagttaacgacttaacttgaaattgggcctaaggagtgagaactacaaaaatacaaaatgcttgtccaggactcagccatgcacaccttgagcagcgccggcaggaggcacggaaggaactgtgctccgttctcctcactgtcatggtgccaccagtgtctgatgaagggcagagtgacccagactgcaggcagtaactgacttcacacagtccctggcatttagtcatctgtgattgttttatcactctggactgtgcagagccacctgccaccgagatctgcattccgactgcctatgaacgggtgtgggggccgggggctggcttgctgaagtcttcaacttgcactcggagctcctttgatacctcagagctggctgtcaggtggcagctcacacccagactcactggccacacctcagcagggggggagtcgagtgtcagtctctttctgtgaaggctttttttttcctttggcctgggaatttttcccatttttatgaaggggttttaaattgtttcattttgtgtgctgtgcttcaaagccttaactgtcaaatcttgcattatcttgtttgtacagaaatatactggcctagcagaggcaaaaaaaaaaaaaatgaattttattttacttgtcacacctgtcttaataaactggagttttgctgctaaagaactcttctctctgggggcagagcttctatttatggcacatagacatcagctaggcttttgggaatcgtttgtgttctttgtggaaatgtcctttagaagcacccatgaagtagtgtgttcagactgtgcacacagaaaacaggctctgccttcacatgtgagacggtggacttttcctctggacaaaatgacagcatcctggcgactccacagtggagctgagcgccactccctgtagccgatctgggactgaaacgcttacacctctgcctcagaaggagtcccccatgccctgcctgaaatgacttcactggacacagcggggctgcagctaacggggtacaggtaggagctaactaacttcacccctgagtccacttgcggggtaagagataaacagtaacccttccaggagcccactgacgttggagtgctaaaaatgccccttcagggggaaaactgcattttctcttccaaaaaggaaaggttcttccaggcgagaaacctgtggtctagaaccacagcaagaagaggaggcatgctggcctgcaccggaagactcactttgtctgccctgcgccagcctcacctcaccctgcagttcccgtttccgccatggatgcctcatcaccaaccctgaccttccccctcccaaccctttattcatcctcactcccactcatacccgcctccctggacagttccctgctgcagagttctttctgctttcagccctaccttggtggtgatttacctgaaaatcttcacaactgatcattatctccttctctttgagacctgactgaaaaaattaggtgtgcacacctgtaatcccagctacctgggaggctgaggtatgaggattgcttgagcctgggagtttgaggctgcagtgagctatgattgcaccactgcactccaacctgggtgacagagtgagaccctgtctcaaaaaaaaataaaataaggaccttattgtgtgtgcaaattatttgcctttcatgaatagttatgagactttgtgcatgtgttaaccgagacggccctgagctatttcagttactcctgtatgttcaggcaattccaatttagaaacaaacttccagtgataaatattgggaagaaaatgtcagctcagggccaagtaggtaaagccacccaagtctagccatgcacacaggcactagtgtgctgaaggaaaacacctctgatttgatacataaagtgtgaaggttgcataactggggaggtggctggagaaaacctgagcctcgagctgagtaacaatccaagccatgattagcatttatattgcattctgcattattctcatcctatcacgttcattaagttcaaccattaccattacgaatcccgtttccagctggaaaaacaagcgccaggaaagtgcatttcccccccaccccccccccccaaccagagcaactttggtcagaagtcacacctaatcaccctctctgcaggatatgctggggatagcccttttgaggaggtgggggtgtatgcgaaagcaacctggggccaaagcagggggaagcaggagagactggaggggccctgggtccagcaagtgctccaccaggctgcccctgctcaggtgctccacagcccataaaaaacgccttcagccctgctgtgcttcccctcacacctaaacttactataagggtcctaccttccccagtattccttcatgatcactgctacctgtgccctgaagcgcaacagaacctcaacccagaggacagccacttcctcagaacccacgatctttgccccatcgccacaggtccatgagtgactcctaattaccaaatccaagggctccttcaccctgaccactctggaacccaacaaagctgacacacagcccagcccagacaggcctgaatgtgggtcctggctctcccatttgccagttctacagccatgggcaagtggctcgacctctctaagcttcagtttcctcgtctgtgaaatatctgtcagtgctcttaagggaggagaccaccccacatattgtcttacgcccaatttctgcctccaaagagagaagtaaaaactaaaaggcagaaatgaaatccacaagcagacagcctgcaccacaccctgggcctggtagttaaagatcgacgcctgacctaatcagtgatgctatctatagattacagacattatatagaaaagcaccgtgaaaatccctgtcctgttctgttccgttctaattacgggtgcatgcagcccccagtcacgtaccccctgcttgctcaatcaatcacgaccctctcacgcagaccccttaagagttgtgagcccttaaaagggacaggaattgctcactcggggagctcagttgttggagacatgagtcttgccgaagcgcccggctgaataaagcccttctttaactcgtgtctgaggggttttctctgcagcttgtcctgctacatttcttggttccctgaccaggaatctaggtgattaatggatggttgaggcagcccctcagacggcttaggcctgccctgtggagcatccctgtggaggactccagccagcttgagcgacatggatcctgagagcgctctcaggcaggcaattgccccagtggaatgcctggccagagcagtgtgtagcaggcccccgaggaggatcaacgcagtggctgaacaccgggaaggaactgccacttggagtccagacatctgaaacttggtaagactggtctttggaacttgcccactccatttgaggggaagcgtggcctgatcacccacggcgtgcctgtactggcactctggtttttgtttttgacttgacttggattgcttgatactttggttttggttttgacctgacttggatatcctgatactctgattttggttttgattttggtttggtgtaaactgtaaaagtgtgtgtgtgccctttttacctgttctttgttttgtggtatgcgtgtagggtgagcgtaatgttttgtcttgaagaagcatgggtcaagcacaaagtaagaccaccccactaggaactatgctgaaaaatttcaggaaaggatttaagggagactatggagtactatgacaccaggaaaacttaaaactttgtgtaagatagactggccagcattagaggtaggttggccatcagagtgaagcctggacaggtcccttgtttcaaaggtatggcacaaggtaacctgtaagccagggtacccacaccagttcccgtacacagacacttggttacagctggttttagactccccacccgcccgccccaacagtggttgagagaacagcagcataagtggctggcagaggcaaggaaagaccagcagagagagaaagaggaagagacagacaaagagggagtcagagagagagagagaaagagacagaggcaaaaggaaagtcaaagagaaagagacagaaaatcaagaggaaaaaaa

SEQ ID NO: 26829 - DNA, 3293 bp, Homo sapiens
  source 1..3293: mol_type = unassigned DNA
agtacccggagtgcctctatggttcttcctgtccttagtcgggagggggcgctgtgcgcaggcgcgaggtgacgccgcggcagggccggaaggagtgcagcggctgccacggagctcgcagctgcggcttctgaggagtaagcggcgcggtagcgaaggccgccgaacctgcctggctagccggcgacttgagtgacgattcttttgaaacagatggtcaccatgtttagatattagcagtcccatatatgcatgtctgcatttgaaaatggaagagggaaacaacaatgaagaggtaattcacttgaacaactttcactgccatcggggacaagagtggatcaatctccgagatgggcccatcaccatatctgactcctcagatgaggaaaggattccaatgctggtcaccccagctcctcagcagcatgaagaagaggacctggatgatgatgtcatcctgacagaaacaaataaacctcagagatcacgacccaatctcatcaaaccagctgcccagtggcaagatctgaaaaggttgggagaagaaaggcctaaaaagtctagagcagcatttgaatcagataagagcagctatttttcagtgtgtaacaacccattgtttgattctggggcacaggatgattctgaggatgactacggtgaatttctggatcttgggcctcctggaatctctgaattcactaagccaagtggccaaacagaaagagaacccaagcctggaccgagtcataaccaagcagcaaatgacattgtcaaccccagatcagagcagaaagtcatcatcttggaagaaggtagccttctttacacagaaagcgatcctttggaaactcagaaccagtcatccgaagactcagagacagagctgttatcaaatctaggagagtcagctgctctagcagatgatcaggccatcgaagaagactgctggttagatcatccttacttccagtctctgaaccaacagccccgtgaaataacaaaccaggtcgttcctcaggaacggcagcctgaagcagaactgggccgcttgttgtttcagcatgaattcccagggcccgcttttccaaggccggaaccccagcaaggtgggatttcaggcccctcttctcctcagcctgcccatcctctaggagagtttgaagaccagcagttagcaagtgatgatgaagagccaggtccagcctttccaatgcaagaatctcaagagcccaatttggaaaacatttgggggcaagaagctgcagaggtagatcaagagctcgttgaactactagtgaaagaaacggaagcaagatttccagatgtagcaaatgggtttattgaggaaataattcattttaagaattattatgatctgaatgtactttgtaattttcttctggaaaacccagattatccaaagagagaagacagaatcattataaatcccagtagcagtctgctggccagccaagatgagacaaagttgcctaaaatagacttttttgactattctaaattgacccctcttgaccagcgctgcttcatccaagctgctgacctcctcatggccgacttcaaagtgctcagtagtcaggacatcaagtgggccctgcacgagctcaaaggacactatgcaatcacccgaaaggccttgtctgatgccattaaaaaatggcaggagctgtcaccagaaaccagtggaaaaaggaagaagagaaaacaaatgaaccagtattcttacattgatttcaagtttgaacaaggtgacataaaaatagaaaagaggatgttctttcttgaaaataagcgacgacattgtaggtcctatgaccgacgtgctctccttccagctgtgcaacaagagcaggagttctatgagcagaaaatcaaagagatggcagagcatgaagactttttgcttgccctacagatgaatgaagaacagtatcaaaaggatggccagctgattgagtgtcgctgctgctatggggaatttccattcgaggagctgacgcagtgcgcagatgctcacttgttctgcaaagagtgtctcatcagatatgcccaagaggcagtctttggatctggaaagttggagctcagctgcatggaaggcagctgcacgtgttcgttcccaaccagtgagctggagaaggtgctcccccagaccatcctgtataagtactatgagcgaaaagccgaggaggaggttgcggcagcctacgccgacgagcttgtcaggtgcccgtcctgtagctttccggctctgttggacagtgatgtgaagaggttcagctgtcctaatcctcactgccgaaaggaaacctgtaggaagtgtcagggactctggaaagaacataatggcctcacctgtgaagagctggctgaaaaagacgacatcaagtaccgtacctctattgaagaaaaaatgactgctgcccgcattagaaaatgccacaagtgtgggactggcctcatcaaatctgaaggctgcaaccgcatgtcttgccgctgtggtgcccagatgtgctacctctgtcgagtttctattaatggatatgaccatttctgccaacatccccgctcaccaggagccccttgccaggagtgttcaagatgctctctctggaccgatcccactgaagatgatgagaagcttattgaggaaatccagaaggaggctgaagaggaacagaaaagaaagaatggagagaacaccttcaaacgcattggacccccgctggagaagcctgtggagaaggtgcagagggtggaggccctcccgaggcccgttccgcagaacctgccacagccacagatgccaccctatgccttcgcgcacccacccttccccctgcctcccgtgcggcctgtgttcaacaacttcccactcaacatggggcctatcccagccccgtacgtgccccctctgcccaacgtgcgggtcaactatgacttcggtcccatccacatgcccctggagcacaacctgcccatgcactttggcccccagccgcggcatcgcttctgatggccccgaatccccattgagcagcacaaagcccgtttggggtaggagtgtggatggagaaccctcccccaaggctggtgtctgtaccattgcatcctaagtcagcttgaagggtaggctggttttcttcccacccctttcctagaagggctactgctcctggaagagtggacggatccataataaagacgtcccaaatggtggagttcggagagagctgcgatgtgaactgcccctcccctcgcatccccca

SEQ ID NO: 26830 - DNA, 570 bp, Homo sapiens
  source 1..570: mol_type = unassigned DNA
agctgcggcttctgaggagtaagcggcgcggtagcgaaggccgccgaacctgcctggctagccggcgacttgagtgacgacatcaccatcctgtggtcacctgatctcagcgtctaggtcaactttgattcctttcttcttgccctgatggccagtgacatacacagatcccatcgactctaactctgcagtcagtgtcttgtattcttctcctccccctaggccatgtttcctgactctggttctatggccatggtgaataacagctccagtctttgacagaggaagaagtttttggagccactcgttcaacaactgtgctaggcattggaaatacaactataagtaagaaaagaggccaggcacagtgacttacgactgtaatctcaccactttgcctctggaacaggacccaaggacattatcattatacagctatctgttcttttgaaacagatggtcaccatgtttagatattagcagtcccatatatgcatgtctgcatttgaaaatggaagagggaaacaacaatgaagaggtaattcacttgaacaactttcactgccatcg

SEQ ID NO: 26831 - DNA, 5639 bp, Homo sapiens
  source 1..5639: mol_type = unassigned DNA
agggggcgctgtgcgcaggcgcgaggtgacgccgcggcagggccggaaggagtgcagcggctgccacggagctcgcagctgcggcttctgaggagtaagcggcgcggtagcgaaggccgccgaacctgcctggctagccggcgacttgagtgacgattcttttgaaacagatggtcaccatgtttagatattagcagtcccatatatgcatgtctgcatttgaaaatggaagagggaaacaacaatgaagaggtaattcacttgaacaactttcactgccatcggggacaagagtggatcaatctccgagatgggcccatcaccatatctgactcctcagatgaggaaaggattccaatgctggtcaccccagctcctcagcagcatgaagaagaggacctggatgatgatgtcatcctgacagaagatgattctgaggatgactacggtgaatttctggatcttgggcctcctggaatctctgaattcactaagccaagtggccaaacagaaagagaacccaagcctggaccgagtcataaccaagcagcaaatgacattgtcaaccccagatcagagcagaaagtcatcatcttggaagaaggtagccttctttacacagaaagcgatcctttggaaactcagaaccagtcatccgaagactcagagacagagctgttatcaaatctaggagagtcagctgctctagcagatgatcaggccatcgaagaagactgctggttagatcatccttacttccagtctctgaaccaacagccccgtgaaataacaaaccaggtcgttcctcaggaacggcagcctgaagcagaactgggccgcttgttgtttcagcatgaattcccagggcccgcttttccaaggccggaaccccagcaaggtgggatttcaggcccctcttctcctcagcctgcccatcctctaggagagtttgaagaccagcagttagcaagtgatgatgaagagccaggtccagcctttccaatgcaagaatctcaagagcccaatttggaaaacatttgggggcaagaagctgcagaggtagatcaagagctcgttgaactactagtgaaagaaacggaagcaagatttccagatgtagcaaatgggtttattgaggaaataattcattttaagaattattatgatctgaatgtactttgtaattttcttctggaaaacccagattatccaaagagagaagacagaatcattataaatcccagtagcagtctgctggccagccaagatgagacaaagttgcctaaaatagacttttttgactattctaaattgacccctcttgaccagcgctgcttcatccaagctgctgacctcctcatggccgacttcaaagtgctcagtagtcaggacatcaagtgggccctgcacgagctcaaaggacactatgcaatcacccgaaaggccttgtctgatgccattaaaaaatggcaggagctgtcaccagaaaccagtggaaaaaggaagaagagaaaacaaatgaaccagtattcttacattgatttcaagtttgaacaaggtgacataaaaatagaaaagaggatgttctttcttgaaaataagcgacgacattgtaggtcctatgaccgacgtgctctccttccagctgtgcaacaagagcaggagttctatgagcagaaaatcaaagagatggcagagcatgaagactttttgcttgccctacagatgaatgaagaacagtatcaaaaggatggccagctgattgagtgtcgctgctgctatggggaatttccattcgaggagctgacgcagtgcgcagatgctcacttgttctgcaaagagtgtctcatcagatatgcccaagaggcagtctttggatctggaaagttggagctcagctgcatggaaggcagctgcacgtgttcgttcccaaccagtgagctggagaaggtgctcccccagaccatcctgtataagtactatgagcgaaaagccgaggaggaggttgcggcagcctacgccgacgagcttgtcaggtgcccgtcctgtagctttccggctctgttggacagtgatgtgaagaggttcagctgtcctaatcctcactgccgaaaggaaacctgtaggaagtgtcagggactctggaaagaacataatggcctcacctgtgaagagctggctgaaaaagacgacatcaagtaccgtacctctattgaagaaaaaatgactgctgcccgcattagaaaatgccacaagtgtgggactggcctcatcaaatctgaaggctgcaaccgcatgtcttgccgctgtggtgcccagatgtgctacctctgtcgagtttctattaatggatatgaccatttctgccaacatccccgctcaccaggagccccttgccaggagtgttcaagatgctctctctggaccgatcccactgaagatgatgagaagcttattgaggaaatccagaaggaggctgaagaggaacagaaaagaaagaatggagagaacaccttcaaacgcattggacccccgctggagaagcctgtggagaaggtgcagagggtggaggccctcccgaggcccgttccgcagaacctgccacagccacagatgccaccctatgccttcgcgcacccacccttccccctgcctcccgtgcggcctgtgttcaacaacttcccactcaacatggggcctatcccagccccgtacgtgccccctctgcccaacgtgcgggtcaactatgacttcggtcccatccacatgcccctggagcacaacctgcccatgcactttggcccccagccgcggcatcgcttctgatggccccgaatccccattgagcagcacaaagcccgtttggggtaggagtgtggatggagaaccctcccccaaggctggtgtctgtaccattgcatcctaagtcagcttgaagggtaggctggttttcttcccacccctttcctagaagggctactgctcctggaagagtggacggatccataataaagacgtcccaaatggtggagttcggagagagctgcgatgtgaactgcccctcccctcgcatcccccaggccaccaacggcagtccttctgccttgtccatggcataggccatagaccaggtccctgctgctcacacctgggcctctcctcggagccgacccctgggtagcaaggcagccgagagcatctccctggaggggcccacggttgggccaagggcagagggggctgcacctgcgggcctgggaagcattgctcagggtggggggctgggaccatggcccgcagaggcactgccacagctgtgagggccaagatgctgtccccccatccaaaacccgtgcgccactgcagtgagtgttgagggcacctctcctcccctcttacacctactcagatgaggcagcagcagacccatctcgcggcgggggttttgttctgttgccgcctaactttctcatcctcggtctctggaaagtcaggctgagaaatcctttcccaggccaggccgctgcggtacactggatggttctgaagctggcccattgaaagagcctcttaaggcagctgggacagaggcctggtggccctgctgggcagcccaactgctgggggagacgtttctgccaccctgggtgatgagcagcttttcccccctggctttctgggggaggagtgggcctccttagggagacaggtgaccctgggtgccacccctgccccgtgtgtgccccgggtgttctcagtggttgctgaaggcaggtagagggtgctgtccagtatcccccatgtgaaggtcacttcccttctcatggagtcagctgagcatcagctcagccctgccatgtccccactcaccctcctcgcctcctgtccggccctgggtttctagcggtgcctgaggcatcactctggcccattgacagatgagaggtctgaagccttcctggccacaggcatcactttctcctcctcctcatgccctgccttgtccttgtcgtgttgccatggggttctgagaggctgggagttcacagacctcagacacagctgagtccgacaaccattggggtggggctgcatcagtctccggagtggcccgccacctcctgaagcagggcctggcccacccaaggtgcctggggcaggcgggcaccgtcattcgctgccattggcttctcagatgtatttcaaggactaaagtgggctctaagatctaagatggcccggcgcggtggctcccgcctgtaatcccagcactttgggaggccgaggcgggcggatgagttgaggtcgggagtttgagtccccgtctctactaaaaatacaaaattagccggacaaggtggcgcatgcctataatcccaggtactcaggaggctgaggcaggagaatcacttgaacctgggaggcagaggttgcagtgagccaagattgtgccactgcactccagcctgagcaacaaaagcaaaactctatctttaaaaaaaaaaaaaaaaaaactaagatacccattctttctgcctttgcccaggatggaggctttgaagacaggtggtcacctggacctggggtaagggtgcgcagggaggccgggcttgggggcagcctgctgctatgtccttgctggcgcccatacctgttggactgcctgaactttgctactagcctgaacgacagtgccttggaaaggcaggctccatgcggcagcaacaggattgtcttcggtaccttaaatatgctccctgtgcttccccagggaggatctctgggagcagagggcggctgtagacatcacagctgaagaggtgacctcaggccctgggagcctcagctccctctgccctgtaccctaggcacgtggctccagcaagagccccaggcaggacaaagggagcaggcagcagctgcagaaacagccctagacaggtgctggcctcaaccctggcaggggagggggagcccagagtgatgtttctcctaaggccaaaccccaggggtgggtcatttgagaggagttccagctgttctggccacactgggctggtggggaaggagcggcggcctctttccttggagggtccctgattcctgaggatcctccccgagccaggcacgggggaccacagggctgccgtgagcacccaccctggttctccaggcccctctgtccagaggcagggcctgaacctcgggctcctgcctggaccagtgacagcattggggagagaagcactgggggtcttcagaccagccagcaaggggccgtgccagtgcccagagagcaggtcagacaacaggcaaccctgaggcagctggctccctctctctgccctgcagggcttgccgcagggcgtgaggctccccagccacagccccctcttacttgccttaaaactggagagaggaatctagtatttgcacttagcaaaatatttaaaaactgaaaaaaatgtgcatgatctgtcactttgtataaaaacaagaaacgattagttcattaaactttttctttaccttctggtagtaaaaatagataaaataattccgtttcaactactgtgtgtaaaaagcctgtatcatatgtaactgggacttttgtaaataaatgtttgtgcgctctgctc

SEQ ID NO: 26832 - DNA, 2286 bp, Homo sapiens
  source 1..2286: mol_type = unassigned DNA
aggagtgcagcggctgccacggagctcgcagctgcggcttctgaggagtaagcggcgcggtagcgaaggccgccgaacctgcctggctagccggcgacttgagtgacgattcttttgaaacagatggtcaccatgtttagatattagcagtcccatatatgcatgtctgcatttgaaaatggaagagggaaacaacaatgaagaggtaattcacttgaacaactttcactgccatcggggacaagagtggatcaatctccgagatgggcccatcaccatatctgactcctcagatgaggaaaggattccaatgctggtcaccccagctcctcagcagcatgaagaagaggacctggatgatgatgtcatcctgacagaaacaaataaacctcagagatcacgacccaatctcatcaaaccagctgcccagtggcaagaagctgcagaggtagatcaagagctcgttgaactactagtgaaagaaacggaagcaagatttccagatgtagcaaatgggtttattgaggaaataattcattttaagaattattatgatctgaatgtactttgtaattttcttctggaaaacccagattatccaaagagagaagacagaatcattataaatcccagtagcagtctgctggccagccaagatgagacaaagttgcctaaaatagacttttttgactattctaaattgacccctcttgaccagcgctgcttcatccaagctgctgacctcctcatggccgacttcaaagtgctcagtagtcaggacatcaagtgggccctgcacgagctcaaaggacactatgcaatcacccgaaaggccttgtctgatgccattaaaaaatggcaggagctgtcaccagaaaccagtggaaaaaggaagaagagaaaacaaatgaaccagtattcttacattgatttcaagtttgaacaaggtgacataaaaatagaaaagaggatgttctttcttgaaaataagcgacgacattgtaggtcctatgaccgacgtgctctccttccagctgtgcaacaagagcaggagttctatgagcagaaaatcaaagagatggcagagcatgaagactttttgcttgccctacagatgaatgaagaacagtatcaaaaggatggccagctgattgagtgtcgctgctgctatggggaatttccattcgaggagctgacgcagtgcgcagatgctcacttgttctgcaaagagtgtctcatcagatatgcccaagaggcagtctttggatctggaaagttggagctcagctgcatggaaggcagctgcacgtgttcgttcccaaccagtgagctggagaaggtgctcccccagaccatcctgtataagtactatgagcgaaaagccgaggaggaggttgcggcagcctacgccgacgagcttgtcaggtgcccgtcctgtagctttccggctctgttggacagtgatgtgaagaggttcagctgtcctaatcctcactgccgaaaggaaacctgtaggaagtgtcagggactctggaaagaacataatggcctcacctgtgaagagctggctgaaaaagacgacatcaagtaccgtacctctattgaagaaaaaatgactgctgcccgcattagaaaatgccacaagtgtgggactggcctcatcaaatctgaaggctgcaaccgcatgtcttgccgctgtggtgcccagatgtgctacctctgtcgagtttctattaatggatatgaccatttctgccaacatccccgctcaccaggagccccttgccaggagtgttcaagatgctctctctggaccgatcccactgaagatgatgagaagcttattgaggaaatccagaaggaggctgaagaggaacagaaaagaaagaatggagagaacaccttcaaacgcattggacccccgctggagaagcctgtggagaaggtgcagagggtggaggccctcccgaggcccgttccgcagaacctgccacagccacagatgccaccctatgccttcgcgcacccacccttccccctgcctcccgtgcggcctgtgttcaacaacttcccactcaacatggggcctatcccagccccgtacgtgccccctctgcccaacgtgcgggtcaactatgacttcggtcccatccacatgcccctggagcacaacctgcccatgcactttggcccccagccgcggcatcgcttctgatggccccgaatccccattgagcagcacaaagcccgtttggggtaggagtgtggatggagaaccctccccca

SEQ ID NO: 26833 - DNA, 3341 bp, Homo sapiens
  source 1..3341: mol_type = unassigned DNA
ctggggtttgggggaccgagccgctccgggttcgggatgctgaggagaccgcgggcccgcgccagcctcccacacacacacactctcccggcgcctcggccggccgggcgcggtgtgcaggggtgaggcggtgtctccaggctgaggagggacgcggaggagggtccggcgcggccccgggactggagggtgagtccctcacaaagggcggagcggggctgtcacctggagatcacggagggaagttcatccatgagctcggatttcccacattacaacttcaggatgcctaatattggattccagaatctgcctctcaacatatatattgtggtttttggtactgctatatttgtcttcatccttagtttactcttctgttgctacttgattaggctaagacatcaagcacacaaagaattttatgcctacaaacaggttatattaaaagagaaagtaaaagaattgaatttacatgagctctgtgcagtgtgcctagaagacttcaagcctcgagatgagttggggatttgcccatgtaagcacgccttccacagaaagtgccttattaagtggctggaggttcgtaaagtgtgtcccctgtgcaacatgccagttctacagctggcccagttgcacagtaagcaggaccgtggaccccctcaggggccccttcctggggcagagaacattgtatagcttaccgcaaggatcagactgttgctggacacgacgtctgtgtggagccaggaggaacacatgtggtgtctgtatggctgctctctacctaggacaccagctgccacttcttttgcctcatgaagaactcttgggccagccaaactgggaacctaggtgtctgggtcttgtgacaaccaaagcactttgacactaccccctgccgagagaagaggagtggatgagcctgcgggtttgcctcaagaaacttcatgagggtctcttactaactccattacactctctctcctggagcctcatctccatgtcaagcaggagggtaaagaagggaactaagagcaggtctttcaagccacacccccacctgcggatggatgggtttctctgtaggccatgcaggcctttgtcgcagcaaaccttcccagcagcccttgagccaagtaaaaccagcacaaccagccaccagtggttggtgaggcagtgcccacaaggctcatgttgtatgcctttgataaggccatcttggctttgagtagcagtgttcctcgtcacccatttccccctcaggattacaacacctgctatcaaatcatctaagctgaaaacatgagatgcgcttggaaaggcctagtcagaagccatttcctcttatcatttccctctcctatgcaccagtaaggcccgtccagagccccagcagggagtgggccctgagtccacactgtccctgagtgatccaggaggctgcccacatccccacatgtgcactgtggttccagtgtagctgctgtgagcccactgccactgcctcagaagggagccactgtgaacctctcgagtggctccaaagagcagtggctttttgagaatggcccatacttctggcccggctggatgaagggaatgccgaccctttggcctctccccctccttccatctcttctctctcttgccctatctctctttctacttcagaaaaaaaaaaaaaaaaaaaaaaaagcctgtcattcactttttaacactttatcccaaataagatccctgtgtaattctgaagctggtgatccacttggaattgtagatagtttcaggaagctcctgcagggctgtccaccgttggtgtgtgcctcagtatttggacttccgaaactgaaagtgaaagtgtctttataggagagaaacgcatgctgctctttggctctttctgtccaacttttctagaaatgactcaaagtccattaagatttgtgaatattgtataaattagctatggaaagtagcaggtcagatggaaaattcttttccacagccctgctctccgcctccctccatcttaggagcgcctgcctcaattcctcgtcaactgctttgctccactccatcccacaggtgtgagtgggggaagtttttcattaggaatacagtctgcgtgacatggagaatggatggagggagctttgctactctgctcttggcatgactccaggatttttttctggaatccaacctctgtcctcttaggagaaggaacctgtccttggttcagatggctgggcatgaggaggaaaatttccattagtgtagaacagtgctggacagaatccggtttggaaaattacaaatccagttggtcaaaataggccatttcctatgtgtgacctattcgtggtatgccaactggactgcttcctaaacaggacgaggaaagtgaggaatatttttatatgaaagccttagcctgtctggcacccatgaaaaaaactatttatgcactcctactttcaccgtctttttgcattctctatttgtagcacaacagagttgaatgccacaaaacaccccgtttatagtgagctgttttcagtgaccaatatcagaaggaggcttgcttctggactagcctcactaattgccagcagccaccattttccatggaatggccttgggacagatgtcacctctgttatggggctctaataggaaagagaatgttttttcccttcctatgatcaatactgcaaattattgctgctcacagcttttataggattctcccaactgaaagttgcaggctttttctgtccctgtgcatcagtactaacaaaagacagcctcaccaagtctgtatatttgaacagaggcaagttaattcatccccccgtgtcagagccacaggcatgttgagggggttgatacgtagcactggaccagggcgcaaagcccagatagttccagccatgagaggagagcacaagaatgctctgcactctgcactcagcaccaccttgggtctgctttgcccagatgagggaccactaacaaccttctcagcacatgtgaatgtggactggttttaaaatgcattcattctgctaggattgggctggaagctggaacagtgagagtactttttctgctcctagtcatctccctttctcagcgtgacatcctcctgcagcaagcctagtatcactagcagtagttcctgcgactcttagcaacacaacccgaatatttgctccctgcatctgggtcctccaccaggatgggcctgcgcatctgcattgctgtacagacaaacaggccttttaatttacatcctcctttaattctcattaaaatcgcagggtttttgtttgaaa

SEQ ID NO: 26834 - DNA, 3242 bp, Homo sapiens
  source 1..3242: mol_type = unassigned DNA
gcccctcgcgaggggccgccgggcgcagtcagccgccgccacctccgccgcgctctgtccggacggacgctcgccgcccgcagcctgccgcccgccgcagggcgctgacggtcccgcacgtctgccgctgccaccggcgcgcccgattcatccatgagctcggatttcccacattacaacttcaggatgcctaatattggattccagaatctgcctctcaacatatatattgtggtttttggtactgctatatttgtcttcatccttagtttactcttctgttgctacttgattaggctaagacatcaagcacacaaagaattttatgcctacaaacaggttatattaaaagagaaagtaaaagaattgaatttacatgagctctgtgcagtgtgcctagaagacttcaagcctcgagatgagttggggatttgcccatgtaagcacgccttccacagaaagtgccttattaagtggctggaggttcgtaaagtgtgtcccctgtgcaacatgccagttctacagctggcccagttgcacagtaagcaggaccgtggaccccctcaggggccccttcctggggcagagaacattgtatagcttaccgcaaggatcagactgttgctggacacgacgtctgtgtggagccaggaggaacacatgtggtgtctgtatggctgctctctacctaggacaccagctgccacttcttttgcctcatgaagaactcttgggccagccaaactgggaacctaggtgtctgggtcttgtgacaaccaaagcactttgacactaccccctgccgagagaagaggagtggatgagcctgcgggtttgcctcaagaaacttcatgagggtctcttactaactccattacactctctctcctggagcctcatctccatgtcaagcaggagggtaaagaagggaactaagagcaggtctttcaagccacacccccacctgcggatggatgggtttctctgtaggccatgcaggcctttgtcgcagcaaaccttcccagcagcccttgagccaagtaaaaccagcacaaccagccaccagtggttggtgaggcagtgcccacaaggctcatgttgtatgcctttgataaggccatcttggctttgagtagcagtgttcctcgtcacccatttccccctcaggattacaacacctgctatcaaatcatctaagctgaaaacatgagatgcgcttggaaaggcctagtcagaagccatttcctcttatcatttccctctcctatgcaccagtaaggcccgtccagagccccagcagggagtgggccctgagtccacactgtccctgagtgatccaggaggctgcccacatccccacatgtgcactgtggttccagtgtagctgctgtgagcccactgccactgcctcagaagggagccactgtgaacctctcgagtggctccaaagagcagtggctttttgagaatggcccatacttctggcccggctggatgaagggaatgccgaccctttggcctctccccctccttccatctcttctctctcttgccctatctctctttctacttcagaaaaaaaaaaaaaaaaaaaaaaaagcctgtcattcactttttaacactttatcccaaataagatccctgtgtaattctgaagctggtgatccacttggaattgtagatagtttcaggaagctcctgcagggctgtccaccgttggtgtgtgcctcagtatttggacttccgaaactgaaagtgaaagtgtctttataggagagaaacgcatgctgctctttggctctttctgtccaacttttctagaaatgactcaaagtccattaagatttgtgaatattgtataaattagctatggaaagtagcaggtcagatggaaaattcttttccacagccctgctctccgcctccctccatcttaggagcgcctgcctcaattcctcgtcaactgctttgctccactccatcccacaggtgtgagtgggggaagtttttcattaggaatacagtctgcgtgacatggagaatggatggagggagctttgctactctgctcttggcatgactccaggatttttttctggaatccaacctctgtcctcttaggagaaggaacctgtccttggttcagatggctgggcatgaggaggaaaatttccattagtgtagaacagtgctggacagaatccggtttggaaaattacaaatccagttggtcaaaataggccatttcctatgtgtgacctattcgtggtatgccaactggactgcttcctaaacaggacgaggaaagtgaggaatatttttatatgaaagccttagcctgtctggcacccatgaaaaaaactatttatgcactcctactttcaccgtctttttgcattctctatttgtagcacaacagagttgaatgccacaaaacaccccgtttatagtgagctgttttcagtgaccaatatcagaaggaggcttgcttctggactagcctcactaattgccagcagccaccattttccatggaatggccttgggacagatgtcacctctgttatggggctctaataggaaagagaatgttttttcccttcctatgatcaatactgcaaattattgctgctcacagcttttataggattctcccaactgaaagttgcaggctttttctgtccctgtgcatcagtactaacaaaagacagcctcaccaagtctgtatatttgaacagaggcaagttaattcatccccccgtgtcagagccacaggcatgttgagggggttgatacgtagcactggaccagggcgcaaagcccagatagttccagccatgagaggagagcacaagaatgctctgcactctgcactcagcaccaccttgggtctgctttgcccagatgagggaccactaacaaccttctcagcacatgtgaatgtggactggttttaaaatgcattcattctgctaggattgggctggaagctggaacagtgagagtactttttctgctcctagtcatctccctttctcagcgtgacatcctcctgcagcaagcctagtatcactagcagtagttcctgcgactcttagcaacacaacccgaatatttgctccctgcatctgggtcctccaccaggatgggcctgcgcatctgcattgctgtacagacaaacaggccttttaatttacatcctcctttaattctcattaaaatcgcagggtttttgtttgaaa

SEQ ID NO: 26835 - DNA, 3149 bp, Homo sapiens
  source 1..3149: mol_type = unassigned DNA
atgttgaataagagtggtgagagcagatatcctgccttgttcccggtcttagggggttcatccatgagctcggatttcccacattacaacttcaggatgcctaatattggattccagaatctgcctctcaacatatatattgtggtttttggtactgctatatttgtcttcatccttagtttactcttctgttgctacttgattaggctaagacatcaagcacacaaagaattttatgcctacaaacaggttatattaaaagagaaagtaaaagaattgaatttacatgagctctgtgcagtgtgcctagaagacttcaagcctcgagatgagttggggatttgcccatgtaagcacgccttccacagaaagtgccttattaagtggctggaggttcgtaaagtgtgtcccctgtgcaacatgccagttctacagctggcccagttgcacagtaagcaggaccgtggaccccctcaggggccccttcctggggcagagaacattgtatagcttaccgcaaggatcagactgttgctggacacgacgtctgtgtggagccaggaggaacacatgtggtgtctgtatggctgctctctacctaggacaccagctgccacttcttttgcctcatgaagaactcttgggccagccaaactgggaacctaggtgtctgggtcttgtgacaaccaaagcactttgacactaccccctgccgagagaagaggagtggatgagcctgcgggtttgcctcaagaaacttcatgagggtctcttactaactccattacactctctctcctggagcctcatctccatgtcaagcaggagggtaaagaagggaactaagagcaggtctttcaagccacacccccacctgcggatggatgggtttctctgtaggccatgcaggcctttgtcgcagcaaaccttcccagcagcccttgagccaagtaaaaccagcacaaccagccaccagtggttggtgaggcagtgcccacaaggctcatgttgtatgcctttgataaggccatcttggctttgagtagcagtgttcctcgtcacccatttccccctcaggattacaacacctgctatcaaatcatctaagctgaaaacatgagatgcgcttggaaaggcctagtcagaagccatttcctcttatcatttccctctcctatgcaccagtaaggcccgtccagagccccagcagggagtgggccctgagtccacactgtccctgagtgatccaggaggctgcccacatccccacatgtgcactgtggttccagtgtagctgctgtgagcccactgccactgcctcagaagggagccactgtgaacctctcgagtggctccaaagagcagtggctttttgagaatggcccatacttctggcccggctggatgaagggaatgccgaccctttggcctctccccctccttccatctcttctctctcttgccctatctctctttctacttcagaaaaaaaaaaaaaaaaaaaaaaaagcctgtcattcactttttaacactttatcccaaataagatccctgtgtaattctgaagctggtgatccacttggaattgtagatagtttcaggaagctcctgcagggctgtccaccgttggtgtgtgcctcagtatttggacttccgaaactgaaagtgaaagtgtctttataggagagaaacgcatgctgctctttggctctttctgtccaacttttctagaaatgactcaaagtccattaagatttgtgaatattgtataaattagctatggaaagtagcaggtcagatggaaaattcttttccacagccctgctctccgcctccctccatcttaggagcgcctgcctcaattcctcgtcaactgctttgctccactccatcccacaggtgtgagtgggggaagtttttcattaggaatacagtctgcgtgacatggagaatggatggagggagctttgctactctgctcttggcatgactccaggatttttttctggaatccaacctctgtcctcttaggagaaggaacctgtccttggttcagatggctgggcatgaggaggaaaatttccattagtgtagaacagtgctggacagaatccggtttggaaaattacaaatccagttggtcaaaataggccatttcctatgtgtgacctattcgtggtatgccaactggactgcttcctaaacaggacgaggaaagtgaggaatatttttatatgaaagccttagcctgtctggcacccatgaaaaaaactatttatgcactcctactttcaccgtctttttgcattctctatttgtagcacaacagagttgaatgccacaaaacaccccgtttatagtgagctgttttcagtgaccaatatcagaaggaggcttgcttctggactagcctcactaattgccagcagccaccattttccatggaatggccttgggacagatgtcacctctgttatggggctctaataggaaagagaatgttttttcccttcctatgatcaatactgcaaattattgctgctcacagcttttataggattctcccaactgaaagttgcaggctttttctgtccctgtgcatcagtactaacaaaagacagcctcaccaagtctgtatatttgaacagaggcaagttaattcatccccccgtgtcagagccacaggcatgttgagggggttgatacgtagcactggaccagggcgcaaagcccagatagttccagccatgagaggagagcacaagaatgctctgcactctgcactcagcaccaccttgggtctgctttgcccagatgagggaccactaacaaccttctcagcacatgtgaatgtggactggttttaaaatgcattcattctgctaggattgggctggaagctggaacagtgagagtactttttctgctcctagtcatctccctttctcagcgtgacatcctcctgcagcaagcctagtatcactagcagtagttcctgcgactcttagcaacacaacccgaatatttgctccctgcatctgggtcctccaccaggatgggcctgcgcatctgcattgctgtacagacaaacaggccttttaatttacatcctcctttaattctcattaaaatcgcagggtttttgtttg

SEQ ID NO: 26836 - DNA, 3295 bp, Homo sapiens
  source 1..3295: mol_type = unassigned DNA
ggccgccgggcgcagtcagccgccgccacctccgccgcgctctgtccggacggacgctcgccgcccgcagcctgccgcccgccgcagggcgctgacggtcccgcacgtctgccgctgccaccggcgcgcccgaaacttccagcactatgttgaataagagtggtgagagcagatatcctgccttgttcccggtcttagggggttcatccatgagctcggatttcccacattacaacttcaggatgcctaatattggattccagaatctgcctctcaacatatatattgtggtttttggtactgctatatttgtcttcatccttagtttactcttctgttgctacttgattaggctaagacatcaagcacacaaagaattttatgcctacaaacaggttatattaaaagagaaagtaaaagaattgaatttacatgagctctgtgcagtgtgcctagaagacttcaagcctcgagatgagttggggatttgcccatgtaagcacgccttccacagaaagtgccttattaagtggctggaggttcgtaaagtgtgtcccctgtgcaacatgccagttctacagctggcccagttgcacagtaagcaggaccgtggaccccctcaggggccccttcctggggcagagaacattgtatagcttaccgcaaggatcagactgttgctggacacgacgtctgtgtggagccaggaggaacacatgtggtgtctgtatggctgctctctacctaggacaccagctgccacttcttttgcctcatgaagaactcttgggccagccaaactgggaacctaggtgtctgggtcttgtgacaaccaaagcactttgacactaccccctgccgagagaagaggagtggatgagcctgcgggtttgcctcaagaaacttcatgagggtctcttactaactccattacactctctctcctggagcctcatctccatgtcaagcaggagggtaaagaagggaactaagagcaggtctttcaagccacacccccacctgcggatggatgggtttctctgtaggccatgcaggcctttgtcgcagcaaaccttcccagcagcccttgagccaagtaaaaccagcacaaccagccaccagtggttggtgaggcagtgcccacaaggctcatgttgtatgcctttgataaggccatcttggctttgagtagcagtgttcctcgtcacccatttccccctcaggattacaacacctgctatcaaatcatctaagctgaaaacatgagatgcgcttggaaaggcctagtcagaagccatttcctcttatcatttccctctcctatgcaccagtaaggcccgtccagagccccagcagggagtgggccctgagtccacactgtccctgagtgatccaggaggctgcccacatccccacatgtgcactgtggttccagtgtagctgctgtgagcccactgccactgcctcagaagggagccactgtgaacctctcgagtggctccaaagagcagtggctttttgagaatggcccatacttctggcccggctggatgaagggaatgccgaccctttggcctctccccctccttccatctcttctctctcttgccctatctctctttctacttcagaaaaaaaaaaaaaaaaaaaaaaaagcctgtcattcactttttaacactttatcccaaataagatccctgtgtaattctgaagctggtgatccacttggaattgtagatagtttcaggaagctcctgcagggctgtccaccgttggtgtgtgcctcagtatttggacttccgaaactgaaagtgaaagtgtctttataggagagaaacgcatgctgctctttggctctttctgtccaacttttctagaaatgactcaaagtccattaagatttgtgaatattgtataaattagctatggaaagtagcaggtcagatggaaaattcttttccacagccctgctctccgcctccctccatcttaggagcgcctgcctcaattcctcgtcaactgctttgctccactccatcccacaggtgtgagtgggggaagtttttcattaggaatacagtctgcgtgacatggagaatggatggagggagctttgctactctgctcttggcatgactccaggatttttttctggaatccaacctctgtcctcttaggagaaggaacctgtccttggttcagatggctgggcatgaggaggaaaatttccattagtgtagaacagtgctggacagaatccggtttggaaaattacaaatccagttggtcaaaataggccatttcctatgtgtgacctattcgtggtatgccaactggactgcttcctaaacaggacgaggaaagtgaggaatatttttatatgaaagccttagcctgtctggcacccatgaaaaaaactatttatgcactcctactttcaccgtctttttgcattctctatttgtagcacaacagagttgaatgccacaaaacaccccgtttatagtgagctgttttcagtgaccaatatcagaaggaggcttgcttctggactagcctcactaattgccagcagccaccattttccatggaatggccttgggacagatgtcacctctgttatggggctctaataggaaagagaatgttttttcccttcctatgatcaatactgcaaattattgctgctcacagcttttataggattctcccaactgaaagttgcaggctttttctgtccctgtgcatcagtactaacaaaagacagcctcaccaagtctgtatatttgaacagaggcaagttaattcatccccccgtgtcagagccacaggcatgttgagggggttgatacgtagcactggaccagggcgcaaagcccagatagttccagccatgagaggagagcacaagaatgctctgcactctgcactcagcaccaccttgggtctgctttgcccagatgagggaccactaacaaccttctcagcacatgtgaatgtggactggttttaaaatgcattcattctgctaggattgggctggaagctggaacagtgagagtactttttctgctcctagtcatctccctttctcagcgtgacatcctcctgcagcaagcctagtatcactagcagtagttcctgcgactcttagcaacacaacccgaatatttgctccctgcatctgggtcctccaccaggatgggcctgcgcatctgcattgctgtacagacaaacaggccttttaatttacatcctcctttaattctcattaaaatcgcagggtttttgtttg

SEQ ID NO: 26837 - DNA, 2787 bp, Homo sapiens
  source 1..2787: mol_type = unassigned DNA
acacaagatggcggcgcccagcggagtaggggctgcgcttggggtttgctgaagctggctgcctctcccactccccttttgggtgcaaagcgccgctagcgggaagacgggggccgggcggggacaggggcacctgcgtagctggactgagagcctgcgcccagcttacatcgaccccacccggccccggcccgacccgacgcgacccgatccgatccgatcccattccatccgttcctcgtctcctcccggtctgacccgttgcccggccgtggttcgccacaccaggcatccaaagctgaggtcgctcctacggcctgggctcgccttcgctttagagatgtttggcctcttccctcccaaacagcccatcttcaaaacctggactcttggactggcacctggccacctttccctctaccaagactccacttccgtcttacccacttcttcctcagattcttggtaccccctgggttggagactgctcattttccttccaaattaatcccagaccccctaaaatattgacaaccttgacaaccccccaaccgaggagccagactttgttttggactaacttccatagccctatcatggaggcagtgtacctggtagtgaatgggttgggcctggtgctggacgtgctgaccttggtgttggacctcaacttcctgctggtgtcctccctcctggcttccctggcctggctcctggccttcgtctacaacctgccgcacacggtactgactagtcttctgcacttgggccgcggagtcttgctttcattgctggccttgatcgaagccgtggtccggttcacatgtgggggcttgcaggccttgtgtactctgctgtatagctgctgctctggcctagagagcctaaagctcctggggcacctggcctctcatggggcactgcggagcagggagatactgcaccggggcgtcctcaatgtggtctccagtggccatgctttgctgcgccaggcctgtgacatctgtgccattgccatgagcctggtggcttatgtgatcaacagcctggtcaacatctgcctcatcggcactcagaacctcttttccctggtgctggccctgtgggatgcagtgaccgggcctctgtggaggatgacggacgtagtggctgccttcctagcccacatttccagcagtgctgtggccatggccatcctcctttggacaccctgccaactagccctggagctgctggcctcagctgcccgcctcctggccagctttgtgcttgtcaatctcactggcttggtgttgctagcttgtgtgctggcagtgacggtgactgtgttgcatccggacttcaccctgaggctggctacccaggcactcagccagctccatgcccggccatcctaccaccgtcttcgagaggatgtcatgcggctctctcgcctagcactgggctcagaggcctggcgccgagtctggagccgcagtctgcagctggcgagttggccaaaccggggaggggcacctggagctccccagggtgaccctatgagggtattctcagttaggacccggagacaggacactcttcctgaagcggggcgcagatcagaggcagaagaggaggaggccaggaccatcagagtgacacctgtcaggggccgagagaggctcaatgaggaggagcctccaggtgggcaagacccttggaaattgctgaaggagcaagaggagcggaagaagtgtgtcatctgccaggaccagagcaagacagtgttgctcctgccctgccggcatctgtgcctgtgccaggcctgcactgaaatcctgatgcgccaccccgtctaccaccgcaattgcccgctctgccgccggggcatcctgcagaccctcaatgtctacctctgaagcctccttccctgcctgcccacccctccatgctccacgcaggcactcacgctaggacagcattaacacctcatctccgggtcctggtctgaatcccctcctacccctgtggccatcctgccatacatccaggacattgagttggaagactatgatctgggtgggggcaggataacatggcttctctttacccagtgggtcccttcgatgctgagggtggtgagtatgtcactatgcaagggccctgagactatttgctgtgggctctcctccagcctgcccagggcccacccagatgcctctggggttacccctgtctgcttctggtttttctgttggagatctataggtccttttcctgcctccttcacatttcctccccagcttttgcggccacaacacatcagtgtcatttgggtgttttggcaactcaggggccttcggatgatcttaaacctttgtgttcagccagagcccctgtgccctggtaggcgttggggttagtatctctcgggtgccctcagagccacctctgcctgtgatcgtctgatgaggctccctcccaacctgatccaaaagccagtctcaggagtttacccctgggatgggggatgcatctgcacctgactttggggccacgtgccctgtggcaccccagctcactgggagtctcaggagggataaccggatttctgctctttcccctgtcactcccacatcacacagaaaaatggcattcctctctgtctctccctggcatggagagggcagactgtgcacatttcactagggtccaaatacagaagggcccagggcccaggggcttgcagcttcgtgaggggtctctggcccagtttccaatgaataaagttctcttgacagctctgac

SEQ ID NO: 26838 - DNA, 3627 bp, Homo sapiens
  source 1..3627: mol_type = unassigned DNA
attggttgggacctggccctccctcttggccgcgccccctggtttcctgacaccgctccaaccttaaccttaagccccgcccgttcctccgaaattgggtcgcagtcccaccctctctcctagtacttcctgttctcggctaaccctggcgctgggccgggggctggagagtgaccgtggtctgagtgacctggggcggctgcgtgggccggggtgggcctcaaagccgggcaccagacgggaggggcggcgctcgggccgcgcgctgcccgcgccgggtcctggcgggcggcgaggctggggctgactcctgcctcaggatgccgggggaggaagaggagcgggccttcctggtggcccgcgaggagctggcgagcgccctgaggagggattccgggcaggcgttttccctggagcagctccggccgctactagccagctctctgccgctagccgcccgctacctgcagctggacgccgcacgccttgtccgctgcaacgctcatggggagccccgaaactacctcaacaccctgtccacggctctgaacatcctggagaaatacggccgcaaccttctcagccctcagcggcctcggtactggcgtggtgtcaagtttaataaccctgtctttcgcagcacggtggatgctgtgcaggggggccgagatgtgctgcgattatatggctacacagaggagcaaccagatgggttgagcttccccgaagggcaggaggagccagatgagcaccaggttgctacagtcacactggaagtactgctgcttcggacagagctcagcctgctattgcagaatactcatccaagacagcaggcactggagcagctgttggaagacaaggttgaagatgatatgctgcagctttcagaatttgaccccctattgagagagattgctcctggccccctcaccacaccctctgtcccaggctccactcctggtccctgcttcctctgtggttctgccccaggcacactgcactgcccatcctgtaaacaggccctgtgtccagcctgtgaccacctgttccatggacacccatcccgtgctcatcacctccgccagaccctgcctggggtcctgcagggtacccacctgagccccagtttacctgcctcagcccaaccacggccccagtcgacctccctgctggccctgggagacagctctctttcttcccctaatcctgcaagtgctcatttgccctggcactgtgctgcctgtgccatgctaaatgagccttgggcagtgctctgtgtggcctgtgatcggccccgaggctgtaaggggttggggttgggaactgagggtccccaaggaactggaggcctagaacctgatcttgcacggggtcggtgggcctgccagagctgtacctttgagaatgaggcagctgctgtgctatgttccatatgtgagcgacctcggctggcccagcctcccagcttggtggtggattcccgagatgctggcatttgcctgcaaccccttcagcagggggatgctttgctggcctctgcccagagtcaagtctggtactgtattcactgtaccttctgcaactcgagccctggctgggtgtgtgttatgtgcaaccggactagtagccccattccagcacaacatgccccccggccctatgccagctctttggaaaagggaccccccaagcctgggcccccacgacgccttagtgcccccctgcccagttcctgtggagatcctgagaagcagcgccaagacaagatgcgggaagaaggcctccagctagtgagcatgatccgggaaggggaagccgcaggtgcctgtccagaggagatcttctcggctctgcagtactcgggcactgaggtgcctctgcagtggttgcgctcagaactgccctacgtcctggagatggtggctgagctggctggacagcaggaccctgggctgggtgccttttcctgtcaggaggcccggagagcctggctggatcgtcatggcaaccttgatgaagctgtggaggagtgtgtgaggaccaggcgaaggaaggtgcaggagctccagtctctaggctttgggcctgaggaggggtctctccaggcattgttccagcacggaggtgatgtgtcacgggccctgactgagctacagcgccaacgcctagagcccttccgccagcgcctctgggacagtggccctgagcccaccccttcctgggatgggccagacaagcagagcctggtcaggcggcttttggcagtctacgcactccccagctggggccgggcagagctggcactgtcactgctgcaggagacacccaggaactatgagttgggggatgtggtagaagctgtgaggcacagccaggaccgggccttcctgcgccgcttgcttgcccaggagtgtgccgtgtgtggctgggccctgccccacaaccggatgcaggccctgacttcctgtgagtgcaccatctgtcctgactgcttccgccagcacttcaccatcgccttgaaggagaagcacatcacagacatggtgtgccctgcctgtggccgccccgacctcaccgatgacacacagttgctcagctacttctctacccttgacatccagcttcgcgagagcctagagccagatgcctatgcgttgttccataagaagctgaccgagggtgtgctgatgcgggaccccaagttcttgtggtgtgcccagtgctcctttggcttcatatatgagcgtgagcagctggaggcaacttgtccccagtgtcaccagaccttctgtgtgcgctgcaagcgccagtgggaggagcagcaccgaggtcggagctgtgaggacttccagaactggaaacgcatgaacgacccagaataccaggcccagggcctagcaatgtatcttcaggaaaacggcattgactgccccaaatgcaagttctcgtacgccctggcccgaggaggctgcatgcactttcactgtacccagtgccgccaccagttctgcagcggctgctacaatgccttttacgccaagaataaatgtccagagcctaactgcagggtgaaaaagtccctgcacggccaccaccctcgagactgcctcttctacctgcgggactggactgctctccggcttcagaagctgctacaggacaataacgtcatgtttaatacagagcctccagctggggcccgggcagtccctggaggcggctgccgagtgatagagcagaaggaggttcccaatgggctcagggacgaagcttgtggcaaggaaactccagctggctatgccggcctgtgccaggcacactacaaagagtatcttgtgagcctcatcaatgcccactcgctggacccagccaccttgtatgaggtggaagagctggagacggccactgagcgctacctgcacgtacgcccccagcctttggctggagaggatccccctgcttaccaggcccgcttgttacagaagctgacagaagaggtacccttgggacagagtatcccccgcaggcggaagtagctgagggcaagggtcccgatgagggtcccatggcctgctccctcaggaacagctccagcaccaataaagaggcatcttaccacccagg

SEQ ID NO: 26839 - DNA, 1804 bp, Homo sapiens
  source 1..1804: mol_type = unassigned DNA
ctagtacttcctgttctcggctaaccctggcgctgggccgggggctggagagtgaccgtggtctgagtgacctggggcggctgcgtgggccggggtgggcctcaaagccgggcaccagacgggaggggcggcgctcgggccgcgcgctgcccgcgccgggtcctggcgggcggcgaggctggggctgactcctgcctcaggatgccgggggaggaagaggagcgggccttcctggtggcccgcgaggagctggcgagcgccctgaggagggattccgggcaggcgttttccctggagcagctccggccgctactagccagctctctgccgctagccgcccgctacctgcagctggacgccgcacgccttgtccgctgcaacgctcatggggagccccgaaactacctcaacaccctgcccaccccttcctgggatgggccagacaagcagagcctggtcaggcggcttttggcagtctacgcactccccagctggggccgggcagagctggcactgtcactgctgcaggagacacccaggaactatgagttgggggatgtggtagaagctgtgaggcacagccaggaccgggccttcctgcgccgcttgcttgcccaggagtgtgccgtgtgtggctgggccctgccccacaaccggatgcaggccctgacttcctgtgagtgcaccatctgtcctgactgcttccgccagcacttcaccatcgccttgaaggagaagcacatcacagacatggtgtgccctgcctgtggccgccccgacctcaccgatgacacacagttgctcagctacttctctacccttgacatccagcttcgcgagagcctagagccagatgcctatgcgttgttccataagaagctgaccgagggtgtgctgatgcgggaccccaagttcttgtggtgtgcccagtgctcctttggcttcatatatgagcgtgagcagctggaggcaacttgtccccagtgtcaccagaccttctgtgtgcgctgcaagcgccagtgtgaggacttccagaactggaaacgcatgaacgacccagaataccaggcccagggcctagcaatgtatcttcaggaaaacggcattgactgccccaaatgcaagttctcgtacgccctggcccgaggaggctgcatgcactttcactgtacccagtgccgccaccagttctgcagcggctgctacaatgccttttacgccaagaataaatgtccagagcctaactgcagggtgaaaaagtccctgcacggccaccaccctcgagactgcctcttctacctgcgggactggactgctctccggcttcagaagctgctacaggacaataacgtcatgtttaatacagagcctccagctggggcccgggcagtccctggaggcggctgccgagtgatagagcagaaggaggttcccaatgggctcagggacgaagcttgtggcaaggaaactccagctggctatgccggcctgtgccaggcacactacaaagagtatcttgtgagcctcatcaatgcccactcgctggacccagccaccttgtatgaggtggaagagctggagacggccactgagcgctacctgcacgtacgcccccagcctttggctggagaggatccccctgcttaccaggcccgcttgttacagaagctgacagaagaggtacccttgggacagagtatcccccgcaggcggaagtagctgagggcaagggtcccgatgagggtcccatggcctgctccctcaggaacagctccagcaccaataaagaggcatcttaccaccc

SEQ ID NO: 26840 - DNA, 2851 bp, Homo sapiens
  source 1..2851: mol_type = unassigned DNA
atggacttatgcaccagggctggggagcccagcctaactcaaaatactcatccaagacagcaggcactggagcagctgttggaagacaaggttgaagatgatatgctgcagctttcagaatttgaccccctattgagagagattgctcctggccccctcaccacaccctctgtcccaggctccactcctggtccctgcttcctctgtggttctgccccaggcacactgcactgcccatcctgtaaacaggccctgtgtccagcctgtgaccacctgttccatggacacccatcccgtgctcatcacctccgccagaccctgcctggggtcctgcagggtacccacctgagccccagtttacctgcctcagcccaaccacggccccagtcgacctccctgctggccctgggagacagctctctttcttcccctaatcctgcaagtgctcatttgccctggcactgtgctgcctgtgccatgctaaatgagccttgggcagtgctctgtgtggcctgtgatcggccccgaggctgtaaggggttggggttgggaactgagggtccccaaggaactggaggcctagaacctgatcttgcacggggtcggtgggcctgccagagctgtacctttgagaatgaggcagctgctgtgctatgttccatatgtgagcgacctcggctggcccagcctcccagcttggtggtggattcccgagatgctggcatttgcctgcaaccccttcagcagggggatgctttgctggcctctgcccagagtcaagtctggtactgtattcactgtaccttctgcaactcgagccctggctgggtgtgtgttatgtgcaaccggactagtagccccattccagcacaacatgccccccggccctatgccagctctttggaaaagggaccccccaagcctgggcccccacgacgccttagtgcccccctgcccagttcctgtggagatcctgagaagcagcgccaagacaagatgcgggaagaaggcctccagctagtgagcatgatccgggaaggggaagccgcaggtgcctgtccagaggagatcttctcggctctgcagtactcgggcactgaggtgcctctgcagtggttgcgctcagaactgccctacgtcctggagatggtggctgagctggctggacagcaggaccctgggctgggtgccttttcctgtcaggaggcccggagagcctggctggatcgtcatggcaaccttgatgaagctgtggaggagtgtgtgaggaccaggcgaaggaaggtgcaggagctccagtctctaggctttgggcctgaggaggggtctctccaggcattgttccagcacggaggtgatgtgtcacgggccctgactgagctacagcgccaacgcctagagcccttccgccagcgcctctgggacagtggccctgagcccaccccttcctgggatgggccagacaagcagagcctggtcaggcggcttttggcagtctacgcactccccagctggggccgggcagagctggcactgtcactgctgcaggagacacccaggaactatgagttgggggatgtggtagaagctgtgaggcacagccaggaccgggccttcctgcgccgcttgcttgcccaggagtgtgccgtgtgtggctgggccctgccccacaaccggatgcaggccctgacttcctgtgagtgcaccatctgtcctgactgcttccgccagcacttcaccatcgccttgaaggagaagcacatcacagacatggtgtgccctgcctgtggccgccccgacctcaccgatgacacacagttgctcagctacttctctacccttgacatccagcttcgcgagagcctagagccagatgcctatgcgttgttccataagaagctgaccgagggtgtgctgatgcgggaccccaagttcttgtggtgtgcccagtgctcctttggcttcatatatgagcgtgagcagctggaggcaacttgtccccagtgtcaccagaccttctgtgtgcgctgcaagcgccagtgggaggagcagcaccgaggtcggagctgtgaggacttccagaactggaaacgcatgaacgacccagaataccaggcccagggcctagcaatgtatcttcaggaaaacggcattgactgccccaaatgcaagttctcgtacgccctggcccgaggaggctgcatgcactttcactgtacccagtgccgccaccagttctgcagcggctgctacaatgccttttacgccaagaataaatgtccagagcctaactgcagggtgaaaaagtccctgcacggccaccaccctcgagactgcctcttctacctgcgggactggactgctctccggcttcagaagctgctacaggacaataacgtcatgtttaatacagagcctccagctggggcccgggcagtccctggaggcggctgccgagtgatagagcagaaggaggttcccaatgggctcagggacgaagcttgtggcaaggaaactccagctggctatgccggcctgtgccaggcacactacaaagagtatcttgtgagcctcatcaatgcccactcgctggacccagccaccttgtatgaggtggaagagctggagacggccactgagcgctacctgcacgtacgcccccagcctttggctggagaggatccccctgcttaccaggcccgcttgttacagaagctgacagaagaggtacccttgggacagagtatcccccgcaggcggaagtagctgagggcaagggtcccgatgagggtcccatggcctgctccctcaggaacagctccagcaccaataaagaggcatcttaccaccc

SEQ ID NO: 26841 - DNA, 578 bp, Homo sapiens
  source 1..578: mol_type = unassigned DNA
agttgccactaggagaggcggtgctggctgggtcacagtccaggggctgcccgagggaggggctagggatgccgggggaggaagaggagcgggccttcctggtggcccgcgaggagctggcgagcgccctgaggagggattccgggcaggcgttttccctggagcagctccggccgctactagccagctctctgccgctagccgcccgctacctgcagctggacgccgcacgccttgtccgctgcaacgctcatggggagccccgaaactacctcaacaccctgtccacggctctgaacatcctggagaaatacggccgcaaccttctcagccctcagcggcctcggtactggcgtggtgtcaagtttaataaccctgtctttcgcagcacggtggatgctgtgcaggggggccgagatgtgctgcgattatatggctacacagaggagcaaccagatgggttgagcttccccgaagggcaggaggagccagatgagcaccaggttgctacagtcacactggaagtactgctgcttcggacagagctcagcctgctattgcagaatactcatccaaga

SEQ ID NO: 26842 - DNA, 550 bp, Homo sapiens
  source 1..550: mol_type = unassigned DNA
ttctttccgcccccctcctcccgctggcaggccgcaagcagtaggtagcccctcagccattcccagccagttgccactaggagaggcggtgctggctgggtcacagtccaggggctgcccgagggaggggctaggccccgcccgttcctccgaaattgggtcgcagtcccaccctctctcctagtacttcctgttctcggctaaccctggcgctgggccgggggctggagagtgaccgtggtctgagtgacctggggcggctgcgtgggccggggtgggcctcaaagccgggcaccagacgggaggggcggcgctcgggccgcgcgctgcccgcgccgggtcctggcgggcggcgaggctggggctgactcctgcctcaggatgccgggggaggaagaggagcgggccttcctggtggcccgcgaggagctggcgagcgccctgaggagggattccgggcaggcgttttccctggagcagctccggccgctactagccagctctctgccgctagccgcccgctacctgcagctggacgccgcacgccttg

SEQ ID NO: 26843 - DNA, 1898 bp, Homo sapiens
  source 1..1898: mol_type = unassigned DNA
atgcgaaaagcgggtgccacgtctatgtgggcttcgtgctgtgggctgctgaatgaagtcatgggaactggagctgtcaggggccagcagtcagcatttgcaggagccaccggtccattcagatttacaccaaaccctgagttttccacctacccaccagcagctacggaagggcccaacatagtttgtaaagcctgtgggctttcattttcagtctttagaaagaagcatgtttgctgtgactgcaagaaggatttttgctccgtttgttcagtcttacaagaaaatctccgtagatgttctacttgtcacttattacaagagacagcatttcagcgccctcagttaatgcgactgaaggtgaaggacctgcggcagtatctcattctgagaaatatacccatagatacttgtcgtgagaaagaagacttggtggatctagtactgtgccatcatggactaggctctgaggacgacatggacacaagcagtctgaattcttcaaggtcccagacttctagcttttttacacgttcgtttttttcaaactatacagccccctctgctactatgtcttcgtttcagggagagcttatggatggagaccaaacatccagatctggagtgccggcacaggtacaaagtgaaatcacttcagcaaacacagaagatgatgatgacgacgatgatgaggatgatgatgatgaagaagaaaacgcagaggatcggaaccccgggctctccaaggagagagtgagagcttcactgtctgacttgtcaagccttgatgatgtggaaggaatgagcgtgcgccagctgaaggaaattctggctcggaattttgtcaactattctggctgttgtgaaaaatgggaactggtagagaaagtaaaccggttatacaaagagaatgaagaaaaccaaaagtcctatggcgagcggctgcagctgcaggatgaggaagacgacagcctgtgtcgcatctgcatggatgccgtcatcgactgtgtcctactggagtgtgggcacatggttacctgcaccaagtgcggcaagcgcatgagtgagtgtcccatctgccggcagtatgtggtgcgagccgtgcacgtgttcaagtcctgaaacaggctcccctcaccaggacagtcacccccaaacttgacccccaacatttcaatgcacagaagggactggaaagttatgttcaaaggctgaagctattttaaaacattattttgactactaagtggggacagaaagatccatcctgagttgtggaaacattggtccatgccgtgagcctgtctgcctgtggacacgtgagcttcccgggctcagctgggctttatcacacatcccgtgaacactcattgaagtcagcctgtttgcgccatgtgggcatcagccactgctgtcttgggaggacacttatcctgttctcttatttccccttcatcctatttttaacttaaactgctcagatgtttgaaacttctgtcctctttggatgagatcagtgtccacaagtggccgacatggaacatgctgagcagtggctcctctgaatgttcactttattagtcatgtatattttaaatgctaacatttgatgaatgtaagtttccacattgttgctgtttctgcatttaaacataattgggaacaactgacattctctagtcgactgccagggccttagactccacatgtccatttttgttcaggtatagctttttatagcaagggctgcatctagcttcttttattagaagtgtgtgtgctaaattccttattaatgtgtaatcagtttacattgttttgtatagtgaaggtgtattttcagtgctacccgctagctgattttaactttaggaataaaattagttttaaaagctttt

SEQ ID NO: 26844 - DNA, 2066 bp, Homo sapiens
  source 1..2066: mol_type = unassigned DNA
gcgcttttaccggggcacgcggcgagcgtgaccacgccccttacgtccggacgctcggtcgcctcccggggcgcggtaatcaccgcccagagggaaggaggtcggcagtgtgaggagctgctatggtgctgagtttcctggtagagccggccgagctgaggcggtcgcggccatgaaggcgggtgccacgtctatgtgggcttcgtgctgtgggctgctgaatgaagtcatgggaactggagctgtcaggggccagcagtcagcatttgcaggagccaccggtccattcagatttacaccaaaccctgagttttccacctacccaccagcagctacggaagggcccaacatagtttgtaaagcctgtgggctttcattttcagtctttagaaagaagcatgtttgctgtgactgcaagaaggatttttgctccgtttgttcagtcttacaagaaaatctccgtagatgttctacttgtcacttattacaagagacagcatttcagcgccctcagttaatgcgactgaaggtgaaggacctgcggcagtatctcattctgagaaatatacccatagatacttgtcgtgagaaagaagacttggtggatctagtactgtgccatcatggactaggctctgaggacgacatggacacaagcagtctgaattcttcaaggtcccagacttctagcttttttacacgttcgtttttttcaaactatacagccccctctgctactatgtcttcgtttcagggagagcttatggatggagaccaaacatccagatctggagtgccggcacaggtacaaagtgaaatcacttcagcaaacacagaagatgatgatgacgacgatgatgaggatgatgatgatgaagaagaaaacgcagaggatcggaaccccgggctctccaaggagagagtgagagcttcactgtctgacttgtcaagccttgatgatgtggaaggaatgagcgtgcgccagctgaaggaaattctggctcggaattttgtcaactattctggctgttgtgaaaaatgggaactggtagagaaagtaaaccggttatacaaagagaatgaagaaaaccaaaagtcctatggcgagcggctgcagctgcaggatgaggaagacgacagcctgtgtcgcatctgcatggatgccgtcatcgactgtgtcctactggagtgtgggcacatggttacctgcaccaagtgcggcaagcgcatgagtgagtgtcccatctgccggcagtatgtggtgcgagccgtgcacgtgttcaagtcctgaaacaggctcccctcaccaggacagtcacccccaaacttgacccccaacatttcaatgcacagaagggactggaaagttatgttcaaaggctgaagctattttaaaacattattttgactactaagtggggacagaaagatccatcctgagttgtggaaacattggtccatgccgtgagcctgtctgcctgtggacacgtgagcttcccgggctcagctgggctttatcacacatcccgtgaacactcattgaagtcagcctgtttgcgccatgtgggcatcagccactgctgtcttgggaggacacttatcctgttctcttatttccccttcatcctatttttaacttaaactgctcagatgtttgaaacttctgtcctctttggatgagatcagtgtccacaagtggccgacatggaacatgctgagcagtggctcctctgaatgttcactttattagtcatgtatattttaaatgctaacatttgatgaatgtaagtttccacattgttgctgtttctgcatttaaacataattgggaacaactgacattctctagtcgactgccagggccttagactccacatgtccatttttgttcaggtatagctttttatagcaagggctgcatctagcttcttttattagaagtgtgtgtgctaaattccttattaatgtgtaatcagtttacattgttttgtatagtgaaggtgtattttcagtgctacccgctagctgattttaactttaggaataaaattagttttaaaagcttt

SEQ ID NO: 26845 - DNA, 2051 bp, Homo sapiens
  source 1..2051: mol_type = unassigned DNA
atcaccgcccagagggaaggaggtcggcagtgtgaggagctgctatggtgctgagtttcctggtagagccggccgagctgaggcggtcgcggccatgaaggtgggggagtggtactaaggatcaagtatactgttaaaagaaaacaaaaacccaagcatgaggaaggcgggtgccacgtctatgtgggcttcgtgctgtgggctgctgaatgaagtcatgggaactggagctgtcaggggccagcagtcagcatttgcaggagccaccggtccattcagatttacaccaaaccctgagttttccacctacccaccagcagctacggaagggcccaacatagtttgtaaagcctgtgggctttcattttcagtctttagaaagaagcatgtttgctgtgactgcaagaaggatttttgctccgtttgttcagtcttacaagaaaatctccgtagatgttctacttgtcacttattacaagagacagcatttcagcgccctcagttaatgcgactgaaggtgaaggacctgcggcagtatctcattctgagaaatatacccatagatacttgtcgtgagaaagaagacttggtggatctagtactgtgccatcatggactaggctctgaggacgacatggacacaagcagtctgaattcttcaaggtcccagacttctagcttttttacacgttcgtttttttcaaactatacagccccctctgctactatgtcttcgtttcagggagagcttatggatggagaccaaacatccagatctggagtgccggcacaggtacaaagtgaaatcacttcagcaaacacagaagatgatgatgacgacgatgatgaggatgatgatgatgaagaagaaaacgcagaggatcggaaccccgggctctccaaggagagagtgagagcttcactgtctgacttgtcaagccttgatgatgtggaaggaatgagcgtgcgccagctgaaggaaattctggctcggaattttgtcaactattctggctgttgtgaaaaatgggaactggtagagaaagtaaaccggttatacaaagagaatgaagaaaaccaaaagtcctatggcgagcggctgcagctgcaggatgaggaagacgacagcctgtgtcgcatctgcatggatgccgtcatcgactgtgtcctactggagtgtgggcacatggttacctgcaccaagtgcggcaagcgcatgagtgagtgtcccatctgccggcagtatgtggtgcgagccgtgcacgtgttcaagtcctgaaacaggctcccctcaccaggacagtcacccccaaacttgacccccaacatttcaatgcacagaagggactggaaagttatgttcaaaggctgaagctattttaaaacattattttgactactaagtggggacagaaagatccatcctgagttgtggaaacattggtccatgccgtgagcctgtctgcctgtggacacgtgagcttcccgggctcagctgggctttatcacacatcccgtgaacactcattgaagtcagcctgtttgcgccatgtgggcatcagccactgctgtcttgggaggacacttatcctgttctcttatttccccttcatcctatttttaacttaaactgctcagatgtttgaaacttctgtcctctttggatgagatcagtgtccacaagtggccgacatggaacatgctgagcagtggctcctctgaatgttcactttattagtcatgtatattttaaatgctaacatttgatgaatgtaagtttccacattgttgctgtttctgcatttaaacataattgggaacaactgacattctctagtcgactgccagggccttagactccacatgtccatttttgttcaggtatagctttttatagcaagggctgcatctagcttcttttattagaagtgtgtgtgctaaattccttattaatgtgtaatcagtttacattgttttgtatagtgaaggtgtattttcagtgctacccgctagctgattttaactttaggaataaaattagttttaaaagc

SEQ ID NO: 26846 - DNA, 5012 bp, Homo sapiens
  source 1..5012: mol_type = unassigned DNA
gcaagttcttcctttcagggttgaagcgtgagagaggttggtttttgaaacgggagtgtttcaggttattgaggtccaaaaagaaataaagtttttgtttacgtctgtatggcttgtaagatatctcccggggccaattcagcatctctacctggccatcctaacaaggtgatttgtgaaagggtgagacttcagagcctgttccctctcctcccaagtgatcagaacactaccgttcaagaggatgctcacttcaaagctttcttccagagtgaagatagtccaagtcctaagagacagcgcctctctcattcagtctttgattatacatcagcatcaccagctccctcaccaccaatgcgaccatgggagatgacatcaaataggcagcccccttcagttcgaccaagccaacatcacttctcaggggaacgatgcaacacacctgcacgcaacagaagaagtcctcctgtcaggcgccagagaggaagaagggatcgtctgtctcgacataattccattagtcaagatgaaaactatcaccatctcccttacgcacagcagcaagcaatagaggagcctcgagccttccaccctccgaatgtatctccccgtctgctacatcctgctgctcatccaccccagcagaatgcagtcatggttgacatacatgatcagctccatcaaggaacagtccctgtttcttacacagtaacaacagtggcaccacatgggattccactctgcacaggccagcacatccctgcttgtagtacacagcaggtcccaggatgctctgtggttttcagtggacagcacctccctgtctgtagtgtgcctcctccaatgcttcaggcatgttcagttcagcacttaccagtaccatatgctgcattcccaccccttatttctagtgatccatttcttatacatcctcctcacctttctccccatcatcctcctcatttgccaccaccaggccagtttgtccctttccaaacacagcaatcacgatcgcctctgcaaaggatagaaaatgaagtggaactcttaggagaacatcttccagtaggaggttttacttaccctccatcagcccaccccccaacattacctccatcagctcccttgcagttcttaacacatgatcctttgcatcaggaggtgtcctttggagtaccttatcctccatttatgcctcggaggcttacaggacgtagtagataccgatcccagcagccaataccacctcccccttatcatcccagcttactgccatatgtgttatcaatgcttccagtgccacctgcagtgggcccaactttcagctttgaattagatgtagaagatggagaagtagaaaattacgaggccctgttaaacctggcagagcgactgggagaggcaaagcctcgtggactgactaaagcagatattgaacaacttccttcttatcggttcaatcctaacaaccaccagtcagaacagactttgtgtgtagtatgcatgtgtgattttgagtcaaggcagctacttagagtcttaccctgtaaccacgagttccatgccaagtgtgttgacaaatggcttaaggcaaatcgtacttgcccaatttgccgagctgatgcttcagaagtgcatcgggattcagaatgaccaacctaagaagcacaaatttagtttgggtgttcctcatcacatgtatatacggactatccattgaacttaatctgtgtggcttccagccctccctttaccaaaagggtcaatggacctttctttgcactgtgtgacttaatcaactataaaagcttacaattagtcttcacagttatgggattgttatactaaccgtgtgattggaactccaaagactttttctttagcttaattttgtgtgtgcactaacattccctggtttttgtgtgatcattccgagtgttgctgcaagattacagtggacgtgatcttttagcatgtgcttttataaaaagtggtagctacagatgatatagcaatctaccttatatagagccttcagaaactgtgagtggaaatgaatgcgcagcgtatgactgttggtgataagtgtatctgtgtgagtgtgtgcaactacttgtgtgagggcatggtagctaacgtgtgtatgagatcctatataccagcatgtaccaagaatgtgtgtgtagttttaattatgctgcaatgtataatctggtgtgttatttaaacagcactagtactgtacactggtttttttcccttgtgtttgctgttgcacactgattgctgagggtgcatcaattacaagcattgaatactccatccccttccctcccagtgaatggaatgagaaaagccttcttcctttgcttcaggcagctgtcaccttctctttattggtggtcctaagtgggtcacttaagaaaaaaaagtgtaacaaattctcgctccatgaacctggtttttttttattctgttgtggaaatttttaaatctccaacttgctgtttccaaaaagaaggtgcaatatcatatatcatcagttagcaatattagcatttcaatcagtgatttgaatgttgatacttttttttcctttacatttccagtaagtttcttacagaaagtacctgtgattttttttaatgtttagatttgtagtctagtctattctgaagatatttgattaatatatttctaagaagaccactagtcccatgaagtctcaccttgttgacttccaccagaacaaaacctgttaattcagcttgacttctcatatgtgttctgtgttcaagctcctgtgggcaactcaattgttttaagaaaactctatttctgttcatattaattcacttgccagactccaattctgaaagttgtctagttcttccttcatcacacgtgcttctcatcgaaaccctggtttcaggatggatcaagtgctgttacagctcatgttccttagacctgatttgttttgatattttactgcctttccttttaatttttgtttgaatgagaaaagtttaatacaacaggtgtccagaatacttgcagtataaatgaagatttggtttttgtataaaaaaataatgctgttaaacaggagttgaccttcatttagttgatgtaatacatagctgtatggggttttttttagtaagttctttgagcataattcactttaaagtcatttttccagcaatgtttaaattactttctcattcttttagtgtattcaacattgtctgcctcttcctgcagttgatgtaattgctttgtttgcaatagcacaagctgcattattccagtcaggactgtgataacttgctgccagccccactcaactttcagttggctctgtgtcagttttccattcagtgttaactacttgttactgccatgctgcttgccctcccttgaagtgtctataagctcatcacagcctagagttaagtaaagtcaattcacagaagcacaattttgccctttgcgagacattgttgcctctatctagtcctacaagtagggttttgcatactgtgtttgcccctagggttgtcagtgcatcagaaatacttctaaatagtggtaaaaatgcacatggttaatgcacatgttacttttaaatcattaggatatccctcacctgttcctgatgaataaaaagtgtgttaaagaccaaaattcttggcataataatcagctacatacaaatcacatatagtttaatcttttttaatgaaaaaaaatcatgtttaaaatggcaaaagcccatcttatacacttttatatagctgcaaaaaatttatatctgtacagatctaacactacgacactcagtattcattttattgaagcatgcaagtaaagcactttttctaatttatatagaggtatctaattaacacagcacattgtactaatgactaggagtagcagctttttcttctctccctctatgaattcttataatgtccctttttctgtaagtttttgagaggcaattggcaatttaggaggcagcagggtctgttttggtcaaatcttgaatttcgttgttgcactctagtgactgatctttgggaatgtcttgtctttgcatggggctcatagagatgtgtgcagacttgcttattgtggttagtgtgtatcaggaacacacacacaggtgttctgaccagctcaggcttgccacagtgagcaactctgtggctagcaaaagagaagtttatttgtgcccagccattggtcaccttgggtgatgcaccagatagcaggcagatgttggttcattggccttcgtcctctttcctcctaaaataatattggctttaccatcttaactcagctgtgggttttttgtgggttcttgtttgttttttggcatgaattgtcatctttggtgtttttttaacccccagcccctcaaaaaaataaggcctccaggtatcaagatctcatattaggattttctgtccttaattttttgagcaaaatctggaaaatgtgaaagcatatttagattttatatactatctgaaatgtgatttgttaagattcttaaatttgggcctcttagaataattttgaatgagatctaccgactcacttgtgagaatatttttcacagattatctttgggccttttcattagaaagctgtttgtttgtccccctgttggtacatttggttacctcattttgccgtttcagattgtgaaagctcacaggggtgttttttggaatcatttgctgagtcattttctcaaatcatattccattgtatcagttaacatatagttttaaatgtatgtattataaatatctgtaaccaaatcatttgaaggcttgataaatttttaacaaagtttgtacattttttatgaaagttactagtaatgctttactaagtagtgcaatgaatttttatttttaatccctgtgcccaattttggagttgagagggttgttggtaataaatgtatgatgtacacttaaaacatc

SEQ ID NO: 26847 - DNA, 5104 bp, Homo sapiens
  source 1..5104: mol_type = unassigned DNA
gcggcggggcgcggcggggcggggaggggcgtggccgggccgggcccctagtgcggtgttgcgggacggggccgaggcccggtcggttggggcgtgggggcggagaggatggagcctccgaggcgttaggcgactctgtcatctctgggcgtgcagccgtcgtttcctggcgcggcccgtgtgatggtgccgggaggaaggaagcgcagtgacagtgcctaagttggagccggggttccgggggtgaggaggcccgcggacggcggatctggcgagctggccgcgggctgggcgagcagtcacaataggaggcggcggcccagcgaggatccgcgggagctgcccggcagggcggagcctcccctcgcagagtgaagatagtccaagtcctaagagacagcgcctctctcattcagtctttgattatacatcagcatcaccagctccctcaccaccaatgcgaccatgggagatgacatcaaataggcagcccccttcagttcgaccaagccaacatcacttctcaggggaacgatgcaacacacctgcacgcaacagaagaagtcctcctgtcaggcgccagagaggaagaagggatcgtctgtctcgacataattccattagtcaagatgaaaactatcaccatctcccttacgcacagcagcaagcaatagaggagcctcgagccttccaccctccgaatgtatctccccgtctgctacatcctgctgctcatccaccccagcagaatgcagtcatggttgacatacatgatcagctccatcaaggaacagtccctgtttcttacacagtaacaacagtggcaccacatgggattccactctgcacaggccagcacatccctgcttgtagtacacagcaggtcccaggatgctctgtggttttcagtggacagcacctccctgtctgtagtgtgcctcctccaatgcttcaggcatgttcagttcagcacttaccagtaccatatgctgcattcccaccccttatttctagtgatccatttcttatacatcctcctcacctttctccccatcatcctcctcatttgccaccaccaggccagtttgtccctttccaaacacagcaatcacgatcgcctctgcaaaggatagaaaatgaagtggaactcttaggagaacatcttccagtaggaggttttacttaccctccatcagcccaccccccaacattacctccatcagctcccttgcagttcttaacacatgatcctttgcatcaggaggtgtcctttggagtaccttatcctccatttatgcctcggaggcttacaggacgtagtagataccgatcccagcagccaataccacctcccccttatcatcccagcttactgccatatgtgttatcaatgcttccagtgccacctgcagtgggcccaactttcagctttgaattagatgtagaagatggagaagtagaaaattacgaggccctgttaaacctggcagagcgactgggagaggcaaagcctcgtggactgactaaagcagatattgaacaacttccttcttatcggttcaatcctaacaaccaccagtcagaacagactttgtgtgtagtatgcatgtgtgattttgagtcaaggcagctacttagagtcttaccctgtaaccacgagttccatgccaagtgtgttgacaaatggcttaaggcaaatcgtacttgcccaatttgccgagctgatgcttcagaagtgcatcgggattcagaatgaccaacctaagaagcacaaatttagtttgggtgttcctcatcacatgtatatacggactatccattgaacttaatctgtgtggcttccagccctccctttaccaaaagggtcaatggacctttctttgcactgtgtgacttaatcaactataaaagcttacaattagtcttcacagttatgggattgttatactaaccgtgtgattggaactccaaagactttttctttagcttaattttgtgtgtgcactaacattccctggtttttgtgtgatcattccgagtgttgctgcaagattacagtggacgtgatcttttagcatgtgcttttataaaaagtggtagctacagatgatatagcaatctaccttatatagagccttcagaaactgtgagtggaaatgaatgcgcagcgtatgactgttggtgataagtgtatctgtgtgagtgtgtgcaactacttgtgtgagggcatggtagctaacgtgtgtatgagatcctatataccagcatgtaccaagaatgtgtgtgtagttttaattatgctgcaatgtataatctggtgtgttatttaaacagcactagtactgtacactggtttttttcccttgtgtttgctgttgcacactgattgctgagggtgcatcaattacaagcattgaatactccatccccttccctcccagtgaatggaatgagaaaagccttcttcctttgcttcaggcagctgtcaccttctctttattggtggtcctaagtgggtcacttaagaaaaaaaagtgtaacaaattctcgctccatgaacctggtttttttttattctgttgtggaaatttttaaatctccaacttgctgtttccaaaaagaaggtgcaatatcatatatcatcagttagcaatattagcatttcaatcagtgatttgaatgttgatacttttttttcctttacatttccagtaagtttcttacagaaagtacctgtgattttttttaatgtttagatttgtagtctagtctattctgaagatatttgattaatatatttctaagaagaccactagtcccatgaagtctcaccttgttgacttccaccagaacaaaacctgttaattcagcttgacttctcatatgtgttctgtgttcaagctcctgtgggcaactcaattgttttaagaaaactctatttctgttcatattaattcacttgccagactccaattctgaaagttgtctagttcttccttcatcacacgtgcttctcatcgaaaccctggtttcaggatggatcaagtgctgttacagctcatgttccttagacctgatttgttttgatattttactgcctttccttttaatttttgtttgaatgagaaaagtttaatacaacaggtgtccagaatacttgcagtataaatgaagatttggtttttgtataaaaaaataatgctgttaaacaggagttgaccttcatttagttgatgtaatacatagctgtatggggttttttttagtaagttctttgagcataattcactttaaagtcatttttccagcaatgtttaaattactttctcattcttttagtgtattcaacattgtctgcctcttcctgcagttgatgtaattgctttgtttgcaatagcacaagctgcattattccagtcaggactgtgataacttgctgccagccccactcaactttcagttggctctgtgtcagttttccattcagtgttaactacttgttactgccatgctgcttgccctcccttgaagtgtctataagctcatcacagcctagagttaagtaaagtcaattcacagaagcacaattttgccctttgcgagacattgttgcctctatctagtcctacaagtagggttttgcatactgtgtttgcccctagggttgtcagtgcatcagaaatacttctaaatagtggtaaaaatgcacatggttaatgcacatgttacttttaaatcattaggatatccctcacctgttcctgatgaataaaaagtgtgttaaagaccaaaattcttggcataataatcagctacatacaaatcacatatagtttaatcttttttaatgaaaaaaaatcatgtttaaaatggcaaaagcccatcttatacacttttatatagctgcaaaaaatttatatctgtacagatctaacactacgacactcagtattcattttattgaagcatgcaagtaaagcactttttctaatttatatagaggtatctaattaacacagcacattgtactaatgactaggagtagcagctttttcttctctccctctatgaattcttataatgtccctttttctgtaagtttttgagaggcaattggcaatttaggaggcagcagggtctgttttggtcaaatcttgaatttcgttgttgcactctagtgactgatctttgggaatgtcttgtctttgcatggggctcatagagatgtgtgcagacttgcttattgtggttagtgtgtatcaggaacacacacacaggtgttctgaccagctcaggcttgccacagtgagcaactctgtggctagcaaaagagaagtttatttgtgcccagccattggtcaccttgggtgatgcaccagatagcaggcagatgttggttcattggccttcgtcctctttcctcctaaaataatattggctttaccatcttaactcagctgtgggttttttgtgggttcttgtttgttttttggcatgaattgtcatctttggtgtttttttaacccccagcccctcaaaaaaataaggcctccaggtatcaagatctcatattaggattttctgtccttaattttttgagcaaaatctggaaaatgtgaaagcatatttagattttatatactatctgaaatgtgatttgttaagattcttaaatttgggcctcttagaataattttgaatgagatctaccgactcacttgtgagaatatttttcacagattatctttgggccttttcattagaaagctgtttgtttgtccccctgttggtacatttggttacctcattttgccgtttcagattgtgaaagctcacaggggtgttttttggaatcatttgctgagtcattttctcaaatcatattccattgtatcagttaacatatagttttaaatgtatgtattataaatatctgtaaccaaatcatttgaaggcttgataaatttttaacaaagtttgtacattttttatgaaagttactagtaatgctttactaagtagtgcaatgaatttttatttttaatccctgtgcccaattttggagttgagagggttgttggtaataaatgtatgatgtacactt

SEQ ID NO: 26848 - DNA, 4945 bp, Homo sapiens
  source 1..4945: mol_type = unassigned DNA
cggaacccggtcgaaagggtcctctctggcgtccttctgcttccgtgggtttctggataggctgcgttttgttctcaggggatgcaagttcttcctttcagggttgaagcgtgagagaggttggtttttgaaacgggagtgtttcaggttattgaggtccaaaaagaaataaagtttttgtttacgtctgtatggcttgtaagagtgaagatagtccaagtcctaagagacagcgcctctctcattcagtctttgattatacatcagcatcaccagctccctcaccaccaatgcgaccatgggagatgacatcaaataggcagcccccttcagttcgaccaagccaacatcacttctcaggggaacgatgcaacacacctgcacgcaacagaagaagtcctcctgtcaggcgccagagaggaagaagggatcgtctgtctcgacataattccattagtcaagatgaaaactatcaccatctcccttacgcacagcagcaagcaatagaggagcctcgagccttccaccctccgaatgtatctccccgtctgctacatcctgctgctcatccaccccagcagaatgcagtcatggttgacatacatgatcagctccatcaaggaacagtccctgtttcttacacagtaacaacagtggcaccacatgggattccactctgcacaggccagcacatccctgcttgtagtacacagcaggtcccaggatgctctgtggttttcagtggacagcacctccctgtctgtagtgtgcctcctccaatgcttcaggcatgttcagttcagcacttaccagtaccatatgctgcattcccaccccttatttctagtgatccatttcttatacatcctcctcacctttctccccatcatcctcctcatttgccaccaccaggccagtttgtccctttccaaacacagcaatcacgatcgcctctgcaaaggatagaaaatgaagtggaactcttaggagaacatcttccagtaggaggttttacttaccctccatcagcccaccccccaacattacctccatcagctcccttgcagttcttaacacatgatcctttgcatcaggaggtgtcctttggagtaccttatcctccatttatgcctcggaggcttacaggacgtagtagataccgatcccagcagccaataccacctcccccttatcatcccagcttactgccatatgtgttatcaatgcttccagtgccacctgcagtgggcccaactttcagctttgaattagatgtagaagatggagaagtagaaaattacgaggccctgttaaacctggcagagcgactgggagaggcaaagcctcgtggactgactaaagcagatattgaacaacttccttcttatcggttcaatcctaacaaccaccagtcagaacagactttgtgtgtagtatgcatgtgtgattttgagtcaaggcagctacttagagtcttaccctgtaaccacgagttccatgccaagtgtgttgacaaatggcttaaggcaaatcgtacttgcccaatttgccgagctgatgcttcagaagtgcatcgggattcagaatgaccaacctaagaagcacaaatttagtttgggtgttcctcatcacatgtatatacggactatccattgaacttaatctgtgtggcttccagccctccctttaccaaaagggtcaatggacctttctttgcactgtgtgacttaatcaactataaaagcttacaattagtcttcacagttatgggattgttatactaaccgtgtgattggaactccaaagactttttctttagcttaattttgtgtgtgcactaacattccctggtttttgtgtgatcattccgagtgttgctgcaagattacagtggacgtgatcttttagcatgtgcttttataaaaagtggtagctacagatgatatagcaatctaccttatatagagccttcagaaactgtgagtggaaatgaatgcgcagcgtatgactgttggtgataagtgtatctgtgtgagtgtgtgcaactacttgtgtgagggcatggtagctaacgtgtgtatgagatcctatataccagcatgtaccaagaatgtgtgtgtagttttaattatgctgcaatgtataatctggtgtgttatttaaacagcactagtactgtacactggtttttttcccttgtgtttgctgttgcacactgattgctgagggtgcatcaattacaagcattgaatactccatccccttccctcccagtgaatggaatgagaaaagccttcttcctttgcttcaggcagctgtcaccttctctttattggtggtcctaagtgggtcacttaagaaaaaaaagtgtaacaaattctcgctccatgaacctggtttttttttattctgttgtggaaatttttaaatctccaacttgctgtttccaaaaagaaggtgcaatatcatatatcatcagttagcaatattagcatttcaatcagtgatttgaatgttgatacttttttttcctttacatttccagtaagtttcttacagaaagtacctgtgattttttttaatgtttagatttgtagtctagtctattctgaagatatttgattaatatatttctaagaagaccactagtcccatgaagtctcaccttgttgacttccaccagaacaaaacctgttaattcagcttgacttctcatatgtgttctgtgttcaagctcctgtgggcaactcaattgttttaagaaaactctatttctgttcatattaattcacttgccagactccaattctgaaagttgtctagttcttccttcatcacacgtgcttctcatcgaaaccctggtttcaggatggatcaagtgctgttacagctcatgttccttagacctgatttgttttgatattttactgcctttccttttaatttttgtttgaatgagaaaagtttaatacaacaggtgtccagaatacttgcagtataaatgaagatttggtttttgtataaaaaaataatgctgttaaacaggagttgaccttcatttagttgatgtaatacatagctgtatggggttttttttagtaagttctttgagcataattcactttaaagtcatttttccagcaatgtttaaattactttctcattcttttagtgtattcaacattgtctgcctcttcctgcagttgatgtaattgctttgtttgcaatagcacaagctgcattattccagtcaggactgtgataacttgctgccagccccactcaactttcagttggctctgtgtcagttttccattcagtgttaactacttgttactgccatgctgcttgccctcccttgaagtgtctataagctcatcacagcctagagttaagtaaagtcaattcacagaagcacaattttgccctttgcgagacattgttgcctctatctagtcctacaagtagggttttgcatactgtgtttgcccctagggttgtcagtgcatcagaaatacttctaaatagtggtaaaaatgcacatggttaatgcacatgttacttttaaatcattaggatatccctcacctgttcctgatgaataaaaagtgtgttaaagaccaaaattcttggcataataatcagctacatacaaatcacatatagtttaatcttttttaatgaaaaaaaatcatgtttaaaatggcaaaagcccatcttatacacttttatatagctgcaaaaaatttatatctgtacagatctaacactacgacactcagtattcattttattgaagcatgcaagtaaagcactttttctaatttatatagaggtatctaattaacacagcacattgtactaatgactaggagtagcagctttttcttctctccctctatgaattcttataatgtccctttttctgtaagtttttgagaggcaattggcaatttaggaggcagcagggtctgttttggtcaaatcttgaatttcgttgttgcactctagtgactgatctttgggaatgtcttgtctttgcatggggctcatagagatgtgtgcagacttgcttattgtggttagtgtgtatcaggaacacacacacaggtgttctgaccagctcaggcttgccacagtgagcaactctgtggctagcaaaagagaagtttatttgtgcccagccattggtcaccttgggtgatgcaccagatagcaggcagatgttggttcattggccttcgtcctctttcctcctaaaataatattggctttaccatcttaactcagctgtgggttttttgtgggttcttgtttgttttttggcatgaattgtcatctttggtgtttttttaacccccagcccctcaaaaaaataaggcctccaggtatcaagatctcatattaggattttctgtccttaattttttgagcaaaatctggaaaatgtgaaagcatatttagattttatatactatctgaaatgtgatttgttaagattcttaaatttgggcctcttagaataattttgaatgagatctaccgactcacttgtgagaatatttttcacagattatctttgggccttttcattagaaagctgtttgtttgtccccctgttggtacatttggttacctcattttgccgtttcagattgtgaaagctcacaggggtgttttttggaatcatttgctgagtcattttctcaaatcatattccattgtatcagttaacatatagttttaaatgtatgtattataaatatctgtaaccaaatcatttgaaggcttgataaatttttaacaaagtttgtacattttttatgaaagttactagtaatgctttactaagtagtgcaatgaatttttatttttaatccctgtgcccaattttggagttgagagggttgttggtaataaatgtatgatgtacacttaaaacatc

SEQ ID NO: 26849 - DNA, 5254 bp, Homo sapiens
  source 1..5254: mol_type = unassigned DNA
gcggcggggcgcggcggggcggggaggggcgtggccgggccgggcccctagtgcggtgttgcgggacggggccgaggcccggtcggttggggcgtgggggcggagaggatggagcctccgaggcgttaggcgactctgtcatctctgggcgtgcagccgtcgtttcctggcgcggcccgtgtgatggtgccgggaggaaggaagcgcagtgacagtgcctaagttggagccggggttccgggggtgaggaggcccgcggacggcggatctggcgagctggccgcgggctgggcgagcagtcacaataggaggcggcggcccagcgaggatccgcgggagctgcccggcagggcggagcctcccctcgcagatatctcccggggccaattcagcatctctacctggccatcctaacaaggtgatttgtgaaagggtgagacttcagagcctgttccctctcctcccaagtgatcagaacactaccgttcaagaggatgctcacttcaaagctttcttccagagtgaagatagtccaagtcctaagagacagcgcctctctcattcagtctttgattatacatcagcatcaccagctccctcaccaccaatgcgaccatgggagatgacatcaaataggcagcccccttcagttcgaccaagccaacatcacttctcaggggaacgatgcaacacacctgcacgcaacagaagaagtcctcctgtcaggcgccagagaggaagaagggatcgtctgtctcgacataattccattagtcaagatgaaaactatcaccatctcccttacgcacagcagcaagcaatagaggagcctcgagccttccaccctccgaatgtatctccccgtctgctacatcctgctgctcatccaccccagcagaatgcagtcatggttgacatacatgatcagctccatcaaggaacagtccctgtttcttacacagtaacaacagtggcaccacatgggattccactctgcacaggccagcacatccctgcttgtagtacacagcaggtcccaggatgctctgtggttttcagtggacagcacctccctgtctgtagtgtgcctcctccaatgcttcaggcatgttcagttcagcacttaccagtaccatatgctgcattcccaccccttatttctagtgatccatttcttatacatcctcctcacctttctccccatcatcctcctcatttgccaccaccaggccagtttgtccctttccaaacacagcaatcacgatcgcctctgcaaaggatagaaaatgaagtggaactcttaggagaacatcttccagtaggaggttttacttaccctccatcagcccaccccccaacattacctccatcagctcccttgcagttcttaacacatgatcctttgcatcaggaggtgtcctttggagtaccttatcctccatttatgcctcggaggcttacaggacgtagtagataccgatcccagcagccaataccacctcccccttatcatcccagcttactgccatatgtgttatcaatgcttccagtgccacctgcagtgggcccaactttcagctttgaattagatgtagaagatggagaagtagaaaattacgaggccctgttaaacctggcagagcgactgggagaggcaaagcctcgtggactgactaaagcagatattgaacaacttccttcttatcggttcaatcctaacaaccaccagtcagaacagactttgtgtgtagtatgcatgtgtgattttgagtcaaggcagctacttagagtcttaccctgtaaccacgagttccatgccaagtgtgttgacaaatggcttaaggcaaatcgtacttgcccaatttgccgagctgatgcttcagaagtgcatcgggattcagaatgaccaacctaagaagcacaaatttagtttgggtgttcctcatcacatgtatatacggactatccattgaacttaatctgtgtggcttccagccctccctttaccaaaagggtcaatggacctttctttgcactgtgtgacttaatcaactataaaagcttacaattagtcttcacagttatgggattgttatactaaccgtgtgattggaactccaaagactttttctttagcttaattttgtgtgtgcactaacattccctggtttttgtgtgatcattccgagtgttgctgcaagattacagtggacgtgatcttttagcatgtgcttttataaaaagtggtagctacagatgatatagcaatctaccttatatagagccttcagaaactgtgagtggaaatgaatgcgcagcgtatgactgttggtgataagtgtatctgtgtgagtgtgtgcaactacttgtgtgagggcatggtagctaacgtgtgtatgagatcctatataccagcatgtaccaagaatgtgtgtgtagttttaattatgctgcaatgtataatctggtgtgttatttaaacagcactagtactgtacactggtttttttcccttgtgtttgctgttgcacactgattgctgagggtgcatcaattacaagcattgaatactccatccccttccctcccagtgaatggaatgagaaaagccttcttcctttgcttcaggcagctgtcaccttctctttattggtggtcctaagtgggtcacttaagaaaaaaaagtgtaacaaattctcgctccatgaacctggtttttttttattctgttgtggaaatttttaaatctccaacttgctgtttccaaaaagaaggtgcaatatcatatatcatcagttagcaatattagcatttcaatcagtgatttgaatgttgatacttttttttcctttacatttccagtaagtttcttacagaaagtacctgtgattttttttaatgtttagatttgtagtctagtctattctgaagatatttgattaatatatttctaagaagaccactagtcccatgaagtctcaccttgttgacttccaccagaacaaaacctgttaattcagcttgacttctcatatgtgttctgtgttcaagctcctgtgggcaactcaattgttttaagaaaactctatttctgttcatattaattcacttgccagactccaattctgaaagttgtctagttcttccttcatcacacgtgcttctcatcgaaaccctggtttcaggatggatcaagtgctgttacagctcatgttccttagacctgatttgttttgatattttactgcctttccttttaatttttgtttgaatgagaaaagtttaatacaacaggtgtccagaatacttgcagtataaatgaagatttggtttttgtataaaaaaataatgctgttaaacaggagttgaccttcatttagttgatgtaatacatagctgtatggggttttttttagtaagttctttgagcataattcactttaaagtcatttttccagcaatgtttaaattactttctcattcttttagtgtattcaacattgtctgcctcttcctgcagttgatgtaattgctttgtttgcaatagcacaagctgcattattccagtcaggactgtgataacttgctgccagccccactcaactttcagttggctctgtgtcagttttccattcagtgttaactacttgttactgccatgctgcttgccctcccttgaagtgtctataagctcatcacagcctagagttaagtaaagtcaattcacagaagcacaattttgccctttgcgagacattgttgcctctatctagtcctacaagtagggttttgcatactgtgtttgcccctagggttgtcagtgcatcagaaatacttctaaatagtggtaaaaatgcacatggttaatgcacatgttacttttaaatcattaggatatccctcacctgttcctgatgaataaaaagtgtgttaaagaccaaaattcttggcataataatcagctacatacaaatcacatatagtttaatcttttttaatgaaaaaaaatcatgtttaaaatggcaaaagcccatcttatacacttttatatagctgcaaaaaatttatatctgtacagatctaacactacgacactcagtattcattttattgaagcatgcaagtaaagcactttttctaatttatatagaggtatctaattaacacagcacattgtactaatgactaggagtagcagctttttcttctctccctctatgaattcttataatgtccctttttctgtaagtttttgagaggcaattggcaatttaggaggcagcagggtctgttttggtcaaatcttgaatttcgttgttgcactctagtgactgatctttgggaatgtcttgtctttgcatggggctcatagagatgtgtgcagacttgcttattgtggttagtgtgtatcaggaacacacacacaggtgttctgaccagctcaggcttgccacagtgagcaactctgtggctagcaaaagagaagtttatttgtgcccagccattggtcaccttgggtgatgcaccagatagcaggcagatgttggttcattggccttcgtcctctttcctcctaaaataatattggctttaccatcttaactcagctgtgggttttttgtgggttcttgtttgttttttggcatgaattgtcatctttggtgtttttttaacccccagcccctcaaaaaaataaggcctccaggtatcaagatctcatattaggattttctgtccttaattttttgagcaaaatctggaaaatgtgaaagcatatttagattttatatactatctgaaatgtgatttgttaagattcttaaatttgggcctcttagaataattttgaatgagatctaccgactcacttgtgagaatatttttcacagattatctttgggccttttcattagaaagctgtttgtttgtccccctgttggtacatttggttacctcattttgccgtttcagattgtgaaagctcacaggggtgttttttggaatcatttgctgagtcattttctcaaatcatattccattgtatcagttaacatatagttttaaatgtatgtattataaatatctgtaaccaaatcatttgaaggcttgataaatttttaacaaagtttgtacattttttatgaaagttactagtaatgctttactaagtagtgcaatgaatttttatttttaatccctgtgcccaattttggagttgagagggttgttggtaataaatgtatgatgtacactt

SEQ ID NO: 26850 - DNA, 1659 bp, Homo sapiens
  source 1..1659: mol_type = unassigned DNA
gcagagtgaagatagtccaagtcctaagagacagcgcctctctcattcagtctttgattatacatcagcatcaccagctccctcaccaccaatgcgaccatgggagatgacatcaaataggcagcccccttcagttcgaccaagccaacatcacttctcaggggaacgatgcaacacacctgcacgcaacagaagaaggttacctataagcatattgccagattttctcccagaaacaggctgtgccaagcagatgcagtttttaacaataatctagcaggatttcagttacagagtcctcctgtcaggcgccagagaggaagaagggatcgtctgtctcgacataattccattagtcaagatgaaaactatcaccatctcccttacgcacagcagcaagcaatagaggagcctcgagccttccaccctccgaatgtatctccccgtctgctacatcctgctgctcatccaccccagcagaatgcagtcatggttgacatacatgatcagctccatcaaggaacagtccctgtttcttacacagtaacaacagtggcaccacatgggattccactctgcacaggccagcacatccctgcttgtagtacacagcaggtcccaggatgctctgtggttttcagtggacagcacctccctgtctgtagtgtgcctcctccaatgcttcaggcatgttcagttcagcacttaccagtaccatatgctgcattcccaccccttatttctagtgatccatttcttatacatcctcctcacctttctccccatcatcctcctcatttgccaccaccaggccagtttgtccctttccaaacacagcaatcacgatcgcctctgcaaaggatagaaaatgaagtggaactcttaggagaacatcttccagtaggaggttttacttaccctccatcagcccaccccccaacattacctccatcagctcccttgcagttcttaacacatgatcctttgcatcaggaggtgtcctttggagtaccttatcctccatttatgcctcggaggcttacaggacgtagtagataccgatcccagcagccaataccacctcccccttatcatcccagcttactgccatatgtgttatcaatgcttccagtgccacctgcagtgggcccaactttcagctttgaattagatgtagaagatggagaagtagaaaattacgaggccctgttaaacctggcagagcgactgggagaggcaaagcctcgtggactgactaaagcagatattgaacaacttccttcttatcggttcaatcctaacaaccaccagtcagaacagactttgtgtgtagtatgcatgtgtgattttgagtcaaggcagctacttagagtcttaccctgtaaccacgagttccatgccaagtgtgttgacaaatggcttaaggcaaatcgtacttgcccaatttgccgagctgatgcttcagaagtgcatcgggattcagaatgaccaacctaagaagcacaaatttagtttgggtgttcctcatcacatgtatatacggactatccattgaacttaatctgtgtggcttccagccctccctttaccaaaagggtcaatggacctttctttgcactgtgtgacttaatcaactataaaagcttacaattagtcttc

SEQ ID NO: 26851 - DNA, 4064 bp, Homo sapiens
  source 1..4064: mol_type = unassigned DNA
aagccaacatcacttctcaggggaacgatgcaacacacctgcacgcaacagaagaagtcctcctgtcaggcgccagagaggaagaagggatcgtctgtctcgacataattccattagtcaagatgaaaactatcaccatctcccttacgcacagcagcaagcaatagaggagcctcgagccttccaccctccgaatgtatctccccgtctgctacatcctgctgctcatccaccccagcagaatgcagtcatggttgacatacatgatcagctccatcaaggaacagtccctgtttcttacacagtaacaacagtggcaccacatgggattccactctgcacaggccagcacatccctgcttgtagtacacagcaggtcccaggatgctctgtggttttcagtggacagcacctccctgtctgtagtgtgcctcctccaatgcttcaggcatgttcagttcagcacttaccagtaccatatgctgcattcccaccccttatttctagtgatccatttcttatacatcctcctcacctttctccccatcatcctcctcatttgccaccaccaggccagtttgtccctttccaaacacagcaatcacgatcgcctctgcaaaggatagaaaatgaagtggaactcttaggagaacatcttccagtaggaggttttacttaccctccatcagcccaccccccaacattacctccatcagctcccttgcagttcttaacacatgatcctttgcatcaggaggtgtcctttggagtaccttatcctccatttatgcctcggaggcttacaggacgtagtagataccgatcccagcagccaataccacctcccccttatcatcccagcttactgccatatgtgttatcaatgcttccagtgccacctgcagtgggcccaactttcagctttgaattagatgtagaagatggagaagtagaaaattacgaggccctgttaaacctggcagagcgactgggagaggcaaagcctcgtggactgactaaagcagatattgaacaacttccttcttatcggttcaatcctaacaaccaccagtcagaacagactttgtgtgtagtatgcatgtgtgattttgagtcaaggcagctacttagagtcttaccctgtaaccacgagttccatgccaagtgtgttgacaaatggcttaaggcaaatcgtacttgcccaatttgccgagctgatgcttcagaagtgcatcgggattcagaatgaccaacctaagaagcacaaatttagtttgggtgttcctcatcacatgtatatacggactatccattgaacttaatctgtgtggcttccagccctccctttaccaaaagggtcaatggacctttctttgcactgtgtgacttaatcaactataaaagcttacaattagtcttcacagttatgggattgttatactaaccgtgtgattggaactccaaagactttttctttagcttaattttgtgtgtgcactaacattccctggtttttgtgtgatcattccgagtgttgctgcaagattacagtggacgtgatcttttagcatgtgcttttataaaaagtggtagctacagatgatatagcaatctaccttatatagagccttcagaaactgtgagtggaaatgaatgcgcagcgtatgactgttggtgataagtgtatctgtgtgagtgtgtgcaactacttgtgtgagggcatggtagctaacgtgtgtatgagatcctatataccagcatgtaccaagaatgtgtgtgtagttttaattatgctgcaatgtataatctggtgtgttatttaaacagcactagtactgtacactggtttttttcccttgtgtttgctgttgcacactgattgctgagggtgcatcaattacaagcattgaatactccatccccttccctcccagtgaatggaatgagaaaagccttcttcctttgcttcaggcagctgtcaccttctctttattggtggtcctaagtgggtcacttaagaaaaaaaagtgtaacaaattctcgctccatgaacctggtttttttttattctgttgtggaaatttttaaatctccaacttgctgtttccaaaaagaaggtgcaatatcatatatcatcagttagcaatattagcatttcaatcagtgatttgaatgttgatacttttttttcctttacatttccagtaagtttcttacagaaagtacctgtgattttttttaatgtttagatttgtagtctagtctattctgaagatatttgattaatatatttctaagaagaccactagtcccatgaagtctcaccttgttgacttccaccagaacaaaacctgttaattcagcttgacttctcatatgtgttctgtgttcaagctcctgtgggcaactcaattgttttaagaaaactctatttctgttcatattaattcacttgccagactccaattctgaaagttgtctagttcttccttcatcacacgtgcttctcatcgaaaccctggtttcaggatggatcaagtgctgttacagctcatgttccttagacctgatttgttttgatattttactgcctttccttttaatttttgtttgaatgagaaaagtttaatacaacaggtgtccagaatacttgcagtataaatgaagatttggtttttgtataaaaaaataatgctgttaaacaggagttgaccttcatttagttgatgtaatacatagctgtatggggttttttttagtaagttctttgagcataattcactttaaagtcatttttccagcaatgtttaaattactttctcattcttttagtgtattcaacattgtctgcctcttcctgcagttgatgtaattgctttgtttgcaatagcacaagctgcattattccagtcaggactgtgataacttgctgccagccccactcaactttcagttggctctgtgtcagttttccattcagtgttaactacttgttactgccatgctgcttgccctcccttgaagtgtctataagctcatcacagcctagagttaagtaaagtcaattcacagaagcacaattttgccctttgcgagacattgttgcctctatctagtcctacaagtagggttttgcatactgtgtttgcccctagggttgtcagtgcatcagaaatacttctaaatagtggtaaaaatgcacatggttaatgcacatgttacttttaaatcattaggatatccctcacctgttcctgatgaataaaaagtgtgttaaagaccaaaattcttggcataataatcagctacatacaaatcacatatagtttaatcttttttaatgaaaaaaaatcatgtttaaaatggcaaaagcccatcttatacacttttatatagctgcaaaaaatcttaactcagctgtgggttttttgtgggttcttgtttgttttttggcatgaattgtcatctttggtgtttttttaacccccagcccctcaaaaaaataaggcctccaggtatcaagatctcatattaggattttctgtccttaattttttgagcaaaatctggaaaatgtgaaagcatatttagattttatatactatctgaaatgtgatttgttaagattcttaaatttgggcctcttagaataattttgaatgagatctaccgactcacttgtgagaatatttttcacagattatctttgggccttttcattagaaagctgtttgtttgtccccctgttggtacatttggttacctcattttgccgtttcagattgtgaaagctcacaggggtgttttttggaatcatttgctgagtcattttctcaaatcatattccattgtatcagttaacatatagttttaaatgtatgtattataaatatctgtaaccaaatcatttgaaggcttgataaatttttaacaaagtttgtacattttttatgaaagttactagtaatgctttactaagtagtgcaatgaatttttatttttaatccctgtgcccaattttggagttgagagggttgttggtaataaatgtatgatgtacactt

SEQ ID NO: 26852 - DNA, 1976 bp, Homo sapiens
  source 1..1976: mol_type = unassigned DNA
agtgcggtgttgcgggacggggccgaggcccggtcggttggggcgtgggggcggagaggatggagcctccgaggcgttaggcgactctgtcatctctgggcgtgcagccgtcgtttcctggcgcggcccgtgtgatggtgccgggaggaaggaagcgcagtgacagtgcctaagttggagccggggttccgggggtgaggaggcccgcggacggcggatctggcgagctggccgcgggctgggcgagcagtcacaataggaggcggcggcccagcgaggatccgcgggagctgcccggcagggcggagcctcccctcgcagagtgaagatagtccaagtcctaagagacagcgcctctctcattcagtctttgattatacatcagcatcaccagctccctcaccaccaatgcgaccatgggagatgacatcaaataggcagcccccttcagttcgaccaagccaacatcacttctcaggggaacgatgcaacacacctgcacgcaacagaagaaggttacctataagcatattgccagattttctcccagaaacaggctgtgccaagcagatgcagtttttaacaataatctagcaggatttcagttacagagtcctcctgtcaggcgccagagaggaagaagggatcgtctgtctcgacataattccattagtcaagatgaaaactatcaccatctcccttacgcacagcagcaagcaatagaggagcctcgagccttccaccctccgaatgtatctccccgtctgctacatcctgctgctcatccaccccagcagaatgcagtcatggttgacatacatgatcagctccatcaaggaacagtccctgtttcttacacagtaacaacagtggcaccacatgggattccactctgcacaggccagcacatccctgcttgtagtacacagcaggtcccaggatgctctgtggttttcagtggacagcacctccctgtctgtagtgtgcctcctccaatgcttcaggcatgttcagttcagcacttaccagtaccatatgctgcattcccaccccttatttctagtgatccatttcttatacatcctcctcacctttctccccatcatcctcctcatttgccaccaccaggccagtttgtccctttccaaacacagcaatcacgatcgcctctgcaaaggatagaaaatgaagtggaactcttaggagaacatcttccagtaggaggttttacttaccctccatcagcccaccccccaacattacctccatcagctcccttgcagttcttaacacatgatcctttgcatcaggaggtgtcctttggagtaccttatcctccatttatgcctcggaggcttacaggacgtagtagataccgatcccagcagccaataccacctcccccttatcatcccagcttactgccatatgtgttatcaatgcttccagtgccacctgcagtgggcccaactttcagctttgaattagatgtagaagatggagaagtagaaaattacgaggccctgttaaacctggcagagcgactgggagaggcaaagcctcgtggactgactaaagcagatattgaacaacttccttcttatcggttcaatcctaacaaccaccagtcagaacagactttgtgtgtagtatgcatgtgtgattttgagtcaaggcagctacttagagtcttaccctgtaaccacgagttccatgccaagtgtgttgacaaatggcttaaggcaaatcgtacttgcccaatttgccgagctgatgcttcagaagtgcatcgggattcagaatgaccaacctaagaagcacaaatttagtttgggtgttcctcatcacatgtatatacggactatccattgaacttaatctgtgtggcttccagccctccctttaccaaaagggtcaatggacctttctttgcactgtgtgacttaatcaactataaaagcttacaattagtcttc

SEQ ID NO: 26853 - DNA, 4985 bp, Homo sapiens
  source 1..4985: mol_type = unassigned DNA
cttccccctcggggtggaaacaaagggggttcggcgcgcggtgcggagcctgggggaaaagggaggagcgctccggtggtctggcgcgctgggctcgctagatatctcccggggccaattcagcatctctacctggccatcctaacaaggtgatttgtgaaagggtgagacttcagagcctgttccctctcctcccaagtgatcagaacactaccgttcaagaggatgctcacttcaaagctttcttccagagtgaagatagtccaagtcctaagagacagcgcctctctcattcagtctttgattatacatcagcatcaccagctccctcaccaccaatgcgaccatgggagatgacatcaaataggcagcccccttcagttcgaccaagccaacatcacttctcaggggaacgatgcaacacacctgcacgcaacagaagaagtcctcctgtcaggcgccagagaggaagaagggatcgtctgtctcgacataattccattagtcaagatgaaaactatcaccatctcccttacgcacagcagcaagcaatagaggagcctcgagccttccaccctccgaatgtatctccccgtctgctacatcctgctgctcatccaccccagcagaatgcagtcatggttgacatacatgatcagctccatcaaggaacagtccctgtttcttacacagtaacaacagtggcaccacatgggattccactctgcacaggccagcacatccctgcttgtagtacacagcaggtcccaggatgctctgtggttttcagtggacagcacctccctgtctgtagtgtgcctcctccaatgcttcaggcatgttcagttcagcacttaccagtaccatatgctgcattcccaccccttatttctagtgatccatttcttatacatcctcctcacctttctccccatcatcctcctcatttgccaccaccaggccagtttgtccctttccaaacacagcaatcacgatcgcctctgcaaaggatagaaaatgaagtggaactcttaggagaacatcttccagtaggaggttttacttaccctccatcagcccaccccccaacattacctccatcagctcccttgcagttcttaacacatgatcctttgcatcaggaggtgtcctttggagtaccttatcctccatttatgcctcggaggcttacaggacgtagtagataccgatcccagcagccaataccacctcccccttatcatcccagcttactgccatatgtgttatcaatgcttccagtgccacctgcagtgggcccaactttcagctttgaattagatgtagaagatggagaagtagaaaattacgaggccctgttaaacctggcagagcgactgggagaggcaaagcctcgtggactgactaaagcagatattgaacaacttccttcttatcggttcaatcctaacaaccaccagtcagaacagactttgtgtgtagtatgcatgtgtgattttgagtcaaggcagctacttagagtcttaccctgtaaccacgagttccatgccaagtgtgttgacaaatggcttaaggcaaatcgtacttgcccaatttgccgagctgatgcttcagaagtgcatcgggattcagaatgaccaacctaagaagcacaaatttagtttgggtgttcctcatcacatgtatatacggactatccattgaacttaatctgtgtggcttccagccctccctttaccaaaagggtcaatggacctttctttgcactgtgtgacttaatcaactataaaagcttacaattagtcttcacagttatgggattgttatactaaccgtgtgattggaactccaaagactttttctttagcttaattttgtgtgtgcactaacattccctggtttttgtgtgatcattccgagtgttgctgcaagattacagtggacgtgatcttttagcatgtgcttttataaaaagtggtagctacagatgatatagcaatctaccttatatagagccttcagaaactgtgagtggaaatgaatgcgcagcgtatgactgttggtgataagtgtatctgtgtgagtgtgtgcaactacttgtgtgagggcatggtagctaacgtgtgtatgagatcctatataccagcatgtaccaagaatgtgtgtgtagttttaattatgctgcaatgtataatctggtgtgttatttaaacagcactagtactgtacactggtttttttcccttgtgtttgctgttgcacactgattgctgagggtgcatcaattacaagcattgaatactccatccccttccctcccagtgaatggaatgagaaaagccttcttcctttgcttcaggcagctgtcaccttctctttattggtggtcctaagtgggtcacttaagaaaaaaaagtgtaacaaattctcgctccatgaacctggtttttttttattctgttgtggaaatttttaaatctccaacttgctgtttccaaaaagaaggtgcaatatcatatatcatcagttagcaatattagcatttcaatcagtgatttgaatgttgatacttttttttcctttacatttccagtaagtttcttacagaaagtacctgtgattttttttaatgtttagatttgtagtctagtctattctgaagatatttgattaatatatttctaagaagaccactagtcccatgaagtctcaccttgttgacttccaccagaacaaaacctgttaattcagcttgacttctcatatgtgttctgtgttcaagctcctgtgggcaactcaattgttttaagaaaactctatttctgttcatattaattcacttgccagactccaattctgaaagttgtctagttcttccttcatcacacgtgcttctcatcgaaaccctggtttcaggatggatcaagtgctgttacagctcatgttccttagacctgatttgttttgatattttactgcctttccttttaatttttgtttgaatgagaaaagtttaatacaacaggtgtccagaatacttgcagtataaatgaagatttggtttttgtataaaaaaataatgctgttaaacaggagttgaccttcatttagttgatgtaatacatagctgtatggggttttttttagtaagttctttgagcataattcactttaaagtcatttttccagcaatgtttaaattactttctcattcttttagtgtattcaacattgtctgcctcttcctgcagttgatgtaattgctttgtttgcaatagcacaagctgcattattccagtcaggactgtgataacttgctgccagccccactcaactttcagttggctctgtgtcagttttccattcagtgttaactacttgttactgccatgctgcttgccctcccttgaagtgtctataagctcatcacagcctagagttaagtaaagtcaattcacagaagcacaattttgccctttgcgagacattgttgcctctatctagtcctacaagtagggttttgcatactgtgtttgcccctagggttgtcagtgcatcagaaatacttctaaatagtggtaaaaatgcacatggttaatgcacatgttacttttaaatcattaggatatccctcacctgttcctgatgaataaaaagtgtgttaaagaccaaaattcttggcataataatcagctacatacaaatcacatatagtttaatcttttttaatgaaaaaaaatcatgtttaaaatggcaaaagcccatcttatacacttttatatagctgcaaaaaatttatatctgtacagatctaacactacgacactcagtattcattttattgaagcatgcaagtaaagcactttttctaatttatatagaggtatctaattaacacagcacattgtactaatgactaggagtagcagctttttcttctctccctctatgaattcttataatgtccctttttctgtaagtttttgagaggcaattggcaatttaggaggcagcagggtctgttttggtcaaatcttgaatttcgttgttgcactctagtgactgatctttgggaatgtcttgtctttgcatggggctcatagagatgtgtgcagacttgcttattgtggttagtgtgtatcaggaacacacacacaggtgttctgaccagctcaggcttgccacagtgagcaactctgtggctagcaaaagagaagtttatttgtgcccagccattggtcaccttgggtgatgcaccagatagcaggcagatgttggttcattggccttcgtcctctttcctcctaaaataatattggctttaccatcttaactcagctgtgggttttttgtgggttcttgtttgttttttggcatgaattgtcatctttggtgtttttttaacccccagcccctcaaaaaaataaggcctccaggtatcaagatctcatattaggattttctgtccttaattttttgagcaaaatctggaaaatgtgaaagcatatttagattttatatactatctgaaatgtgatttgttaagattcttaaatttgggcctcttagaataattttgaatgagatctaccgactcacttgtgagaatatttttcacagattatctttgggccttttcattagaaagctgtttgtttgtccccctgttggtacatttggttacctcattttgccgtttcagattgtgaaagctcacaggggtgttttttggaatcatttgctgagtcattttctcaaatcatattccattgtatcagttaacatatagttttaaatgtatgtattataaatatctgtaaccaaatcatttgaaggcttgataaatttttaacaaagtttgtacattttttatgaaagttactagtaatgctttactaagtagtgcaatgaatttttatttttaatccctgtgcccaattttggagttgagagggttgttggtaataaatgtatgatgtacactt

SEQ ID NO: 26854 - DNA, 2206 bp, Homo sapiens
  source 1..2206: mol_type = unassigned DNA
cccaaaccttacccgggaagcaggagaaccagatgaggcgttacgcaaggcctggtgtttacctcccgtgggagcctcctccctccctataaagcctgatgtggtggagagatttgacgagactgagactctggttgaagagagaggcaatcccaggagaggggcggaaagcggcaaaagttaatgcgggagtcggagagaagggcatctacacagcaagcagcaggggcggcccgccatctgcgcgctcgaaggcggtcacggtggtcgcggaaggggcggcgtccagatcctggctttccatggatgcgcccgagctgggcccggggctggtggagcgtctggagcagctggcgacgtgtcctctgtgcgggggctccttcgaggacccggtgcttctggcgtgcgagcacagcttctgccgcgcgtgtctggcccgccgctgggggactccgccggcgaccggcaccgaggcttcccccaccgcctgtccctgctgcggcctgccgtgtccccgccgcagcctgaggtctaatgtgcggctggcggtggaggtgcgaatcagccgcgagctgcgagagaagctggctgagcctggggcccgtgcggggagacgccgaggggggcgcatccccaccatgggctgcctggacctgcccggagaggatatgaggaagacatggagacgatttgaagtcccaacatccaagtcatctaattcagaggatgatctccctgaagattatccagtggtcaaaaaaatgcttcatagactgacagccgacctgaccctggaccctgggaccgcacaccgccgcctgctcatctccgccgaccgccgcagcgtacaactggccccaccagggacgcccgcgccccctgacggccccaagcgcttcgatcagctcccagctgtgctgggtgcgcagggcttcggggccggccgccactgctgggaggtggagactgcggacgccgcctcctgcagagactcttctggggaggatgcggacgacgaggagagccactatgcagtgggcgcggccggggaatcagtgcaacgcaagggctgcgtaaggctgtgccctgcgggggccgtgtgggccgtggagggccgcggcggccgcctgtgggccctcacggcacccgaacccaccctgctgggcggtgttgagcccccgccgcggcgcattcgcgtggacctggactgggagcggggccgcgtggccttctacgacggccgctcactcgacctgctttacgccttccaggcgcctggccccctgggggagcgcatcttcccgctgttctgcacctgcgaccctcgtgctccgctccgcattgtaccagcggaaagctgagtctcgtctccaactagaagtttggcccggccactggccctgcagctgctttttgggggtggaattccccactcatttctgggaacacattcacacgcccattgcaggagtattaatagcaacccacattttcgccccaaaataatgagacctcacctggtctccacgtttccacgtccctgctcaaaaccaaatccattcctgccttctggctctcagaatcttctctcccctacagctactacagtacttcctgacttctcccattcaaaccattctaggcctgcaatggggaacaggccctccccatcagtattggtaaagtgaccatgattcctacatagaggctctgctggtcaaatacttgactcccactcttgccactcctagctccagaagggctcagggccttccccacagatctaaggactgggctaccctgcctgtccactgaggtttctcctaaaacaagaggcttgactctggtctgggccctgtggccctctgggaagctttgtacctcttttgcaggatctgggggtggggagggacaagctagttccccaacctcctatgactgctttctatgctcacagccttttttccataagaaccttcttgaaacttctccccgcacatactcacggaaaggaaccaatggtgctatttcccctctctcctcctcaacctgggaatacttcagacatctccaaactcatccttgtgtatagtctcacacccttccccataagtataaatgggcccatatttaacacattttgtgattttgggttatttattttgtgcatctgtggcaataaatgagatctcagtggtggtatgga

SEQ ID NO: 26855 - DNA, 756 bp, Homo sapiens
  source 1..756: mol_type = unassigned DNA
atgtggtggagagatttgacgagactgagactctggttgaagagagaggcaatcccaggagaggggcggaaagcggcaaaagttaatgcgggagtcggagagaagggcatctacacagcaagcagcaggggcggcccgccatctgcgcgctcgaaggcggtcacggtggtcgcggaaggggcggcgtccagatcctggctttccatggatgcgcccgagctgggcccggggctggtggagcgtctggagcagctggcgacgtgtcctctgtgcgggggctccttcgaggacccggtgcttctggcgtgcgagcacagcttctgccgcgcgtgtctggcccgccgctgggggactccgccggcgaccggcaccgaggcttcccccaccgcctgtccctgctgcggcctgccgtgtccccgccgcagcctgaggtctaatgtgcggctggcggtggaggtgcgaatcagccgcgagctgctttttgggggtggaattccccactcatttctgggaacacattcacacgcccattgcaggagtattaatagcaacccacattttcgccccaaaataatgagacctcacctggtctccacgtttccacgtccctgctcaaaaccaaatccattcctgccttctggctctcagaatcttctctcccctacagctactacagtacttcctgacttctcccattcaaaccattctaggcctgcaatggggaacaggccctccccatcagtattggtaaagtga

SEQ ID NO: 26856 - DNA, 1961 bp, Homo sapiens
  source 1..1961: mol_type = unassigned DNA
cgttacgcaaggcctggtgtttacctcccgtgggagcctcctccctccctataaagcctgatgtggtggagagatttgacgagactgagactctggttgaagagagaggcaatcccaggagaggggcggaaagcggcaaaagttaatgcgggagtcggagagaagggcatctacacagcaagcagcaggggcggcccgccatctgcgcgctcgaaggcggtcacggtggtcgcggaaggggcggcgtccagatcctggctttccatggatgcgcccgagctgggcccggggctggtggagcgtctggagcagctggcgacgtgtcctctgtgcgggggctccttcgaggacccggtgcttctggcgtgcgagcacagcttctgccgcgcgtgtctggcccgccgctgggggactccgccggcgaccggcaccgaggcttcccccaccgcctgtccgtgctgcggcctgccgtgtccccgccgcagcctgaggtctaatgtgcggctggcggtggaggtgcgaatcagccgcgagctgcgagagaagctggctgagcctggggcccgtgcggggagacgccgaggggggcgcatccccaccatgggctgcctggacctgcccggagaggatatgaggaagacatggagacgatttgaagtcccaacacccaagtcatctaattcagaggatgatctccctgaagattatccagtggtcaaaaaaatgcttcatagactgacagccgacctgaccctggaccctgggaccgcacaccgccgcctgctcatctccaccgaccgccgcagcgtacaactggccccaccagggacgcccgcgccccctgacggccccaagcgcttcgatcagctcccagctgtgctgggtgcgcagggcttcggggccggccgccactgctgggaggtggagactgcggacgccgcctcctgcagagactcttctggggaggatgaggacgacgaggagagccactatgcagtgggcgcggccggggaatcagtgcaacgcaagggctgcgcgcctggccccctgggggagcgcatcttcccgctgttctgcacctgcgaccctcgtgctccgctccgcattgtaccagcggaaagctgagtctcgtctccaactagaagtttggcccggccactggccctgcagctgctttttgggcgtggaattccccactcatttctgggaacacattcacacgcccattgcaggagtattaatagcaacccacattttcgccccaaaataatgagacctcacctggtctccacgtttccacatccctgctcaaaaccaaatccattcctgccttctggctctcagaatcttctctcccctacagctactacagtacttcctgacttctcccattcaaaccattctaggcctgcaatggggaacaggccctccccatcagtattggtaaagtgaccatgattcctacatagaggctctgctggtcaaatacttgactcccactcttgccactcctagctccagaagggctcagggccttccccacagatctaaggactgggctaccctgcctgtccactgaggtttctcctaaaacaagaggcttgactctggtctgggccctgtggccctctgggaagctttgtactcttttgcaggatctgggggtggggagggacaagctagttccccaacctcctatgactgctttctatgctcacagccttttttccataagaaccttcttgaaacttctccccgcacatacggaaaggaaccaatggtgctatttcccctctctcctcctcaacctgggaatacttcagacatctccaaactcatccttgtgtatagtctcacacccttccccataagtataaatgggcccatatttaacacattttgtgattttgggttatttattttgtgcatctgtggcaataaatgagatctcagtggtggta

SEQ ID NO: 26857 - DNA, 1970 bp, Homo sapiens
  source 1..1970: mol_type = unassigned DNA
cgttacgcaaggcctggtgtttacctcccgtgggagcctcctccctccctataaagcctgatgtggtggagagatttgacgagactgagactctggttgaagagagaggcaatcccaggagaggggcggaaagcggcaaaagttaatgcgggagtcggagagaagggcatctacacagcaagcagcaggggcggcccgccatctgcgcgctcgaaggcggtcacggtggtcgcggaaggggcggcgtccagatcctggctttccatggatgcgcccgagctgggcccggggctggtggagcgtctggagcagctggcgacgtgtcctctgtgcgggggctccttcgaggacccggtgcttctggcgtgcgagcacagcttctgccgcgcgtgtctggcccgccgctgggggactccgccggcgaccggcaccgaggcttcccccaccgcctgtccctgctgcggcctgccgtgtccccgccgcagcctgaggtctaatgtgcggctggcggtggaggtgcgaatcagccgcgagctgcgagagaagctggctgagcctggggcccgtgcggggagacgccgaggggggcgcatccccaccatgggctgcctggacctgcccggagaggatatgaggaagacatggagacgatttgaagtcccaacatccaagtcatctaattcagaggatgatctccctgaagattatccagtggtcaaaaaaatgcttcatagactgacagccgacctgaccctggaccctgggaccgcacaccgccgcctgctcatctccgccgaccgccgcagcgtacaactggccccaccagggacgcccgcgccccctgacggccccaagcgcttcgatcagctcccagctgtgctgggtgcgcagggcttcggggccggccgccactgctgggaggtggagactgcggacgccgcctcctgcagagactcttctggggaggatgcggacgacgaggagagccactatgcagtgggcgcggccggggaatcagtgcaacgcaagggctgcgcgcctggccccctgggggagcgcatcttcccgctgttctgcacctgcgaccctcgtgctccgctccgcattgtaccagcggaaagctgagtctcgtctccaactagaagtttggcccggccactggccctgcagctgctttttgggggtggaattccccactcatttctgggaacacattcacacgcccattgcaggagtattaatagcaacccacattttcgccccaaaataatgagacctcacctggtctccacgtttccacgtccctgctcaaaaccaaatccattcctgccttctggctctcagaatcttctctcccctacagctactacagtacttcctgacttctcccattcaaaccattctaggcctgcaatggggaacaggccctccccatcagtattggtaaagtgaccatgattcctacatagaggctctgctggtcaaatacttgactcccactcttgccactcctagctccagaagggctcagggccttccccacagatctaaggactgggctaccctgcctgtccactgaggtttctcctaaaacaagaggcttgactctggtctgggccctgtggccctctgggaagctttgtacctcttttgcaggatctgggggtggggagggacaagctagttccccaacctcctatgactgctttctatgctcacagccttttttccataagaaccttcttgaaacttctccccgcacatactcacggaaaggaaccaatggtgctatttcccctctctcctcctcaacctgggaatacttcagacatctccaaactcatccttgtgtatagtctcacacccttccccataagtataaatgggcccatatttaacacattttgtgattttgggttatttattttgtgcatctgtggcaataaatgagatctcagtggtggtatgga

SEQ ID NO: 26858 - DNA, 2161 bp, Homo sapiens
  source 1..2161: mol_type = unassigned DNA
ggcgttacgcaaggcctggtgtttacctcccgtgggagcctcctccctccctataaagcctgatgtggtggagagatttgacgagactgagactctggttgaagagagaggcaatcccaggagaggggcggaaagcggcaaaagttaatgcgggagtcggagagaagggcatctacacagcaagcagcaggggcggcccgccatctgcgcgctcgaaggcggtcacggtggtcgcggaaggggcggcgtccagatcctggctttccatggatgcgcccgagctgggcccggggctggtggagcgtctggagcagctggcgacgtgtcctctgtgcgggggctccttcgaggacccggtgcttctggcgtgcgagcacagcttctgccgcgcgtgtctggcccgccgctgggggactccgccggcgaccggcaccgaggcttcccccaccgcctgtccgtgctgcggcctgccgtgtccccgccgcagcctgaggtctaatgtgcggctggcggtggaggtgcgaatcagccgcgagctgcgagagaagctggctgagcctggggcccgtgcggggagacgccgaggggggcgcatccccaccatgggctgcctggacctgcccggagaggatatgaggaagacatggagacgatttgaagtcccaacacccaagtcatctaattcagaggatgatctccctgaagattatccagtggtcaaaaaaatgcttcatagactgacagccgacctgaccctggaccctgggaccgcacaccgccgcctgctcatctccaccgaccgccgcagcgtacaactggccccaccagggacgcccgcgccccctgacggccccaagcgcttcgatcagctcccagctgtgctgggtgcgcagggcttcggggccggccgccactgctgggaggtggagactgcggacgccgcctcctgcagagactcttctggggaggatgaggacgacgaggagagccactatgcagtgggcgcggccggggaatcagtgcaacgcaagggctgcgtaaggctgtgccctgcgggggccgtgtgggccgtggagggccgcggcggccgcctgtgggccctcacggcacccgagcccaccctgctgggcggtgttgagcccccgccgcggcgcattcgcgtggacctggactgggagcggggccgcgtggccttctacgacggccgctcactcgacctgctttacgccttccaggcgcctggccccctgggggagcgcatcttcccgctgttctgcacctgcgaccctcgtgctccgctccgcattgtaccagcggaaagctgagtctcgtctccaactagaagtttggcccggccactggccctgcagctgctttttgggcgtggaattccccactcatttctgggaacacattcacacgcccattgcaggagtattaatagcaacccacattttcgccccaaaataatgagacctcacctggtctccacgtttccacatccctgctcaaaaccaaatccattcctgccttctggctctcagaatcttctctcccctacagctactacagtacttcctgacttctcccattcaaaccattctaggcctgcaatggggaacaggccctccccatcagtattggtaaagtgaccatgattcctacatagaggctctgctggtcaaatacttgactcccactcttgccactcctagctccagaagggctcagggccttccccacagatctaaggactgggctaccctgcctgtccactgaggtttctcctaaaacaagaggcttgactctggtctgggccctgtggccctctgggaagctttgtactcttttgcaggatctgggggtggggagggacaagctagttccccaacctcctatgactgctttctatgctcacagccttttttccataagaaccttcttgaaacttctccccgcacatacggaaaggaaccaatggtgctatttcccctctctcctcctcaacctgggaatacttcagacatctccaaactcatccttgtgtatagtctcacacccttccccataagtataaatgggcccatatttaacacattttgtgattttgggttatttattttgtgcatctgtggcaataaatgagatctcagtggtggta

SEQ ID NO: 26859 - DNA, 1970 bp, Homo sapiens
  source 1..1970: mol_type = unassigned DNA
cgttacgcaaggcctggtgtttacctcccgtgggagcctcctccctccctataaagcctgatgtggtggagagatttgacgagactgagactctggttgaagagagaggcaatcccaggagaggggcggaaagcggcaaaagttaatgcgggagtcggagagaagggcatctacacagcaagcagcaggggcggcccgccatctgcgcgctcgaaggcggtcacggtggtcgcggaaggggcggcgtccagatcctggctttccatggatgcgcccgagctgggcccggggctggtggagcgtctggagcagctggcgacgtgtcctctgtgcgggggctccttcgaggacccggtgcttctggcgtgcgagcacagcttctgccgcgcgtgtctggcccgccgctgggggactccgccggcgaccggcaccgaggcttcccccaccgcctgtccctgctgcggcctgccgtgtccccgccgcagcctgaggtctaatgtgcggctggcggtggaggtgcgaatcagccgcgagctgcgagagaagctggctgagcctggggcccgtgcggggagacgccgaggggggcgcatccccaccatgggctgcctggacctgcccggagaggatatgaggaagacatggagacgatttgaagtcccaacatccaagtcatctaattcagaggatgatctccctgaagattatccagtggtcaaaaaaatgcttcatagactgacagccgacctgaccctggaccctgggaccgcacaccgccgcctgctcatctccgccgaccgccgcagcgtacaactggccccaccagggacgcccgcgccccctgacggccccaagcgcttcaatcagctcccagctgtgctgggtgcgcagggcttcggggccggccgccactgctgggaggtggagactgcggacgccgcctcctgcagagactcttctggggaggatgcggacgacgaggagagccactatgcagtgggcgcggccggggaatcagtgcaacgcaagggctgcgcgcctggccccctgggggagcgcatcttcccgctgttctgcacctgcgaccctcgtgctccgctccgcattgtaccagcggaaagctgagtctcgtctccaactagaagtttggcccggccactggccctgcagctgctttttgggggtggaattccccactcatttctgggaacacattcacacgcccattgcaggagtattaatagcaacccacattttcgccccaaaataatgagacctcacctggtctccacgtttccacgtccctgctcaaaaccaaatccattcctgccttctggctctcagaatcttctctcccctacagctactacagtacttcctgacttctcccattcaaaccattctaggcctgcaatggggaacaggccctccccatcagtattggtaaagtgaccatgattcctacatagaggctctgctggtcaaatacttgactcccactcttgccactcctagctccagaagggctcagggccttccccacagatctaaggactgggctaccctgcctgtccactgaggtttctcctaaaacaagaggcttgactctggtctgggccctgtggccctctgggaagctttgtacctcttttgcaggatctgggggtggggagggacaagctagttccccaacctcctatgactgctttctatgctcacagccttttttccataagaaccttcttgaaacttctccccgcacatactcacggaaaggaaccaatggtgctatttcccctctctcctcctcaacctgggaatacttcagacatctccaaactcatccttgtgtatagtctcacacccttccccataagtataaatgggcccatatttaacacattttgtgattttgggttatttattttgtgcatctgtggcaataaatgagatctcagtggtggtatgga

SEQ ID NO: 26860 - DNA, 2206 bp, Homo sapiens
  source 1..2206: mol_type = unassigned DNA
cccaaaccttacccgggaagcaggagaaccagatgaggcgttacgcaaggcctggtgtttacctcccgtgggagcctcctccctccctataaagcctgatgtggtggagagatttgacgagactgagactctggttgaagagagaggcaatcccaggagaggggcggaaagcggcaaaagttaatgcgggagtcggagagaagggcatctacacagcaagcagcaggggcggcccgccatctgcgcgctcgaaggcggtcacggtggtcgcggaaggggcggcgtccagatcctggctttccatggatgcgcccgagctgggcccggggctggtggagcgtctggagcagctggcgacgtgtcctctgtgcgggggctccttcgaggacccggtgcttctggcgtgcgagcacagcttctgccgcgcgtgtctggcccgccgctgggggactccgccggcgaccggcaccgaggcttcccccaccgcctgtccctgctgcggcctgccgtgtccccgccgcagcctgaggtctaatgtgcggctggcggtggaggtgcgaatcagccgcgagctgcgagagaagctggctgagcctggggcccgtgcggggagacgccgaggggggcgcatccccaccatgggctgcctggacctgcccggagaggatatgaggaagacatggagacgatttgaagtcccaacatccaagtcatctaattcagaggatgatctccctgaagattatccagtggtcaaaaaaatgcttcatagactgacagccgacctgaccctggaccctgggaccgcacaccgccgcctgctcatctccgccgaccgccgcagcgtacaactggccccaccagggacgcccgcgccccctgacggccccaagcgcttcgatcagctcccagctgtgctgggtgcgcagggcttcggggccggccgccactgctgggaggtggagactgcggacgccgcctcctgcagagactcttctggggaggatgcggacgacgaggagagccactatgcagtgggcgcggccggggaatcagtgcaacgcaagggctgcgtaaggctgtgccctgcgggggccgtgtgggccgtggggggccgcggcggccgcctgtgggccctcacggcacccgaacccaccctgctgggcggtgttgagcccccgccgcggcgcattcgcgtggacctggactgggagcggggccgcgtggccttctacgacggccgctcactcgacctgctttacgccttccaggcgcctggccccctgggggagcgcatcttcccgctgttctgcacctgcgaccctcgtgctccgctccgcattgtaccagcggaaagctgagtctcgtctccaactagaagtttggcccggccactggccctgcagctgctttttgggggtggaattccccactcatttctgggaacacattcacacgcccattgcaggagtattaatagcaacccacattttcgccccaaaataatgagacctcacctggtctccacgtttccacgtccctgctcaaaaccaaatccattcctgccttctggctctcagaatcttctctcccctacagctactacagtacttcctgacttctcccattcaaaccattctaggcctgcaatggggaacaggccctccccatcagtattggtaaagtgaccatgattcctacatagaggctctgctggtcaaatacttgactcccactcttgccactcctagctccagaagggctcagggccttccccacagatctaaggactgggctaccctgcctgtccactgaggtttctcctaaaacaagaggcttgactctggtctgggccctgtggccctctgggaagctttgtacctcttttgcaggatctgggggtggggagggacaagctagttccccaacctcctatgactgctttctatgctcacagccttttttccataagaaccttcttgaaacttctccccgcacatactcacggaaaggaaccaatggtgctatttcccctctctcctcctcaacctgggaatacttcagacatctccaaactcatccttgtgtatagtctcacacccttccccataagtataaatgggcccatatttaacacattttgtgattttgggttatttattttgtgcatctgtggcaataaatgagatctcagtggtggtatgga

SEQ ID NO: 26861 - DNA, 2206 bp, Homo sapiens
  source 1..2206: mol_type = unassigned DNA
cccaaaccttacccgggaagcaggagaaccagatgaggcgttacgcaaggcctggtgtttacctcccgtgggagcctcctccctccctataaagcctgatgtggtggagagatttgacgagactgagactctggttgaagagagaggcaatcccaggagaggggcggaaagcggcaaaagttaatgcgggagtcggagagaagggcatctacacagcaagcagcaggggcggcccgccatctgcgcgctcgaaggcggtcacggtggtcgcggaaggggcggcgtccagatcctggctttccatggatgcgcccgagctgggcccggggctggtggagcgtctggagcagctggcgacgtgtcctctgtgcgggggctccttcgaggacccggtgcttctggcgtgcgagcacagcttctgccgcgcgtgtctggcccgccgctgggggactccgccggcgaccggcaccgaggcttcccccaccgcctgtccctgctgcggcctgccgtgtccccgccgcagcctgaggtctaatgtgcggctggcggtggaggtgcgaatcagccgcgagctgcgagagaagctggctgagcctggggcccgtgcggggagacgccgaggggggcgcatccccaccatgggctgcctggacctgcccggagaggatatgaggaagacatggagacgatttgaagtcccaacatccaagtcatctaattcagaggatgatctccctgaagattatccagtggtcaaaaaaatgcttcatagactgacagccgacctgaccctggaccctgggaccgcacaccgccgcctgctcatctccgccgaccgccgcagcgtacaactggccccaccagggacgcccgcgccccctgacggccccaagcgcttcgatcagctcccagctgtgctgggtgcgcagggcttcggggccggccgccactgctgggaggtggagactgcggacgccgcctcctgcagagactcttctggggaggatgcggacgacgaggagagccactatgcagtgggcgcggccggggaatcagtgcaacgcaagggctgcgtaaggctgtgccctgcgggggccgtgtgggccgtggagggccgcggcggccgcctgtgggccctcacggcacccgaacccaccctgctgggcggtgttgagcccccgccgcggcgcattcgcgtggacctggactgggagcggggccgcgtggccttctacgacggccgctcactcgacctgctttacgccttccaggcgcctggccccctgggggagcgcatcttcccgctgttctgcacctgcgaccctcgtgctccgctccgcattgtaccagcggaaagctgagtctcgtctccaactagaagtttggcccggccactggccctgcagctgctttttgggggtggaattccccactcatttctgggaacacattcacacgcccattgcaggagtattaatagcaacccacattttcgccccaaaataatgagacctcacctggtctccacgtttccacgtccctgctcaaaaccaaatccattcctgccttctggctctcagaatcttctctcccctacagctgctacagtacttcctgacttctcccattcaaaccattctaggcctgcaatggggaacaggccctccccatcagtattggtaaagtgaccatgattcctacatagaggctctgctggtcaaatacttgactcccactcttgccactcctagctccagaagggctcagggccttccccacagatctaaggactgggctaccctgcctgtccactgaggtttctcctaaaacaagaggcttgactctggtctgggccctgtggccctctgggaagctttgtacctcttttgcaggatccgggggtggggagggacaagctagttccccaacctcctatgactgctttctatgctcacagccttttttccataagaaccttcttgaaacttctccccgcacatactcacggaaaggaaccaatggtgctatttcccctctctcctcctcaacctgggaatacttcagacatctccaaactcatccttgtgtatagtctcacacccttccccataagtataaatgggcccatatttaacacattttgtgattttgggttatttattttgtgcatctgtggcaataaatgagatctcagtggtggtatgga

SEQ ID NO: 26862 - DNA, 2206 bp, Homo sapiens; identical to SEQ ID NO: 26854
  source 1..2206: mol_type = unassigned DNA

SEQ ID NO: 26863 - DNA, 1970 bp, Homo sapiens
  source 1..1970: mol_type = unassigned DNA
cgttacgcaaggcctggtgtttacctcccgtgggagcctcctccctccctataaagcctgatgtggtggagagatttgacgagactgagactctggttgaagagagaggcaatcccaggagaggggcggaaagcggcaaaagttaatgcgggagtcggagagaagggcatctacacagcaagcagcaggggcggcccgccatctgcgcgctcgaaggcggtcacggtggtcgcggaaggggcggcgtccagatcctggctttccatggatgcgcccgagctgggcccggggctggtggagcgtctggagcagctggcgacgtgtcctctgtgcgggggctccttcgaggacccggtgcttctggcgtgcgagcacagcttctgccgcgcgtgtctggcccgccgctgggggactccgccggcgaccggcaccgaggcttcccccaccgcctgtccctgctgcggcctgccgtgtccccgccgcagcctgaggtctaatgtgcggctggcggtggaggtgcgaatcagccgcgagctgcgagagaagctggctgagcctggggcccgtgcggggagacgccgaggggggcgcatccccaccatgggctgcctggacctgcccggagaggatatgaggaagacatggagacgatttgaagtcccaacatccaagtcatctaattcagaggatgatctccctgaagattatccagtggtcaaaaaaatgcttcatagactgacagccgacctgaccctggaccctgggaccgcacaccgccgcctgctcatctccgccgaccgccgcagcgtacaactggccccaccagggacgcccgcgccccctgacggccccaagcgcttcgatcagctcccagctgtgctgggtgcgcagggcttcggggccggccgccactgctgggaggtggagactgcggacgccgcctcctgcagagactcttctggggaggatgcggacgacgaggagagccactatgcagtgggcgcggccggggaatcagtgcaacgcaagggctgcgcgcctggccccctgggggagcgcatcttcccgctgttctgcacctgcgaccctcgtgctccgctccgcattgtaccagcggaaagctgagtctcgtctccaactagaagtttggcccggccactggccctgcagctgctttttgggggtggaattccccactcatttctgggaacacattcacacgcccattgcaggagtattaatagcaacccacattttcgccccaaaataatgagacctcacctggtctccacgtttccacgtccctgctcaaaaccaaatccattcctgccttctggctctcagaatcttctctcccctacagctactacagtacttcctgacttctcccattcaaaccattctaggcctgcaatggggaacaggccctccccatcagtattggtaaagtgaccatgattcctacatagaggctctgctggtcaaatacttgactcccactcttgccactcctagctccagaagggctcagggccttccccacagatctaaggactgggctaccctgcctgtccactgaggtttctcctaaaacaagaggcttgactctggtctgggccctgtggccctctgggaagctttgtacctcttttgcaggatccgggggtggggagggacaagctagttccccaacctcctatgactgctttctatgctcacagccttttttccataagaaccttcttgaaacttctccccgcacatactcacggaaaggaaccaatggtgctatttcccctctctcctcctcaacctgggaatacttcagacatctccaaactcatccttgtgtatagtctcacacccttccccataagtataaatgggcccatatttaacacattttgtgattttgggttatttattttgtgcatctgtggcaataaatgagatctcagtggtggtatgga

SEQ ID NO: 26864 - DNA, 1970 bp, Homo sapiens; identical to SEQ ID NO: 26863
  source 1..1970: mol_type = unassigned DNA

SEQ ID NO: 26865 - DNA, 1970 bp, Homo sapiens
  source 1..1970: mol_type = unassigned DNA
cgttacgcaaggcctggtgtttacctcccgtgggagcctcctccctccctataaagcctgatgtggtggagagatttgacgagactgagactctggttgaagagagaggcaatcccaggagaggggcggaaagcggcaaaagttaatgcgggagtcggagagaagggcatctacacagcaagcagcaggggcggcccgccatctgcgcgctcgaaggcggtcacggtggtcgcggaaggggcggcgtccagatcctggctttccatggatgcgcccgagctgggcccggggctggtggagcgtctggagcagctggcgacgtgtcctctgtgcgggggctccttcgaggacccggtgcttctggcgtgcgagcacagcttctgccgcgcgtgtctggcccgccgctgggggactccgccggcgaccggcaccgaggcttcccccaccgcctgtccctgctgcggcctgccgtgtccccgccgcagcctgaggtctaatgtgcggctggcggtggaggtgcgaatcagccgcgagctgcgagagaagctggctgagcctggggcccgtgcggggagacgccgaggggggcgcatccccaccatgggctgcctggacctgcccggagaggatatgaggaagacatggagacgatttgaagtcccaacatccaagtcatctaattcagaggatgatctccctgaagattatccagtggtcaaaaaaatgcttcatagactgacagccgacctgaccctggaccctgggaccgcacaccgccgcctgctcatctccgccgaccgccgcagcgtacaactggccccaccagggacgcccgcgccccctgacggccccaagcgcttcgatcagctcccagctgtgctgggtgcgcagggcttcggggccggccgccactgctgggaggtggagactgcggacgccgcctcctgcagagactcttctggggaggatgcggacgacgaggagagccactatgcagtgggcgcggccggggaatcagtgcaacgcaagggctgcgcgcctggccccctgggggagcgcatcttcccgctgttctgcacctgcgaccctcgtgctccgctccgcattgtaccagcggaaagctgagtctcgtctccaactagaagtttggcccggccactggccctgcagctgctttttgggggtggaattccccactcatttctgggaacacattcacacgcccattgcaggagtattaatagcaacccacattttcgccccaaaataatgagacctcacctggtctccacgtttccacgtccctgctcaaaaccaaatccattcctgccttctggctctcagaatcttctctcccctacagctgctacagtacttcctgacttctcccattcaaaccattctaggcctgcaatggggaacaggccctccccatcagtattggtaaagtgaccatgattcctacatagaggctctgctggtcaaatacttgactcccactcttgccactcctagctccagaagggctcagggccttccccacagatctaaggactgggctaccctgcctgtccactgaggtttctcctaaaacaagaggcttgactctggtctgggccctgtggccctctgggaagctttgtacctcttttgcaggatccgggggtggggagggacaagctagttccccaacctcctatgactgctttctatgctcacagccttttttccataagaaccttcttgaaacttctccccgcacatactcacggaaaggaaccaatggtgctatttcccctctctcctcctcaacctgggaatacttcagacatctccaaactcatccttgtgtatagtctcacacccttccccataagtataaatgggcccatatttaacacattttgtgattttgggttatttattttgtgcatctgtggcaataaatgagatctcagtggtggtatgga

SEQ ID NO: 26866 - DNA, 2206 bp, Homo sapiens
  source 1..2206: mol_type = unassigned DNA
cccaaaccttacccgggaagcaggagaaccagatgaggcgttacgcaaggcctggtgtttacctcccgtgggagcctcctccctccctataaagcctgatgtggtggagagatttgacgagactgagactctggttgaagagagaggcaatcccaggagaggggcggaaagcggcaaaagttaatgcgggagtcggagagaagggcatctacacagcaagcagcaggggcggcccgccatctgcgcgctcgaaggcggtcacggtggtcgcggaaggggcggcgtccagatcctggctttccatggatgcgcccgagctgggcccggggctggtggagcgtctggagcagctggcgacgtgtcctctgtgcgggggctccttcgaggacccggtgcttctggcgtgcgagcacagcttctgccgcgcgtgtctggcccgccgctgggggactccgccggcgaccggcaccgaggcttcccccaccgcctgtccctgctgcggcctgccgtgtccccgccgcagcctgaggtctaatgtgcggctggcggtggaggtgcgaatcagccgcgagctgcgagagaagctggctgagcctggggcccgtgcggggagacgccgaggggggcgcatccccaccatgggctgcctggacctgcccggagaggatatgaggaagacatggagacgatttgaagtcccaacatccaagtcatctaattcagaggatgatctccctgaagattatccagtggtcaaaaaaatgcttcatagactgacagccgacctgaccctggaccctgggaccgcacaccgccgcctgctcatctccgccgaccgccgcagcgtacaactggccccaccagggacgcccgcgccccctgacggccccaagcgcttcaatcagctcccagctgtgctgggtgcgcagggcttcggggccggccgccactgctgggaggtggagactgcggacgccgcctcctgcagagactcttctggggaggatgcggacgacgaggagagccactatgcagtgggcgcggccggggaatcagtgcaacgcaagggctgcgtaaggctgtgccctgcgggggccgtgtgggccgtggagggccgcggcggccgcctgtgggccctcacggcacccgaacccaccctgctgggcggtgttgagcccccgccgcggcgcattcgcgtggacctggactgggagcggggccgcgtggccttctacgacggccgctcactcgacctgctttacgccttccaggcgcctggccccctgggggagcgcatcttcccgctgttctgcacctgcgaccctcgtgctccgctccgcattgtaccagcggaaagctgagtctcgtctccaactagaagtttggcccggccactggccctgcagctgctttttgggggtggaattccccactcatttctgggaacacattcacacgcccattgcaggagtattaatagcaacccacattttcgccccaaaataatgagacctcacctggtctccacgtttccacgtccctgctcaaaaccaaatccattcctgccttctggctctcagaatcttctctcccctacagctactacagtacttcctgacttctcccattcaaaccattctaggcctgcaatggggaacaggccctccccatcagtattggtaaagtgaccatgattcctacatagaggctctgctggtcaaatacttgactcccactcttgccactcctagctccagaagggctcagggccttccccacagatctaaggactgggctaccctgcctgtccactgaggtttctcctaaaacaagaggcttgactctggtctgggccctgtggccctctgggaagctttgtacctcttttgcaggatctgggggtggggagggacaagctagttccccaacctcctatgactgctttctatgctcacagccttttttccataagaaccttcttgaaacttctccccgcacatactcacggaaaggaaccaatggtgctatttcccctctctcctcctcaacctgggaatacttcagacatctccaaactcatccttgtgtatagtctcacacccttccccataagtataaatgggcccatatttaacacattttgtgattttgggttatttattttgtgcatctgtggcaataaatgagatctcagtggtggtatgga

SEQ ID NO: 26867 - DNA, 2206 bp, Homo sapiens
  source 1..2206: mol_type = unassigned DNA
cccaaaccttacccgggaagcaggagaaccagatgaggcgttacgcaaggcctggtgtttacctcccgtgggagcctcctccctccctataaagcctgatgtggtggagagatttgacgagactgagactctggttgaagagagaggcaatcccaggagaggggcggaaagcggcaaaagttaatgcgggagtcggagagaagggcatctacacagcaagcagcaggggcggcccgccatctgcgcgctcgaaggcggtcacggtggtcgcggaaggggcggcgtccagatcctggctttccatggatgcgcccgagctgggcccggggctggtggagcgtctggagcagctggcgacgtgtcctctgtgcgggggctccttcgaggacccggtgcttctggcgtgcgagcacagcttctgccgcgcgtgtctggcccgccgctgggggactccgccggcgaccggcaccgaggcttcccccaccgcctgtccctgctgcggcctgccgtgtccccgccgcagcctgaggtctaatgtgcggctggcggtggaggtgcgaatcagccgcgagctgcgagagaagctggctgagcctggggcccgtgcggggagacgccgaggggggcgcatccccaccatgggctgcctggacctgcccggagaggatatgaggaagacatggagacgatttgaagtcccaacatccaagtcatctaattcagaggatgatctccctgaagattatccagtggtcaaaaaaatgcttcatagactgacagccgacctgaccctggaccctgggaccgcacaccgccgcctgctcatctccgccgaccgccgcagcgtacaactggccccaccagggacgcccgcgccccctgacggccccaagcgcttcgatcagctcccagctgtgctgggtgcgcagggcttcggggccggccgccactgctgggaggtggagactgcggacgccgcctcctgcagagactcttctggggaggatgcggacgacgaggagagccactatgcagtgggcgcggccggggaatcagtgcaacgcaagggctgcgtaaggctgtgccctgcgggggccgtgtgggccgtggagggccgcggcggccgcctgtgggccctcacggcacccgaacccaccctgctgggcggtgttgagcccccgccgcggcgcattcgcgtggacctggactgggagcggggccgcgtggccttctacgacggccgctcactcgacctgctttacgccttccaggcgcctggccccctgggggagcgcatcttcccgctgttctgcacctgcgaccctcgtgctccgctccgcattgtaccagcggaaagctgagtctcgtctccaactagaagtttggcccggccactggccctgcagctgctttttgggggtggaattccccactcatttctgggaacacattcacacgcccattgcaggagtattaatagcaacccacattttcgccccaaaataatgagacctcacctggtctccacgtttccacgtccctgctcaaaaccaaatccattcctgccttctggctctcagaatcttctctcccctacagctactacagtacttcctgacttctcccattcaaaccattctaggcctgcaatggggaacaggccctccccatcagtattggtaaagtgaccatgattcctacatagaggctctgctggtcaaatacttgactcccactcttgccactcctagctccagaagggctcagggccttccccacagatctaaggactgggctaccctgcctgtccactgaggtttctcctaaaacaagaggcttgactctggtctgggccctgtggccctctgggaagctttgtacctcttttgcaggatccgggggtggggagggacaagctagttccccaacctcctatgactgctttctatgctcacagccttttttccataagaaccttcttgaaacttctccccgcacatactcacggaaaggaaccaatggtgctatttcccctctctcctcctcaacctgggaatacttcagacatctccaaactcatccttgtgtatagtctcacacccttccccataagtataaatgggcccatatttaacacattttgtgattttgggttatttattttgtgcatctgtggcaataaatgagatctcagtggtggtatgga

SEQ ID NO: 26868 - DNA, 1970 bp, Homo sapiens; identical to SEQ ID NO: 26857
  source 1..1970: mol_type = unassigned DNA

SEQ ID NO: 26869 - DNA, 2206 bp, Homo sapiens; identical to SEQ ID NO: 26867
  source 1..2206: mol_type = unassigned DNA

SEQ ID NO: 26870 - DNA, 1970 bp, Homo sapiens; identical to SEQ ID NO: 26857
  source 1..1970: mol_type = unassigned DNA

SEQ ID NO: 26871 - DNA, 756 bp, Homo sapiens; identical to SEQ ID NO: 26855
  source 1..756: mol_type = unassigned DNA

SEQ ID NO: 26872 - DNA, 756 bp, Homo sapiens; identical to SEQ ID NO: 26855
  source 1..756: mol_type = unassigned DNA

SEQ ID NO: 26873 - DNA, 756 bp, Homo sapiens; identical to SEQ ID NO: 26855
  source 1..756: mol_type = unassigned DNA

SEQ ID NO: 26874 - DNA, 756 bp, Homo sapiens; identical to SEQ ID NO: 26855
  source 1..756: mol_type = unassigned DNA

SEQ ID NO: 26875 - DNA, 756 bp, Homo sapiens; identical to SEQ ID NO: 26855
  source 1..756: mol_type = unassigned DNA

SEQ ID NO: 26876 - DNA, 756 bp, Homo sapiens
  source 1..756: mol_type = unassigned DNA
atgtggtggagagatttgacgagactgagactctggttgaagagagaggcaatcccaggagaggggcggaaagcggcaaaagttaatgcgggagtcggagagaagggcatctacacagcaagcagcaggggcggcccgccatctgcgcgctcgaaggcggtcacggtggtcgcggaaggggcggcgtccagatcctggctttccatggatgcgcccgagctgggcccggggctggtggagcgtctggagcagctggcgacgtgtcctctgtgcgggggctccttcgaggacccggtgcttctggcgtgcgagcacagcttctgccgcgcgtgtctggcccgccgctgggggactccgccggcgaccggcaccgaggcttcccccaccgcctgtccctgctgcggcctgccgtgtccccgccgcagcctgaggtctaatgtgcggctggcggtggaggtgcgaatcagccgcgagctgctttttgggggtggaattccccactcatttctgggaacacattcacacgcccattgcaggagtattaatagcaacccacattttcgccccaaaataatgagacctcacctggtctccacgtttccacgtccctgctcaaaaccaaatccattcctgccttctggctctcagaatcttctctcccctacagctgctacagtacttcctgacttctcccattcaaaccattctaggcctgcaatggggaacaggccctccccatcagtattggtaaagtga

SEQ ID NO: 26877 - DNA, 756 bp, Homo sapiens
  source 1..756: mol_type = unassigned DNA
atgtggtggagagatttgacgagactgagactctggttgaagagagaggcaatcccaggagaggggcggaaagcggcaaaagttaatgcgggagtcggagagaagggcatctacacagcaagcagcaggggcggcccgccatctgcgcgctcgaaggcggtcacggtggtcgcggaaggggcggcgtccagatcctggctttccatggatgcgcccgagctgggcccggggctggtggagcgtctggagcagctggcgacgtgtcctctgtgcgggggctccttcgaggacccggtgcttctggcgtgcgagcacagcttctgccgcgcgtgtctggcccgccgctgggggactccgccggcgaccggcaccgaggcttcccccaccgcctgtccgtgctgcggcctgccgtgtccccgccgcagcctgaggtctaatgtgcggctggcggtggaggtgcgaatcagccgcgagctgctttttgggcgtggaattccccactcatttctgggaacacattcacacgcccattgcaggagtattaatagcaacccacattttcgccccaaaataatgagacctcacctggtctccacgtttccacatccctgctcaaaaccaaatccattcctgccttctggctctcagaatcttctctcccctacagctactacagtacttcctgacttctcccattcaaaccattctaggcctgcaatggggaacaggccctccccatcagtattggtaaagtga

SEQ ID NO: 26878 - DNA, 3088 bp, Homo sapiens
  source 1..3088: mol_type = unassigned DNA
agtgcgctcgattgtgggcgggggcggaaagaggcgcgttttaaagtggtaacagatggttttcttatccaataggattaaaaaatttgtccttacccggccgaccgcggaagtagagtaggcgggcggccaatggggacatgatggggggcggagccgaggcctccgaagcggaagtgggttgctgttgaggcggcggcatctttctcgaggagctctcctgggcggctgaagaaggagcttcttctccggagtgcgccggcggtggcgcctgcggacctaactagctccaggttaggccgagctttgcgggaaagcagcggacttgaaaatactggaaatctgtccggatccaaattattttgcaagccagatgagtaaccagagggcatgaaaggttgagaacatttgacttccctgcaaaccttggtatagatcacttccttttctgtaggaaaggaaaggcaccaaagagcacaatgagtacaagaaagcgtcgtggtggagcaataaattctagacaagctcagaagcgaactcgggaagcaacctccacccccgagatctccttggaagcagaacccatagaactcgtggaaactgctggagatgaaattgtggacctcacttgtgaatctttagagcctgtggtggttgatctgactcacaatgactctgttgtgattgttgacgaaagaagaagaccaaggaggaatgctaggaggctgccccaggaccatgctgacagctgtgtggtgagcagtgacgatgaggagttgtccagggacagagacgtatatgtgactacccatactcccagaaacgccagggatgagggcgctacaggcctcaggccctcaggtactgtcagttgtcccatctgcatggacggatactcagagatcgtgcagaatggacgtctcatcgtttccacagaatgcggccatgtcttctgtagccagtgcctccgtgattccctgaagaatgctaatacttgcccaacttgtaggaaaaagatcaaccacaaacggtaccaccccatttatatatgaagtattcagagccccccaggagagacggatggacagacagacagccaggttctccagtggtatctgcctccattttcctgagatcaaaaagactgtttcgaaaccaacatctgatatgtaaactgctcttttgtttccaaccccttccttttgttatctccagtttgatgctatggcgctggacccagggccctcccaggccatctctgttcctctggggtggtccagttctagagtgggagaaagggagtcaggcgcattgggaatcgtggttccagtctggttgcagaatctgcacatttgccaagaaattttccctgtttggaaagtttgccccagctttcccgggcacaccaccttttgtcccaagtgtctgccggtcgaccaatctgcctgccacacattgaccaagccagacccggttcacccagctcgaggatcccaggttgaagagtggccccttgaggccctggaaagaccaatcactggacttcttcccttgagagtcagaggtcacccgtgattctgcctgcaccttatcattgatctgcagtgatttctgcaaatcaagagaaactctgcagggcactcccctgtttcctaagaacgaaaaagtgcaataaaggccattcgttacctacttttcagcagcccacaagatgtagcactattagtgtccccctcagaggcttaatgttgcctgtggagcagtgcccatcccagcccgtttctgcccaccagttgttctcaggaaccttacccatgctccagcgtccttcacctggcacaggacatgcaagataaatagggcaggcacgtgtttgggtgtcctctcttttctgataaaatccatcccgtgtttgccacacgccctccagtcctcagttcccactgcctaacgtctgcccccgtgtagatactgagaggtggtggcagtaattgtggccttatcagccgctcagttccaggcttttgcccaggtcactgttgccccatgttcggagaacctggcccacctgtcttggctttctcatccttcccaacccagtgccgtttatttcagaagcttcctggccactgggcttggatgcttcgggcttctgactgctccataggttttgactggtgaaacaggggcccagatgacaacctctccttcgctccacaggtacgcgggagcctcaggttctctcaggggcagcaaagtggcccaagctgcccctgacagcacagggcctggggggtggctaacgagagaggccttacagtgccggcatgcctcctcttccactgtcgtccttcctcagagggcctcacgccaaacaaacggccttttcgtgtgaaacatcttcagggcgggaaaggggccacttctggctttgttagcaataactgaccttcagtttacccttctgaaggagcagggactcagcacagaattcactttagacggggctgaaggagtgtccctcctctatgtgaaaagaaaattgttttattcttcattctgactttttaactgtttggctcacttccagttagtttgaatgaaaataataattttctacttggagttgaagagggcagaatccgcagctctcatcattgtgatgtgtagcatgtctgccctctgactggacatcattgccattaactttcttctgggcatcacggcaatgtcacgatgcccagacttggagcaaggcaaccttggagtcagtccactcataaaatatggtaacacccattttaaaatttaagttttgtccttaaagacaacttcagtggttaattataaaagttgtgttacttcgtcctaaattaaattgatagaaagatttaaaaatgtgttttgtttctactattcagaaactgcgaactagggaaaggttggtatgaagaaatgtctttccttttttcaatgtacatagttcaactctttctttgttacatttaaactatatccatggatatcagtctgctttggactcctctgctagtgttacagatggaaataaaaccattaatttgaacca

SEQ ID NO: 26879 - DNA, 558 bp, Homo sapiens
  source 1..558: mol_type = unassigned DNA
tagaagtgctggagactcccccaacccctccagcccctgagcggtggtactgtctaggagcgcgccgcggcccctgggcctcgctgtctgtcctaaatcattccggtgaacctctccggctgcgtagctccttgcccccgcgtcgcttggacacgggtggcatcctgggtctggcctgggcctcccgccggcctgctcctgagcccgccgcgtcgcccgccaggtgggaggaaaagaaggcccttgcggcggccccggcggcgccctcgcaggacgagcgcgtgcagcagctgcggcgcaggatctcggagagggcggccgagcgcagcaggcaggcggccttgctgcacgtgtcggcgccgcggaccgcgcgccccaagccccgggacttgaaaatactggaaatctgtccggatccaaattattttgcaagccagatgagtaaccagagggcatgaaaggttgagaacatttgacttccctgcaaaccttggtatagatcacttccttttctgtaggaaaggaaaggcaccaaagagcacaatgagtacaagaaag

SEQ ID NO: 26880 - DNA, 2098 bp, Homo sapiens
  source 1..2098: mol_type = unassigned DNA
agaagttaggaggtctgcgtctgggtctcggctcaccctggggggccgcggccatggggcttagttcctagcctaggaagggaaactgagactctgggaggggcaggaacgcccccaaggtcacttggaaagtcgggcaggatgtgctgttagggggaagacccgggcagggtttttgttccccgctgacgacgcctcctttgtgtgttcgcgccgccgccccgccatcgtggggcctgcgagtttgccggggtgcgtgggccgcgtggcggggccttttgtaggtcgggaggatctgagtacgggtgcgggcctgaccgtgggggcgccgaggtcgcagtctaaaacttagtagggcctcgatttccgggcgcgcttccgggccccggctggtggttggtggaacgtgcgactgtgaggcttgcggcccagccctgcaccgctcgggcccttcaccgctctggcgcgcctatagacaggtgtatgaagattctcacgacccgaaacagagttgctagtaaacaccgcttttccgcctttgatccatcgagggaagagggaaaaggatagagcttgggcaagccgttttggtggaatctcactctgtcacccaggatgcagtgcactggcgtgttctcggtctcactgtaacctctgccatctgggctcaagtgattctcctgcctcagcctccggagtagctgggattacaggacttgaaaatactggaaatctgtccggatccaaattattttgcaagccagatgagtaaccagagggcatgaaaggttgagaacatttgacttccctgcaaaccttggtatagatcacttccttttctgtaggaaaggaaaggcaccaaagagcacaatgagtacaagaaagcgtcgtggtggagcaataaattctagacaagctcagaagcgaactcgggaagcaacctccacccccgagatctccttggaagcagaacccatagaactcgtggaaactgctggagatgaaattgtggacctcacttgtgaatctttagagcctgtggtggttgatctgactcacaatgactctgttgtgattgttgacgaaagaagaagaccaaggaggaatgctaggaggctgccccaggaccatgctgacagctgtgtggtgagcagtgacgatgaggagttgtccagggacagagacgtatatgtgactacccatactcccagaaacgccagggatgagggcgctacaggcctcaggccctcaggtactgtcagttgtcccatctgcatggacggatactcagagatcgtgcagaatggacgtctcatcgtttccacagaatgcggccatgtcttctgtagccagtgcctccgtgattccctgaagaatgctaatacttgcccaacttgtaggaaaaagatcaaccacaaacggtaccaccccatttatatatgaagtattcagagccccccaggagagacggatggacagacagacagccaggttctccagtggtatctgcctccattttcctgagatcaaaaagactgtttcgaaaccaacatctgatatgtaaactgctcttttgtttccaaccccttccttttgttatctccagtttgatgctatggcgctggacccagggccctcccaggccatctctgttcctctggggtggtccagttctagagtgggagaaagggagtcaggcgcattgggaatcgtggttccagtctggttgcagaatctgcacatttgccaagaaattttccctgtttggaaagtttgccccagctttcccgggcacaccaccttttgtcccaagtgtctgccggtcgaccaatctgcctgccacacattgaccaagccagacccggttcacccagctcgaggatcccaggttgaagagtggccccttgaggccctggaaagaccaatcactggacttcttcccttgagagtcagaggtcacccgtgattctgcctgcaccttatcattgatctgcagtgatttctgcaaatcaagagaaactctgcagggcactcccctgtttcctaagaacgaaaaagtgcaataaaggccattcgttacctacttttcagcagccca

SEQ ID NO: 26881 - DNA, 4123 bp, Homo sapiens
  source 1..4123: mol_type = unassigned DNA
tttttctctttcaaaaacactctgccatcttttcaaggtatccgccatctctttcaagcatgtgaggagcttgataacttttgttgggggtcggtgttcagaatgacaagggtcttgcccaggctggagtgcagtagcacagtcataactcactctagcctcaacctcccagggcacaagcgatcctcccatcttagcctcctgagtaactgggactacaggcacgtgccaccacaccctgctaatttttttttttctttggtattaatattttgtagagaaggagtttcaccatgttgcccaggctggtccagaactcctgggctcaagcaatcctgccttggcttcccaaagtgctgggattacaggcatgagccaccatgcctggccctagagcttgataatttcattcattcattcttttttttttttttttttgagacaaagtctcagtctgtcacccaggttggagtgcaatggcgcaatcttggctcactgcaacttctgcctcccgagttcaaggggttctcctgcctcagcctcctgagtggcagggattacagatgcccaccaccatgcctggctaatttttgtatttttagtagaggtggggtttcaccatgttggccaggttggtctcaaactcccaacctcaggtaatctgcccaccttggcctcccagagtgctgggattacaggtgtgagctcagaccttgataatttcagtgaggaaaaaaaaaaaatctcatttacatgtttgtgccaagtgctgtgctagtgggtggggacaccatgataagtatttgataagttatgtttcttgatttaagggagtatagaagaaatggttaagtcaggactaggaggagtgagagaaatggaagcaacctttgaggtaggccctgaagaacgagcagaaattccctaaagcggggtgggagcggcaggaccaacctggccaacttcggaccttctttgaggtccaaagtcaggtactttgaactgacttccaggatacctggagtaaagtacagttctgtttgaagtgtttgtttggaaagatgagtttgttccagtgaggttgctgtattagagaaccacttgagagtttgctgcccacagtgtcatctgtgagaaatattaggtgaacgcaaaaagttgaggccagctgaaccaagccatgtaatatacacaccttccacatagatcagtcacctcagttgacttgtatgtgagccacatttgtgtccatctgatgttacagcattcactctctttgcctccacttctcaataactcacaatctgtaaactgactgaggcccgcttccacagagcaagcttcaggcctttttcaaggacttgaaaatactggaaatctgtccggatccaaattattttgcaagccagatgagtaaccagagggcatgaaaggttgagaacatttgacttccctgcaaaccttggtatagatcacttccttttctgtaggaaaggaaaggcaccaaagagcacaatgagtacaagaaagcgtcgtggtggagcaataaattctagacaagctcagaagcgaactcgggaagcaacctccacccccgagatctccttggaagcagaacccatagaactcgtggaaactgctggagatgaaattgtggacctcacttgtgaatctttagagcctgtggtggttgatctgactcacaatgactctgttgtgattgttgacgaaagaagaagaccaaggaggaatgctaggaggctgccccaggaccatgctgacagctgtgtggtgagcagtgacgatgaggagttgtccagggacagagacgtatatgtgactacccatactcccagaaacgccagggatgagggcgctacaggcctcaggccctcaggtactgtcagttgtcccatctgcatggacggatactcagagatcgtgcagaatggacgtctcatcgtttccacagaatgcggccatgtcttctgtagccagtgcctccgtgattccctgaagaatgctaatacttgcccaacttgtaggaaaaagatcaaccacaaacggtaccaccccatttatatatgaagtattcagagccccccaggagagacggatggacagacagacagccaggttctccagtggtatctgcctccattttcctgagatcaaaaagactgtttcgaaaccaacatctgatatgtaaactgctcttttgtttccaaccccttccttttgttatctccagtttgatgctatggcgctggacccagggccctcccaggccatctctgttcctctggggtggtccagttctagagtgggagaaagggagtcaggcgcattgggaatcgtggttccagtctggttgcagaatctgcacatttgccaagaaattttccctgtttggaaagtttgccccagctttcccgggcacaccaccttttgtcccaagtgtctgccggtcgaccaatctgcctgccacacattgaccaagccagacccggttcacccagctcgaggatcccaggttgaagagtggccccttgaggccctggaaagaccaatcactggacttcttcccttgagagtcagaggtcacccgtgattctgcctgcaccttatcattgatctgcagtgatttctgcaaatcaagagaaactctgcagggcactcccctgtttcctaagaacgaaaaagtgcaataaaggccattcgttacctacttttcagcagcccacaagatgtagcactattagtgtccccctcagaggcttaatgttgcctgtggagcagtgcccatcccagcccgtttctgcccaccagttgttctcaggaaccttacccatgctccagcgtccttcacctggcacaggacatgcaagataaatagggcaggcacgtgtttgggtgtcctctcttttctgataaaatccatcccgtgtttgccacacgccctccagtcctcagttcccactgcctaacgtctgcccccgtgtagatactgagaggtggtggcagtaattgtggccttatcagccgctcagttccaggcttttgcccaggtcactgttgccccatgttcggagaacctggcccacctgtcttggctttctcatccttcccaacccagtgccgtttatttcagaagcttcctggccactgggcttggatgcttcgggcttctgactgctccataggttttgactggtgaaacaggggcccagatgacaacctctccttcgctccacaggtacgcgggagcctcaggttctctcaggggcagcaaagtggcccaagctgcccctgacagcacagggcctggggggtggctaacgagagaggccttacagtgccggcatgcctcctcttccactgtcgtccttcctcagagggcctcacgccaaacaaacggccttttcgtgtgaaacatcttcagggcgggaaaggggccacttctggctttgttagcaataactgaccttcagtttacccttctgaaggagcagggactcagcacagaattcactttagacggggctgaaggagtgtccctcctctatgtgaaaagaaaattgttttattcttcattctgactttttaactgtttggctcacttccagttagtttgaatgaaaataataattttctacttggagttgaagagggcagaatccgcagctctcatcattgtgatgtgtagcatgtctgccctctgactggacatcattgccattaactttcttctgggcatcacggcaatgtcacgatgcccagacttggagcaaggcaaccttggagtcagtccactcataaaatatggtaacacccattttaaaatttaagttttgtccttaaagacaacttcagtggttaattataaaagttgtgttacttcgtcctaaattaaattgatagaaagatttaaaaatgtgttttgtttctactattcagaaactgcgaactagggaaaggttggtatgaagaaatgtctttccttttttcaatgtacatagttcaactctttctttgttacatttaaactatatccatggatatcagtctgctttggactcctctgctagtgttacagatggaaataaaaccattaatttgaacc

SEQ ID NO: 26882 - DNA, 416 bp, Homo sapiens
  source 1..416: mol_type = unassigned DNA
gcttctgcttggctgcctagtccacagcctcccgattcaccattcacctggtcccagcaacagaagtctcagctggacacacaacatgctttagagacttgaaaatactggaaatctgtccggatccaaattattttgcaagccagatgagtaaccagagggcatgaaaggttgagaacatttgacttccctgcaaaccttggtatagatcacttccttttctgtaggaaaggaaaggcaccaaagagcacaatgagtacaagaaagcgtcgtggtggagcaataaattctagacaagctcagaagcgaactcgggaagcaacctccacccccgagatctccttggaagcagaacccatagaactcgtggaaactgctggagatgaaattgtggacctcacttgtgaatctttaga

SEQ ID NO: 26883 - DNA, 2799 bp, Homo sapiens
  source 1..2799: mol_type = unassigned DNA
aatggggacatgatggggggcggagccgaggcctccgaagcggaagtgggttgctgttgaggcggcggcatctttctcgaggagctctcctgggcggctgaagaaggagcttcttctccggagtgcgccggcggtggcgcctgcggacctaactagctccaggttaggccgagctttgcgggaaagcagcggacttgaaaatactggaaatctgtccggatccaaattattttgcaagccagatgagtaaccagagggcatgaaaggttgagaacatttgacttccctgcaaaccttggtatagatcacttccttttctgtaggaaaggaaaggcaccaaagagcacaatgagtacaagaaagcgtcgtggtggagcaataaattctagacaagctcagaagcgaactcgggaagcaacctccacccccgagatctccttggaagcagaacccatagaactcgtggaaactgctggagatgaaattgtggacctcacttgtgaatctttagagcctgtggtggttgatctgactcacaatgactctgttgtggtaagtgttggagtccctcaggtactgtcagttgtcccatctgcatggacggatactcagagatcgtgcagaatggacgtctcatcgtttccacagaatgcggccatgtcttctgtagccagtgcctccgtgattccctgaagaatgctaatacttgcccaacttgtaggaaaaagatcaaccacaaacggtaccaccccatttatatatgaagtattcagagccccccaggagagacggatggacagacagacagccaggttctccagtggtatctgcctccattttcctgagatcaaaaagactgtttcgaaaccaacatctgatatgtaaactgctcttttgtttccaaccccttccttttgttatctccagtttgatgctatggcgctggacccagggccctcccaggccatctctgttcctctggggtggtccagttctagagtgggagaaagggagtcaggcgcattgggaatcgtggttccagtctggttgcagaatctgcacatttgccaagaaattttccctgtttggaaagtttgccccagctttcccgggcacaccaccttttgtcccaagtgtctgccggtcgaccaatctgcctgccacacattgaccaagccagacccggttcacccagctcgaggatcccaggttgaagagtggccccttgaggccctggaaagaccaatcactggacttcttcccttgagagtcagaggtcacccgtgattctgcctgcaccttatcattgatctgcagtgatttctgcaaatcaagagaaactctgcagggcactcccctgtttcctaagaacgaaaaagtgcaataaaggccattcgttacctacttttcagcagcccacaagatgtagcactattagtgtccccctcagaggcttaatgttgcctgtggagcagtgcccatcccagcccgtttctgcccaccagttgttctcaggaaccttacccatgctccagcgtccttcacctggcacaggacatgcaagataaatagggcaggcacgtgtttgggtgtcctctcttttctgataaaatccatcccgtgtttgccacacgccctccagtcctcagttcccactgcctaacgtctgcccccgtgtagatactgagaggtggtggcagtaattgtggccttatcagccgctcagttccaggcttttgcccaggtcactgttgccccatgttcggagaacctggcccacctgtcttggctttctcatccttcccaacccagtgccgtttatttcagaagcttcctggccactgggcttggatgcttcgggcttctgactgctccataggttttgactggtgaaacaggggcccagatgacaacctctccttcgctccacaggtacgcgggagcctcaggttctctcaggggcagcaaagtggcccaagctgcccctgacagcacagggcctggggggtggctaacgagagaggccttacagtgccggcatgcctcctcttccactgtcgtccttcctcagagggcctcacgccaaacaaacggccttttcgtgtgaaacatcttcagggcgggaaaggggccacttctggctttgttagcaataactgaccttcagtttacccttctgaaggagcagggactcagcacagaattcactttagacggggctgaaggagtgtccctcctctatgtgaaaagaaaattgttttattcttcattctgactttttaactgtttggctcacttccagttagtttgaatgaaaataataattttctacttggagttgaagagggcagaatccgcagctctcatcattgtgatgtgtagcatgtctgccctctgactggacatcattgccattaactttcttctgggcatcacggcaatgtcacgatgcccagacttggagcaaggcaaccttggagtcagtccactcataaaatatggtaacacccattttaaaatttaagttttgtccttaaagacaacttcagtggttaattataaaagttgtgttacttcgtcctaaattaaattgatagaaagatttaaaaatgtgttttgtttctactattcagaaactgcgaactagggaaaggttggtatgaagaaatgtctttccttttttcaatgtacatagttcaactctttctttgttacatttaaactatatccatggatatcagtctgctttggactcctctgctagtgttacagatggaaataaaaccattaatttgaacc

SEQ ID NO: 26884 - DNA, 2947 bp, Homo sapiens
  source 1..2947: mol_type = unassigned DNA
atggggggcggagccgaggcctccgaagcggaagtgggttgctgttgaggcggcggcatctttctcgaggagctctcctgggcggctgaagaaggagcttcttctccggagtgcgccggcggtggcgcctgcggacctaactagctccaggttaggccgagctttgcgggaaagcagcggacttgaaaatactggaaatctgtccggatccaaattattttgcaagccagatgagtaaccagagggcatgaaaggttgagaacatttgacttccctgcaaaccttggtatagatcacttccttttctgtaggaaaggaaaggcaccaaagagcacaatgagtacaagaaagcgtcgtggtggagcaataaattctagacaagctcagaagcgaactcgggaagcaacctccacccccgagatctccttggaagcagaacccatagaactcgtggaaactgctggagatgaaattgtggacctcacttgtgaatctttagagcctgtggtggttgatctgactcacaatgactctgttgtggtaagtgatgaaagaagaagaccaaggaggaatgctaggaggctgccccaggaccatgctgacagctgtgtggtgagcagtgacgatgaggagttgtccagggacagagacgtatatgtgactacccatactcccagaaacgccagggatgagggcgctacaggcctcaggccctcaggtactgtcagttgtcccatctgcatggacggatactcagagatcgtgcagaatggacgtctcatcgtttccacagaatgcggccatgtcttctgtagccagtgcctccgtgattccctgaagaatgctaatacttgcccaacttgtaggaaaaagatcaaccacaaacggtaccaccccatttatatatgaagtattcagagccccccaggagagacggatggacagacagacagccaggttctccagtggtatctgcctccattttcctgagatcaaaaagactgtttcgaaaccaacatctgatatgtaaactgctcttttgtttccaaccccttccttttgttatctccagtttgatgctatggcgctggacccagggccctcccaggccatctctgttcctctggggtggtccagttctagagtgggagaaagggagtcaggcgcattgggaatcgtggttccagtctggttgcagaatctgcacatttgccaagaaattttccctgtttggaaagtttgccccagctttcccgggcacaccaccttttgtcccaagtgtctgccggtcgaccaatctgcctgccacacattgaccaagccagacccggttcacccagctcgaggatcccaggttgaagagtggccccttgaggccctggaaagaccaatcactggacttcttcccttgagagtcagaggtcacccgtgattctgcctgcaccttatcattgatctgcagtgatttctgcaaatcaagagaaactctgcagggcactcccctgtttcctaagaacgaaaaagtgcaataaaggccattcgttacctacttttcagcagcccacaagatgtagcactattagtgtccccctcagaggcttaatgttgcctgtggagcagtgcccatcccagcccgtttctgcccaccagttgttctcaggaaccttacccatgctccagcgtccttcacctggcacaggacatgcaagataaatagggcaggcacgtgtttgggtgtcctctcttttctgataaaatccatcccgtgtttgccacacgccctccagtcctcagttcccactgcctaacgtctgcccccgtgtagatactgagaggtggtggcagtaattgtggccttatcagccgctcagttccaggcttttgcccaggtcactgttgccccatgttcggagaacctggcccacctgtcttggctttctcatccttcccaacccagtgccgtttatttcagaagcttcctggccactgggcttggatgcttcgggcttctgactgctccataggttttgactggtgaaacaggggcccagatgacaacctctccttcgctccacaggtacgcgggagcctcaggttctctcaggggcagcaaagtggcccaagctgcccctgacagcacagggcctggggggtggctaacgagagaggccttacagtgccggcatgcctcctcttccactgtcgtccttcctcagagggcctcacgccaaacaaacggccttttcgtgtgaaacatcttcagggcgggaaaggggccacttctggctttgttagcaataactgaccttcagtttacccttctgaaggagcagggactcagcacagaattcactttagacggggctgaaggagtgtccctcctctatgtgaaaagaaaattgttttattcttcattctgactttttaactgtttggctcacttccagttagtttgaatgaaaataataattttctacttggagttgaagagggcagaatccgcagctctcatcattgtgatgtgtagcatgtctgccctctgactggacatcattgccattaactttcttctgggcatcacggcaatgtcacgatgcccagacttggagcaaggcaaccttggagtcagtccactcataaaatatggtaacacccattttaaaatttaagttttgtccttaaagacaacttcagtggttaattataaaagttgtgttacttcgtcctaaattaaattgatagaaagatttaaaaatgtgttttgtttctactattcagaaactgcgaactagggaaaggttggtatgaagaaatgtctttccttttttcaatgtacatagttcaactctttctttgttacatttaaactatatccatggatatcagtctgctttggactcctctgctagtgttacagatggaaataaaaccattaatttgaaccaaa

SEQ ID NO: 26885 - DNA, 1373 bp, Homo sapiens
  source 1..1373: mol_type = unassigned DNA
tttctcgaggagctctcctgggcggctgaagaaggagcttcttctccggagtgcgccggcggtggcgcctgcggacctaactagctccaggttaggccgagctttgcgggaaagcagcggacttgaaaatactggaaatctgtccggatccaaattattttgcaagccagatgagtaaccagagggcatgaaaggttgagaacatttgacttccctgcaaaccttggtatagatcacttccttttctgtaggaaaggaaaggcaccaaagagcacaatgagtacaagaaagcgtcgtggtggagcaataaattctagacaagctcagaagcgaactcgggaagcaacctccacccccgagatctccttggaagcagaacccatagaactcgtggaaactgctggagatgaaattgtggacctcacttgtgaatctttagagcctgtggtggttgatctgactcacaatgactctgttgtgattgttgacggccctcaggtactgtcagttgtcccatctgcatggacggatactcagagatcgtgcagaatggacgtctcatcgtttccacagaatgcggccatgtcttctgtagccagtgcctccgtgattccctgaagaatgctaatacttgcccaacttgtaggaaaaagatcaaccacaaacggtaccaccccatttatatatgaagtattcagagccccccaggagagacggatggacagacagacagccaggttctccagtggtatctgcctccattttcctgagatcaaaaagactgtttcgaaaccaacatctgatatgtaaactgctcttttgtttccaaccccttccttttgttatctccagtttgatgctatggcgctggacccagggccctcccaggccatctctgttcctctggggtggtccagttctagagtgggagaaagggagtcaggcgcattgggaatcgtggttccagtctggttgcagaatctgcacatttgccaagaaattttccctgtttggaaagtttgccccagctttcccgggcacaccaccttttgtcccaagtgtctgccggtcgaccaatctgcctgccacacattgaccaagccagacccggttcacccagctcgaggatcccaggttgaagagtggccccttgaggccctggaaagaccaatcactggacttcttcccttgagagtcagaggtcacccgtgattctgcctgcaccttatcattgatctgcagtgatttctgcaaatcaagagaaactctgcagggcactcccctgtttcctaagaacgaaaaagtgcaataaaggccattcgttacctacttttcagcagcccacaagatgtagcactattagtgtccccctc

SEQ ID NO: 26886 - DNA, 5283 bp, Homo sapiens
  source 1..5283: mol_type = unassigned DNA
gtacttggttaagcagttgaaaccttttttgagcaggatctgtaaaagcataattgaatttgtttcacccccgtggattccagtgggcccgacagcgcaacagtgcctggcaacttgatgcatatggaagagcaatgccaagtgatctgacataatacaaattcacgaagtgacattcaatcacaagcaaagttggaaattccaaagagaagtggtgagatctttactagtcacagtgaagatgggagaaaatgacatacctgcagcagatgtgggctgaaaatatcctcttctctgcccaatcaggaatgctacctgtttttgggaataaactttagagaaaggaagggccaaaactacgacttggctttctgaaacggaagcataaatgttcttttcctccatttgtctggatctgagaacctgcatttggtattagctagtggaagcagtatgtatggttgaagtgcattgctgcagctggtagcatgagtggtggccaccagctgcagctggctgccctctggccctggctgctgatggctaccctgcaggcaggctttggacgcacaggactggtactggcagcagcggtggagtctgaaagatcagcagaacagaaagctattatcagagtgatccccttgaaaatggaccccacaggaaaactgaatctcactttggaaggtgtgtttgctggtgttgctgaaataactccagcagaaggaaaattaatgcagtcccacccgctgtacctgtgcaatgccagtgatgacgacaatctggagcctggattcatcagcatcgtcaagctggagagtcctcgacgggccccccgcccctgcctgtcactggctagcaaggctcggatggcgggtgagcgaggagccagtgctgtcctctttgacatcactgaggatcgagctgctgctgagcagctgcagcagccgctggggctgacctggccagtggtgttgatctggggtaatgacgctgagaagctgatggagtttgtgtacaagaaccaaaaggcccatgtgaggattgagctgaaggagcccccggcctggccagattatgatgtgtggatcctaatgacagtggtgggcaccatctttgtgatcatcctggcttcggtgctgcgcatccggtgccgcccccgccacagcaggccggatccgcttcagcagagaacagcctgggccatcagccagctggccaccaggaggtaccaggccagctgcaggcaggcccggggtgagtggccagactcagggagcagctgcagctcagcccctgtgtgtgccatctgtctggaggagttctctgaggggcaggagctacgggtcatttcctgcctccatgagttccatcgtaactgtgtggacccctggttacatcagcatcggacttgccccctctgcatgttcaacatcacagagggagattcattttcccagtccctgggaccctctcgatcttaccaagaaccaggtcgaagactccacctcattcgccagcatcccggccatgcccactaccacctccctgctgcctacctgttgggcccttcccggagtgcagtggctcggcccccacgacctggtcccttcctgccatcccaggagccaggcatgggccctcggcatcaccgcttccccagagctgcacatccccgggctccaggagagcagcagcgcctggcaggagcccagcacccctatgcacaaggctggggactgagccacctccaatccacctcacagcaccctgctgcttgcccagtgcccctacgccgggccaggccccctgacagcagtggatctggagaaagctattgcacagaacgcagtgggtacctggcagatgggccagccagtgactccagctcagggccctgtcatggctcttccagtgactctgtggtcaactgcacggacatcagcctacagggggtccatggcagcagttctactttctgcagctccctaagcagtgactttgaccccctagtgtactgcagccctaaaggggatccccagcgagtggacatgcagcctagtgtgacctctcggcctcgttccttggactcggtggtgcccacaggggaaacccaggtttccagccatgtccactaccaccgccaccggcaccaccactacaaaaagcggttccagtggcatggcaggaagcctggcccagaaaccggagtcccccagtccaggcctcctattcctcggacacagccccagccagagccaccttctcctgatcagcaagtcaccagatccaactcagcagccccttcggggcggctctctaacccacagtgccccagggccctccctgagccagcccctggcccagttgacgcctccagcatctgccccagtaccagcagtctgttcaacttgcaaaaatccagcctctctgcccgacacccacagaggaaaaggcgggggggtccctccgagcccacccctggctctcggccccaggatgcaactgtgcacccagcttgccagatttttccccattacacccccagtgtggcatatccttggtccccagaggcacaccccttgatctgtggacctccaggcctggacaagaggctgctaccagaaaccccaggcccctgttactcaaattcacagccagtgtggttgtgcctgactcctcgccagcccctggaaccacatccacctggggaggggccttctgaatggagttctgacaccgcagagggcaggccatgcccttatccgcactgccaggtgctgtcggcccagcctggctcagaggaggaactcgaggagctgtgtgaacaggctgtgtgagatgttcaggcctagctccaaccaagagtgtgctccagatgtgtttgggccctacctggcacagagtcctgctcctgggaaaggaaaggaccacagcaaacaccattctttttgccgtacttcctagaagcactggaagaggactggtgatggtggagggtgagagggtgccgtttcctgctccagctccagaccttgtctgcagaaaacatctgcagtgcagcaaatccatgtccagccaggcaaccagctgctgcctgtggcgtgtgtgggctggatcccttgaaggctgagtttttgagggcagaaagctagctatgggtagccaggtgttacaaaggtgctgctccttctccaacccctacttggtttccctcaccccaagcctcatgttcataccagccagtgggttcagcagaacgcatgacaccttatcacctccctccttgggtgagctctgaacaccagctttggcccctccacagtaaggctgctacatcaggggcaaccctggctctatcattttccttttttgccaaaaggaccagtagcataggtgagccctgagcactaaaaggaggggtccctgaagctttcccactatagtgtggagttctgtccctgaggtgggtacagcagccttggttcctctgggggttgagaataagaatagtggggagggaaaaactcctccttgaagatttcctgtctcagagtcccagagaggtagaaaggaggaatttctgctggactttatctgggcagaggaaggatggaatgaaggtagaaaaggcagaattacagctgagcggggacaacaaagagttcttctctgggaaaagttttgtcttagagcaaggatggaaaatggggacaacaaaggaaaagcaaagtgtgacccttgggtttggacagcccagaggcccagctccccagtataagccatacaggccagggacccacaggagagtggattagagcacaagtctggcctcactgagtggacaagagctgatgggcctcatcagggtgacattcaccccagggcagcctgaccactcttggcccctcaggcattatcccatttggaatgtgaatgtggtggcaaagtgggcagaggaccccacctgggaacctttttccctcagttagtggggagactagcacctaggtacccacatgggtatttatatctgaaccagacagacgcttgaatcaggcactatgttaagaaatatatttatttgctaatatatttatccacaaatgtggtctggtcttgtggttttgttctgtcgtgactgtcactcagggtaacaacgtcatctctttctacatcaagagaagtaaattatttatgttatcagaggctaggctccgattcatgaaaggatagggtagagtagagggcttggcaataagaactggtttgtaagcccctaaaagtgtggcttagtgagatcagggaaggagaaagcatgactggattcttactgtgcttcagtcattattattatactgttcacttcacacattatcatacttcagtgactcagaccttgggcaaatactctgtgcctcgctttttcagtccataaaatgggcctacttaatagttgttgcaggacttacatgagataatagagtgtagaaaatatgttccaaagtggaaagttttattcagtgatagaaaacatccaaacctgtcacagagcccatctgaacacagcatgggaccgccaacaagaagaaagcccgcccggaagcagctcaatcaggaggctgggctggaatgacagcgcagcggggcctgaaactatttatatcccaaagctcctctcagataaacacaaatgactgcgttctgcctgcactcgggctattgcgaggacagagagctggtgctccattggcgtgaagtctccagggccagaaggggcctttgtcgcttcctcacaaggcacaagttccccttctgcttccccgagaaaggtttggtaggggtggtggtttagtgcctatagaacaaggcatttcgcttcctagacggtgaaatgaaagggaaaaaaaggacacctaatctcctacaaatggtctttagtaaaggaaccgtgtctaagcgctaagaactgcgcaaagtataaattatcagccggaacgagcaaacagacggagttttaaaagataaatacgcatttttttccgccgtagctcccaggccagcattcctgtgggaagcaagtggaaaccctatagcgctctcgcagttaggaaggaggggtggggctgtccctggatttcttctcggtctctgcagagacaatccagagggagacagtggattcactgcccccaatgcttctaaaacggggagacaaaacaaaaaaaaacaaacttcgggttaccatcggggaacaggaccgacgcccagggccaccagccc

SEQ ID NO: 26887 - DNA, 5160 bp, Homo sapiens
  source 1..5160: mol_type = unassigned DNA
gtacttggttaagcagttgaaaccttttttgagcaggatctgtaaaagcataattgaatttgtttcacccccgtggattccagtgggcccgacagcgcaacagtgcctggcaacttgatgcatatggaagagcaatgccaagtgatctgacataatacaaattcacgaagtgacattcaatcacaagcaaagttggaaattccaaagagaagtggtgagatctttactagtcacagtgaagatgggagaaaatgacatacctgcagcagatgtgggctgaaaatatcctcttctctgcccaatcaggaatgctacctgtttttgggaataaactttagagaaaggaagggccaaaactacgacttggctttctgaaacggaagcataaatgttcttttcctccatttgtctggatctgagaacctgcatttggtattagctagtggaagcagtatgtatggttgaagtgcattgctgcagctggtagcatgagtggtggccaccagctgcagctggctgccctctggccctggctgctgatggctaccctgcaggcaggctttggacgcacaggactggtactggcagcagcggtggagtctgaaagatcagcagaacagaaagctattatcagagtgatccccttgaaaatggaccccacaggaaaactgaatctcactttggaaggtgtgtttgctggtgttgctgaaataactccagcagaaggaaaattaatgcaggctcggatggcgggtgagcgaggagccagtgctgtcctctttgacatcactgaggatcgagctgctgctgagcagctgcagcagccgctggggctgacctggccagtggtgttgatctggggtaatgacgctgagaagctgatggagtttgtgtacaagaaccaaaaggcccatgtgaggattgagctgaaggagcccccggcctggccagattatgatgtgtggatcctaatgacagtggtgggcaccatctttgtgatcatcctggcttcggtgctgcgcatccggtgccgcccccgccacagcaggccggatccgcttcagcagagaacagcctgggccatcagccagctggccaccaggaggtaccaggccagctgcaggcaggcccggggtgagtggccagactcagggagcagctgcagctcagcccctgtgtgtgccatctgtctggaggagttctctgaggggcaggagctacgggtcatttcctgcctccatgagttccatcgtaactgtgtggacccctggttacatcagcatcggacttgccccctctgcatgttcaacatcacagagggagattcattttcccagtccctgggaccctctcgatcttaccaagaaccaggtcgaagactccacctcattcgccagcatcccggccatgcccactaccacctccctgctgcctacctgttgggcccttcccggagtgcagtggctcggcccccacgacctggtcccttcctgccatcccaggagccaggcatgggccctcggcatcaccgcttccccagagctgcacatccccgggctccaggagagcagcagcgcctggcaggagcccagcacccctatgcacaaggctggggactgagccacctccaatccacctcacagcaccctgctgcttgcccagtgcccctacgccgggccaggccccctgacagcagtggatctggagaaagctattgcacagaacgcagtgggtacctggcagatgggccagccagtgactccagctcagggccctgtcatggctcttccagtgactctgtggtcaactgcacggacatcagcctacagggggtccatggcagcagttctactttctgcagctccctaagcagtgactttgaccccctagtgtactgcagccctaaaggggatccccagcgagtggacatgcagcctagtgtgacctctcggcctcgttccttggactcggtggtgcccacaggggaaacccaggtttccagccatgtccactaccaccgccaccggcaccaccactacaaaaagcggttccagtggcatggcaggaagcctggcccagaaaccggagtcccccagtccaggcctcctattcctcggacacagccccagccagagccaccttctcctgatcagcaagtcaccagatccaactcagcagccccttcggggcggctctctaacccacagtgccccagggccctccctgagccagcccctggcccagttgacgcctccagcatctgccccagtaccagcagtctgttcaacttgcaaaaatccagcctctctgcccgacacccacagaggaaaaggcgggggggtccctccgagcccacccctggctctcggccccaggatgcaactgtgcacccagcttgccagatttttccccattacacccccagtgtggcatatccttggtccccagaggcacaccccttgatctgtggacctccaggcctggacaagaggctgctaccagaaaccccaggcccctgttactcaaattcacagccagtgtggttgtgcctgactcctcgccagcccctggaaccacatccacctggggaggggccttctgaatggagttctgacaccgcagagggcaggccatgcccttatccgcactgccaggtgctgtcggcccagcctggctcagaggaggaactcgaggagctgtgtgaacaggctgtgtgagatgttcaggcctagctccaaccaagagtgtgctccagatgtgtttgggccctacctggcacagagtcctgctcctgggaaaggaaaggaccacagcaaacaccattctttttgccgtacttcctagaagcactggaagaggactggtgatggtggagggtgagagggtgccgtttcctgctccagctccagaccttgtctgcagaaaacatctgcagtgcagcaaatccatgtccagccaggcaaccagctgctgcctgtggcgtgtgtgggctggatcccttgaaggctgagtttttgagggcagaaagctagctatgggtagccaggtgttacaaaggtgctgctccttctccaacccctacttggtttccctcaccccaagcctcatgttcataccagccagtgggttcagcagaacgcatgacaccttatcacctccctccttgggtgagctctgaacaccagctttggcccctccacagtaaggctgctacatcaggggcaaccctggctctatcattttccttttttgccaaaaggaccagtagcataggtgagccctgagcactaaaaggaggggtccctgaagctttcccactatagtgtggagttctgtccctgaggtgggtacagcagccttggttcctctgggggttgagaataagaatagtggggagggaaaaactcctccttgaagatttcctgtctcagagtcccagagaggtagaaaggaggaatttctgctggactttatctgggcagaggaaggatggaatgaaggtagaaaaggcagaattacagctgagcggggacaacaaagagttcttctctgggaaaagttttgtcttagagcaaggatggaaaatggggacaacaaaggaaaagcaaagtgtgacccttgggtttggacagcccagaggcccagctccccagtataagccatacaggccagggacccacaggagagtggattagagcacaagtctggcctcactgagtggacaagagctgatgggcctcatcagggtgacattcaccccagggcagcctgaccactcttggcccctcaggcattatcccatttggaatgtgaatgtggtggcaaagtgggcagaggaccccacctgggaacctttttccctcagttagtggggagactagcacctaggtacccacatgggtatttatatctgaaccagacagacgcttgaatcaggcactatgttaagaaatatatttatttgctaatatatttatccacaaatgtggtctggtcttgtggttttgttctgtcgtgactgtcactcagggtaacaacgtcatctctttctacatcaagagaagtaaattatttatgttatcagaggctaggctccgattcatgaaaggatagggtagagtagagggcttggcaataagaactggtttgtaagcccctaaaagtgtggcttagtgagatcagggaaggagaaagcatgactggattcttactgtgcttcagtcattattattatactgttcacttcacacattatcatacttcagtgactcagaccttgggcaaatactctgtgcctcgctttttcagtccataaaatgggcctacttaatagttgttgcaggacttacatgagataatagagtgtagaaaatatgttccaaagtggaaagttttattcagtgatagaaaacatccaaacctgtcacagagcccatctgaacacagcatgggaccgccaacaagaagaaagcccgcccggaagcagctcaatcaggaggctgggctggaatgacagcgcagcggggcctgaaactatttatatcccaaagctcctctcagataaacacaaatgactgcgttctgcctgcactcgggctattgcgaggacagagagctggtgctccattggcgtgaagtctccagggccagaaggggcctttgtcgcttcctcacaaggcacaagttccccttctgcttccccgagaaaggtttggtaggggtggtggtttagtgcctatagaacaaggcatttcgcttcctagacggtgaaatgaaagggaaaaaaaggacacctaatctcctacaaatggtctttagtaaaggaaccgtgtctaagcgctaagaactgcgcaaagtataaattatcagccggaacgagcaaacagacggagttttaaaagataaatacgcatttttttccgccgtagctcccaggccagcattcctgtgggaagcaagtggaaaccctatagcgctctcgcagttaggaaggaggggtggggctgtccctggatttcttctcggtctctgcagagacaatccagagggagacagtggattcactgcccccaatgcttctaaaacggggagacaaaacaaaaaaaaacaaacttcgggttaccatcggggaacaggaccgacgcccagggccaccagccc

SEQ ID NO: 26888 - DNA, 1168 bp, Homo sapiens
  source 1..1168: mol_type = unassigned DNA
gaattctttgtgactggcaggcattcagaccaatagtgattaggaaaccttgaagcctgcccaacgatcgtgggcaggaggtggtttctggtttgttggggcgtgtgtatgtgtatttggggggactgaagggtacgtggggcgaaacaaaaccggccatggcagcagcggaggaggaggacgggggccccgaagggccaaatcgcgagcggggcggggcgggcgcgaccttcgaatgtaatatatgtttggagactgctcgggaagctgtggtcagtgtgtgtggccacctgtactgttggccatgtcttcatcagtggctggagacacggccagaacggcaagagtgtccagtatgtaaagctgggatcagcagagagaaggttgtcccgctttatgggcgagggagccagaagccccaggatcccagattaaaaactccaccccgcccccagggccagagaccagctccggagagcagagggggattccagccatttggtgataccgggggcttccacttctcatttggtgttggtgcttttccctttggctttttcaccaccgtcttcaatgcccatgagcctttccgccggggtacaggtgtggatctgggacagggtcacccagcctccagctggcaggattccctcttcctgtttctcgccatcttcttctttttttggctgctcagtatttgagctatgtctgcttcctgcccacctccagccagagaagaatcagtattgagggtccctgctgacccttccgtactcctggacccccttgacccctctatttctgttggctaaggccagccctggacattgtccaggaaggcctggggaggaggagtgaagtctgtgcatagatgggagagccttctgctcagaggctcactcagtaacgttgtttaattctctgccctggggaaggaggatggattgagagaatgtctttctcctctcctaagtctttgctttccctgatttcttgatttgatcttcaaaggtgggcaaagttccctctgactcttcccccactccccatcttactgatttaatttaatttttcactccccagagtctaatatggattctgactcttaagtgcttccgccccctcactacctcctttaatacaaattcaataaaaaaggtgaaatata

SEQ ID NO: 26889 - DNA, 1168 bp, Homo sapiens; identical to SEQ ID NO: 26888
  source 1..1168: mol_type = unassigned DNA

SEQ ID NO: 26890 - DNA, 1325 bp, Homo sapiens
  source 1..1325: mol_type = unassigned DNA
gaaacaaaaccggccatggcagcagcggaggaggaggacgggggccccgaagggccaaatcgcgagcggggcggggcgggcgcgaccttcgaatgtaatatatgtttggagactgctcgggaagctgtggtcagtgtgtgtggccacctgtactgttggccatgtcttcatcagtggctggagacacggccagaacggcaagagtgtccagtatgtaaagctgggatcagcagagagaaggttgtcccgctttatgggcgagggagccagaagccccaggatcccagattaaaaactccaccccgcccccagggccagagaccagctccggagagcagagggggattccagccatttggtgataccgggggcttccacttctcatttggtgttggtgcttttccctttggctttttcaccaccgtcttcaatgcccatgagcctttccgccggggtacagggccgttttctacttctcctgctttcttccactaccttattgggaacaccagccgtgagttcagaggcagaatctacaatttctggcttcccaggaatctctgaaggaggaaaaatccagtcagaggctgtaattgtgaaggttctcaaactctgtgtgtggaaatgaggccagtggaagtcagaggccctcatgggccaaggctggggttgaaggctttttcttaggtaagagggaggccttggagaagaccctggaattcttacggtagacacggactcggtagttggacttggtctcctttccattcctgttcattgcctggcaccggaaaatcccctcatcctggatcccgacagccggaaggaagagggagccgttgggaaggacacgagccacactgtcccaggggcctcctccctggggagacaggaccttccaagcttctgtccggcctgtgttctagaagcagagaagcagggcctaaacagtgcaaggcctttgggaaaggactgtgaggcagagtgacggggatccaaatcattgctggtctccctggaagttgggaggctgcaacaggagccccgcttaccagtttccattccagccgctggggtggtttcttgggggcccccttacacttcagcaccagtggctcgccaatccgggctgtgatgttttgagcacctactactgcccctgggagatagcaccatggtagaggggtaggaagggaatgagggctaacaaaatttggacagggtgggtgagggaccttgaaaggcacttcctcgggttctgggaaaagttctaggacgactggggtgtggggttaaagtgctttctgcagggagggtcagtgggg

SEQ ID NO: 26891 - DNA, 1168 bp, Homo sapiens; identical to SEQ ID NO: 26888
  source 1..1168: mol_type = unassigned DNA

SEQ ID NO: 26892 - DNA, 1168 bp, Homo sapiens; identical to SEQ ID NO: 26888
  source 1..1168: mol_type = unassigned DNA

SEQ ID NO: 26893 - DNA, 1168 bp, Homo sapiens; identical to SEQ ID NO: 26888
  source 1..1168: mol_type = unassigned DNA

SEQ ID NO: 26894 - DNA, 1168 bp, Homo sapiens; identical to SEQ ID NO: 26888
  source 1..1168: mol_type = unassigned DNA

SEQ ID NO: 26895 - DNA, 1162 bp, Homo sapiens
  source 1..1162: mol_type = unassigned DNA
tttgtgactggcaggcattcagaccaatagtgattaggaaaccttgaagcctgcccaacgatcgtgggcaggaggtggtttctggtttgttggggcgtgtgtatgtgtatttggggggactgaagggtacgtggggcgaaacaaaaccggccatggcagcagcggaggaggaggacgggggccccgaagggccaaatcgcgagcggggcggggcgggcgcgaccttcgaatgtaatatatgtttggagactgctcgggaagctgtggtcagtgtgtgtggccacctgtactgttggccatgtcttcatcagtggctggagacacggccagaacggcaagagtgtccagtatgtaaagctgggatcagcagagagaaggttgtcccgctttatgggcgagggagccagaagccccaggatcccagattaaaaactccaccccgcccccagggccagagaccagctccagagagcagagggggattccagccatttggtgataccgggggcttccacttctcatttggtgttggtgcttttccctttggctttttcaccaccgtcttcaatgcccatgagcctttccgccggggtacaggtgtggatctgggacagggtcacccggcctccagctggcaggattccctcttcctgtttctcgccatcttcttctttttttggctgctcagtatttgagctatgtctgcttcctgcccacctccagccagagaagaatcagtattgagggtccctgctgacccttccgtactcctggacccccttgacccctctatttctgttggctaaggccagccctggacattgtccaggaaggcctggggaggaggagtgaagtctgtgcatagatgggagagccttctgctcagaggctcactcagtaacgttgtttaattctctgccctggggaaggaggatggattgagagaatgtctttctcctctcctaagtctttgctttccctgatttcttgatttcatcttcaaaggtgggcaaagttccctctgactcttcccccactccccatcttactgatttaatttaatttttcactccccagagtctaatatggattctgactcttaagtgcttccgccccctcactacctcctttaatacaaattcaataaaaaaggtgaaatata

SEQ ID NO: 26896 - DNA, 1325 bp, Homo sapiens; identical to SEQ ID NO: 26890
  source 1..1325: mol_type = unassigned DNA

SEQ ID NO: 26897 - DNA, 1325 bp, Homo sapiens
  source 1..1325: mol_type = unassigned DNA
gaaacaaaaccggccatggcagcagcggaggaggaggacgggggccccgaagggccaaatcgcgagcggggcggggcgggcgcgaccttcgaatgtaatatatgtttggagactgctcgggaagctgtggtcagtgtgtgtggccacctgtactgttggccatgtcttcatcagtggctggagacacggccagaacggcaagagtgtccagtatgtaaagctgggatcagcagagagaaggttgtcccgctttatgggcgagggagccagaagccccaggatcccagattaaaaactccaccccgcccccagggccagagaccagctccggagagcagagggggattccagccatttggtgataccgggggcttccacttctcatttggtgttggtgcttttccctttggctttttcaccaccgtcttcaatgcccatgagcctttccgccggggtacagggccgttttctacttctcctgctttcttccactaccttattgggaacaccagccgtgagttcagaggcagaatctacaatttctggcttcccaggaatctctgaaggaggaaaaatccagtcagaggctgtaattgtgaaggttctcaaactctgtgtgtggaaatgaggccagtggaagtcagaggccctcatgggccaaggctggggttgaaggctttttcttaggtaagagggaggccttggagaagaccctggaattcttacggtagacacggactcggtagttggacttggtctcctttccattcctgttcattgcctggcaccggaaaatcccctcatcctggatcccgacagccggaaggaagagggagctgttgggaaggacacgagccacactgtcccaggggcctcctccctggggagacaggaccttccaagcttctgtccggcctgtgttctagaagcagagaagcagggcctaaacagtgcaaggcctttgggaaaggactgtgaggcagagtgacggggatccaaatcattgctggtctccctggaagttgggaggctgcaacaggagccccgcttaccagtttccattccagccgctggggtggtttcttgggggcccccttacacttcagcaccagtggctcgccaatccgggctgtgatgttttgagcacctactactgcccctgggagatagcaccatggtagaggggtaggaagggaatgagggctaacaaaatttggacagggtgggtgagggaccttgaaaggcacttcctcgggttctgggaaaagttctaggacgactggggtgtggggttaaagtgctttctgcagggagggtcagtgggg

SEQ ID NO: 26898 - DNA, 1325 bp, Homo sapiens
  source 1..1325: mol_type = unassigned DNA
gaaacaaaaccggccatggcagcagcggaggaggaggacgggggccccgaagggccaaatcgcgagcggggcggggcgggcgcgaccttcgaatgtaatatatgtttggagactgctcgggaagctgtggtcagtgtgtgtggccacctgtactgttggccatgtcttcatcagtggctggagacacggccagaacggcaagagtgtccagtatgtaaagctgggatcagcagagagaaggttgtcccgctttatgggcgagggagccagaagccccaggatcccagattaaaaactccaccccgcccccagggccagagaccagctccagagagcagagggggattccagccatttggtgataccgggggcttccacttctcatttggtgttggtgcttttccctttggctttttcaccaccgtcttcaatgcccatgagcctttccgccggggtacagggccgttttctacttctcctgctttcttccactaccttattgggaacaccagccgtgagttcagaggcagaatctacaatttctggcttcccaggaatctctgaaggaggaaaaatccagtcagaggctgtaattgtgaaggttctcaaactctgtgtgtggaaatgaggccagtggaagtcagaggccctcatgggccaaggctggggttgaaggctttttcttaggtaagagggaggccttggagaagaccctggaattcttacggtagacacggactcggtagttggacttggtctcctttccattcctgttcattgcctggcaccggaaaatcccctcatcctggatcccgacagccggaaggaagagggagccgttgggaaggacacgagccacactgtcccaggggcctcctccctggggagacaggaccttccaagcttctgtccggcctgtgttctagaagcagagaagcagggcctaaacagtgcaaggcctttgggaaaggactgtgaggcagagtgacggggatccaaatcattgctggtctccctggaagttgggaggctgcaacaggagccccgcttaccagtttccattccagccgctggggtggtttcttgggggcccccttacacttcagcaccagtggctcgccaatccgggctgtgatgttttgagcacctactactgcccctgggagatagcaccatggtagaggggtaggaagggaatgagggctaacaaaatttggacagggtgggtgagggaccttgaaaggcacttcctcgggttctgggaaaagttctaggacgactggggtgtggggttaaagtgctttctgcagggagggtcagtgggg

SEQ ID NO: 26899 - DNA, 1325 bp, Homo sapiens; identical to SEQ ID NO: 26890
  source 1..1325: mol_type = unassigned DNA

SEQ ID NO: 26900 - DNA, 1325 bp, Homo sapiens; identical to SEQ ID NO: 26897
  source 1..1325: mol_type = unassigned DNA

SEQ ID NO: 26901 - DNA, 1325 bp, Homo sapiens
  source 1..1325: mol_type = unassigned DNA
gaaacaaaaccggccatggcagcagcggaggaggaggacgggggccccgaagggccaaatcgcgagcggggcggggcgggcgcgaccttcgaatgtaatatatgtttggagactgctcgggaagctgtggtcagtgtgtgtggccacctgtactgttggccatgtcttcatcagtggctggagacacggccagaacggcaagagtgtccagtatgtaaagctgggatcagcagagagaaggttgtcccgctttatgggcgagggagccagaagccccaggatcccagattaaaaactccaccccgcccccagggccagagaccagctccggagagcagagggggattccagccatttggtgataccgggggcttccacttctcatttggtgttggtgcttttccctttggctttttcaccaccgtcttcaatgcccatgagcctttccgccggggtacagggccgttttctacttctcctgctttcttccactaccttattgggaacaccagccgtgagttcagaggcagaatctacaatttctggcttcccaggaatctctgaaggaggaaaaatccagtcagaggctgtaattgtgaaggttctcaaactctgtatgtggaaatgaggccagtggaagtcagaggccctcatgggccaaggctggggttgaaggctttttcttaggtaagagggaggccttggagaagaccctggaattcttacggtagacacggactcggtagttggacttggtctcctttccattcctgttcattgcctggcaccggaaaatcccctcatcctggatcccgacagccggaaggaagagggagccgttgggaaggacacgagccacactgtcccaggggcctcctccctggggagacaggaccttccaagcttctgtccggcctgtgttctagaagcagagaagcagggcctaaacagtgcaaggcctttgggaaaggactgtgaggcagagtgacggggatccaaatcattgctggtctccctggaagttgggaggctgcaacaggagccccgcttaccagtttccattccagccgctggggtggtttcttgggggcccccttacacttcagcaccagtggctcgccaatccgggctgtgatgttttgagcacctactactgcccctgggagatagcaccatggtagaggggtaggaagggaatgagggctaacaaaatttggacagggtgggtgagggaccttgaaaggcacttcctcgggttctgggaaaagttctaggacgactggggtgtggggttaaagtgctttctgcagggagggtcagtgggg

SEQ ID NO: 26902 - DNA, 2763 bp, Homo sapiens
  source 1..2763: mol_type = unassigned DNA
gggcagccggggtctaggcaccacggtggctggcggcctgcgggcggcgctgtggcccgtcgggcggctccacagagccgccctagccttccgccttccccaagccaacgtctccgccgtcggctccgcggcgccgccatggccgacgtggaagacggagaggaaacctgcgccctggcctctcactccgggagctcaggctccaagtcgggaggcgacaagatgttctccctcaagaagtggaacgcggtggccatgtggagctgggacgtggagtgcgatacgtgcgccatctgcagggtccaggtgatggatgcctgtcttagatgtcaagctgaaaacaaacaagaggactgtgttgtggtctggggagaatgtaatcattccttccacaactgctgcatgtccctgtgggtgaaacagaacaatcgctgccctctctgccagcaggactgggtggtccaaagaatcggcaaatgagagtggttagaaggcttcttagcgcagttgttcagagccctggtggatcttgtaatccagtgccctacaaaggctagaacactacaggggatgaattcttcaaataggagccgatggatctgtggtcctttgggactcatcaaagccttggtttagcattttgtcagttttatcttcagaaattctctgcgattaagaagataatttattaaaggtggtccttcctacctctgtggtgtgtgtcgcgcacacagcttagaagtgctataaaaaaggaaagagctccaaattgaatcacctttataatttacccatttctatacaacaggcagtggaagcagtttcagagaactttttgcatgcttatggttgatcagttaaaaaagaatgttacagtaacaaataaagtgcagtttaaaacccaactcttactcttaatttgttcctaatacgtatttttggcagggagagggaacggtccatgaaatctttatgtgatataaggattttaagtttgggccagtgaacagggtaaataaaatttaacttttgagcatatggaattttgattgcctttaaagttactattctgtatcattgattcatcaagaaaacctagatctgcactcacctcactgttcaatcattgagtggtaaaggacagaagtattttctagttctggtcagatgatataattttttttttttttttttgtgggggtgaagtcttgctctgccacccaggctggagtgcagtggcatgatgtcaactcactgcaacctccgcctcccgggttcaagtgattctcctgcctcagcctcccgagtagctgggattacaggtgtgtgccaccacacccggctaatttttgtatttttagtagagacgggatttccccatgttggccaggctggtctcaaactcctgacctcaggtgattcgcccacctcagcctcccaaagtgctgggattacaggtgtgggccactgcacctggcccagatgatataatttaactgtgttttaggtaacatgttaatgagggaaaatgtttaccagtgtagcattggatcaaaaagtttatcacacagtgttttaataaatggtttattctgcttaccttatttgaattgtcattataattttatatgcaaccttaatttgtcaagtaaatactttcatttaatttgaaagaattcatattcatttgctctttcatttgacaataataaaatttaaggtttattacctggaaagagtgcaagaaaatactaaacaactttatcaaactgattcacactgaggggaggttattttgtaacaaataatggaccacaagttcattttgtattcttctgtagtagaggctactgatatgaatttaagaaaaaaccttagaatcttaacttttcacatctgcagatgcagtgtgccattctgaatttttcaatctaagggatgtggatacatagaatgtttaaaaagataacaattagaatgaaaaattaaaattatgtatgcttttatatgggttactttttattgatcacatttctctggaaatttttctttatattttttcacagttgtctttctagctactgaaaaaattatacaaatatctttggccatttaaatgtttatcattgtgcagtgaactgttttagtaactttctgtttgacctttttagaaggttgcatccttaaaatgtgaaccagatacatggctttgcattgaagaggaaagcagtagaatgtcaggttactttaggcagtgtgacagtatataaatgaaatgtggaggatggtggtaacaatttgattttccacacagcaaaaccacagtcccgccacctaacaaagccctgtttatgccacacaccagcatctgagggaagaggaggcactgtgacaaagcagcgctgatgctgctcagcctgcgatgattacagctcatctgcacagccatctgaaagtttaatacatactcatcagagggaacatgccgggacaattttgggttccaatacaaaagttaagcatcaaacaggtttttctttccatttgattaaatgtgctgattttattttactgttgcattagaaacaaacaagttatctttcgctatttaattttccctctatgcaaattgtgttattacagctgaccgctatcagtaaatcttaattctgtcagtcccattgcttccttttttataaaaatactgtgtccccctttactgtcatgaagtgaaattcataaatatatttcctacacatataa

SEQ ID NO: 26903 - DNA, 805 bp, Homo sapiens
  source 1..805: mol_type = unassigned DNA
ccttccccaagccaacgtctccgccgtcggctccgcggcgccgccatggccgacgtggaagacggagaggaaacctgcgccctggcctctcactccgggagctcaggctccaagtcgggaggcgacaagatgttctccctcaagaagtggaacgcggtggccatgtggagctgggacgtggagtgcgatacgtgcgccatctgcagggtccagatgcctgtcttagatgtcaagctgaaaacaaacaagaggactgtgttgtggtctggggagaatgtaatcattccttccacaactgctgcatgtccctgtgggtgaaacagaacaatcgctgccctctctgccagcaggactgggtggtccaaagaatcggcaaatgagagtggttagaaggcttcttagcgcagttgttcagagccctggtggatcttgtaatccagtgccctacaaaggctagaacactacaggggatgaattcttcaaataggagccgatggatctgtggtcctttgggactcatcaaagccttggtttagcattttgtcagttttatcttcagaaattctctgcgattaagaagataatttattaaaggtggtccttcctacctctgtggtgtgtgtcgcgcacacagcttagaagtgctataaaaaaggaaagagctccaaattgaatcacctttataatttacccatttctatacaacaggcagtggaagcagtttcagagaactttttgcatgcttatggttgatcagttaaaaaagaatgttacagtaacaaataaagtgcagtttaaaacccaa

SEQ ID NO: 26904 - DNA, 782 bp, Homo sapiens
  source 1..782: mol_type = unassigned DNA
agagccgccctagccttccgccttccccaagccaacgtctccgccgtcggctccgcggcgccgccatggccgacgtggaagacggagaggaaacctgcgccctggcctctcactccgggagctcaggctccaagtcgggaggcgacaagatgttctccctcaagaagtggaacgcggtggccatgtggagctgggacgtggagtgcgatacgtgcgccatctgcagggtccaggtgatggtggtctggggagaatgtaatcattccttccacaactgctgcatgtccctgtgggtgaaacagaacaatcgctgccctctctgccagcaggactgggtggtccaaagaatcggcaaatgagagtggttagaaggcttcttagcgcagttgttcagagccctggtggatcttgtaatccagtgccctacaaaggctagaacactacaggggatgaattcttcaaataggagccgatggatctgtggtcctttgggactcatcaaagccttggtttagcattttgtcagttttatcttcagaaattctctgcgattaagaagataatttattaaaggtggtccttcctacctctgtggtgtgtgtcgcgcacacagcttagaagtgctataaaaaaggaaagagctccaaattgaatcacctttataatttacccatttctatacaacaggcagtggaagcagtttcagagaactttttgcatgcttatggttgatcagttaaaaaagaatgttacagtaacaaataaagtgcagtttaaaaccc

SEQ ID NO: 26905 - DNA, 8317 bp, Homo sapiens
  source 1..8317: mol_type = unassigned DNA
tttcctgtcgctgcttggtaacaatggggaagataatggctgcctgagcaacgtctccgagcaggcgctgggctagaggcgggtctcaaccagctactcattggaggcgggcttgagagcggcggccagggaggtgcggagcagcctcggcggcggcggccgaaccaaccgagtcggatcctgaccctaaaacctagtattttccacttgttcatcaatatggaaaactcagattccaatgacaaaggaagtggtgatcagtctgcagcacagcgcagaagtcagatggaccgattggatcgagaagaagctttctatcaatttgtaaataacctgagtgaagaagattataggcttatgagagataacaatttgctaggcaccccaggtgaaagtactgaggaagagttgctgagacgactacagcaaattaaagaaggcccaccaccgcaaaactcagatgaaaatagaggaggagactcttcagatgatgtgtctaatggtgactctataatagactggcttaactctgtcagacaaactggaaatacaacaagaagtgggcaaagaggaaaccaatcttggagagcagtgagtcggactaatccaaacagtggtgatttcagattcagtttagagataaatgttaaccgtaataatgggagccaaaattcagagaatgaaaatgagccatctgcaagacgttctagtggagaaaatgtggaaaacaacagccaaaggcaagtggaaaacccacgatctgaatcaacatctgcaaggccatctagatcagaacgaaattcaactgaagcgttaacagaggtcccacctaccagaggtcagaggagggcaagaagcaggagcccagaccatcggagaaccagagcaagagctgaaagaagtaggtcacctctgcatccaatgagtgaaattccacgaagatctcatcatagtatctcatctcagacttttgaacatcctttggtaaatgagacggagggaagttctagaacccggcaccatgtgacattgaggcagcaaatatctgggcctgagttgctaagtagaggtctttttgcagcttctggaacaagaaatgcttctcaaggagcaggttcttcagacacagctgccagtggtgaatctacaggatcaggacagagacctccaaccatagtccttgatcttcaagtaagaagagttcgtcctggagaatatcggcagagagatagcatagccagcagaactcggtctaggtctcagacaccaaacaacactgtcacctatgaaagtgaacgaggaggttttaggcgtacattttcacgttctgagcgggcaggtgtgagaacctatgtcagtaccatcagaattcccattcgtagaatcttaaatactggtttaagtgagactacatctgttgcaattcagaccatgttaaggcagataatgacaggttttggtgagttaagctattttatgtacagtgatagcgactcagagcctactggctcagtctcaaatcgaaatatggaaagggcagagtcacggagtggaagaggaggttctggtggtggtagtagttctggttccagttcgagttccagttccagttcgagttccagttccagttcaagttccagttccagtcctagttccagttccggtggtgaaagttcagaaactagctcagatttatttgaaggcagtaatgaaggaagctcatcatcaggctcatcaggtgccaggcgagagggtcgacatagggccccagtcacatttgatgaaagtggctctttgcccttccttagcctggctcagtttttcctcttaaatgaggatgatgatgaccaacctagaggactcaccaaagaacagattgacaacttggcaatgagaagttttggtgaaaatgatgcattaaaaacctgtagtgtttgcattacagaatatacagaaggcaacaaacttcgtaaactaccttgttcccatgagtaccatgtccactgcatcgatcgctggttatctgagaattctacctgtcctatttgtcgcagagcagtcttagcttctggtaacagagaaagtgttgtgtaattaagatctgaactctcagctatgtagctgatatagtgatgggcaaacaggaatcacttgcttttatgtccactttttgagtggtacttaaatgtaaagtaacaacctgaattgagtcattgctttctgaaggaatcattgtcctttctccagtttttgttccagaataaaaggaaatattttaaaagccacgttataggacctaaaaatctgatttccgtaccagttaaattggtagcatcactgttactgataatttatcatatacacttgtcaatttttcctttgttatcttaaaagatctgccttagcaatggctcctttttcatgttgatctttaaattttcccacaccataagagaggagcaaaggaaattaccagtttagactaagttacagtatgtgtttcataagtgattaaagctatatcattcccagttattagttaacacaaattcagccacattctgagtattgtttgttcacctttcagacttggtgatactggacatgtcagtgtaaataacactaaggttaggatcttctaagtgtataactgtctcctaagcccatcactgtggcacactgtagagtgagcttatagtttaattgagatatttatcttgtggaaatattaaaaagcctatgcttgtgtaagtgaaaaaaaatcacattcatttgtttaaaaatgtaaagctattttgtagaggctcagtacttttccaatgcactgttgtatgaatgcattaaaaattgtaaagtaccatgcttagaactgagaaaactgctttttgtgagccaacatagtaacaaacacaccaaacaaagtacaaagctgcttttgtaagtgtgtagatgtcaagagcagaacatatctataatatttaatgtgtgaacagctactgtgacatgcaaaggaaaggacagtgcagaattaaaccgtgttgaagaccagtggaaattgtataatttaacttggatttaggcaggaagtgaaatatgggaggagtaaagaaaactgaagaatttaaagttttcctgaagacagtaataatgcagacacaaactggtttcatatggtgagagcagccacagcagcagcttgacctggtattctacctgagtagatgaagcagaagatcagcaagtttggcagagttttggtttaagaaaaacaaaccactactacctagcacaagttaaatttacaagtctgctcctcaaaaatgaaaaaatggaggaaagagactataaaaccacttttagcatatgaattgcagttggtacacatgtgtgtgttaataggaaagtctcgaatttgtgttgtttttgagatttgtcatttaaggtaccagtgcacacttgatcatatttcattactatctctaacacagtcctaacatctcaaatttaaagaccagttgaagattaagggatttttatcctttgttgaaagtcatgttgggttatttgaaattcaaattttaattgtgctgcccatatatgaaaatgagactgctgactcgctatctatggacatgcactttatgttggtttcttagtagtaagagtaacttcatgataaccccagtcttcttgcctaatttcttttttgagactagctggggttaggattagaatgactatggagcagatatttgttcttctgggaaaagctttaacaggccaaaatagggattgaacttgtccttggcctttatcaaagcaagctagctacccagacgtagtcaaatactctacaaaataaacaagtctgctttaggaattgtctgggtaccttcactgttaccaacttagctgtaaagattatttcaaagctcactcttccatgatttcttctggctttcaatcctatctaagtatcaaggaaattaacttgtaaatatggtagttgtttactaaggatatgtactgctcttgcaaggaaataatgtccaaacaaagcttcacttattttttttaatataagcagatttcactgtttatggcgcttatgtaatacattttatctttttaaaaatttgtccgtgtaaaagtcaggattcctttatatttgtgagcctccttttctcctttcctaaggatgtaatctacagttttcagatctgcagggtagtcttgattggctaaaaacaaatcaattttcttcttggcataaagtgtttcattattataggggtgttcattttaaatagtttaaaaacaattgcagcacattctaagcataagagaaagttattgacaacaggtaccttcctaatctcccaagacgtacttactcatttgtgaagtattaaagtaagaggtaactcaagcagaatgctggctatgaatgtagatattgaagctattcataaacactggaaatagaattttaagcttttagccttcagtggaatgcacatattggacatgtgcatgtgaacacctttttcagtagcactcacggatttccattcgattgtatagaatgaatacaagtgttttagtggaatttgctacttaatttttaatcttgcgatgtccgtgattattacatgcttactagtgttgtggacattgaagacaaggtcattcgtaggtgtcagattacaatggagaacaaaaatcgttttccccccacccacatccaaacaccattctcgagggagcatttcttgcaaaacaccttacatttcattttctatctttgcactttttcttaagtacagaaaagttgtctttaagacctagtttgaacttcatgcagtaagaggaacaaggataaacaatgttgggagttcacattgttcagagcataaggaaaagtaccaaaacccaaattttcttgaatatttcagatgtttttaaaaactcacttctagtctgaaacatttgaattgttttaactctgagcagctgacaaagttgaggtttttttgttttgttttgttttgttttgtttttttgagacagagtcttacttggttgcccaggatgaagtgcaatggagcgatctcggctcactgcaacctctgcctcctgggttcaagcaattctcctgtctcagcctctcgagtagctgggattacaggcgcatgccaccacacctggctagtttttatatttttagtagagatggggacttcaccgtgttggccaggctggtcttgaactcctgacctcaagtgatgtgcctgcctcggcctccgaaaatgctgggattacaggcgtgagccaccatgtccagccaaagttgaggtttattagtactattagaaacaaaattgagcaagttaagttaaaagtttgctgactttgtatcaacactatagaagatgagccaccttgttaatttggaatatttgctctgaaaagaacatgttagttacaccttaatggtgttaatggaggtggggattgagaaaagtgttcacattagtgttggaatgtaggtaattgtacagtttataagacctttagcaccaggaaataaaatatgtgtgtgtacacacacagtttttaaaaacgattggaattcatccaaaccttaagattaggaaactgattggctgtaagtgttgcctcaagtaatgtgtcccccgccccataacatgtcttttctgtgccaagtatcctctcctagtgtcagtgtctcaaattatatttatgaagggttatcacataatatgctttgtatttaactacctgcttcccaggcgtccatgacatgaaatgggtgaagcatcagccatgactttcggtcagttcccaaaatacccaaatgatagggaggtaaagattgcaaaattcctcttaaaaggccatttttacagcttgctaaaatacagtggcaccttatggttgttaatattttttcttttaaagatggagaatgtttttattcttccccttttctcctttgttcttttgcgaacaaaaaaaattataatctgccttatttgattttttttttaagttttaccttacaggcttccctgtcacatgttttaccatattaagtacatagaagccatgtttgcagggcacttttattctcctagtcttataagactatgctaattgttactttctgaagtattctgtaccttagtatgcaagattgttaaggcacatgttaaagtgtcaggtgtgtttttttccctttaattcttcagtatgtttatattcaataacagtattgtaattcattgagttaactagtaaattgtgtgcttttgaaaaaacatgaaaaatgtaaattgacagcatacttcatttggaaaaaagtaaaagatccgaggaactagtatgtcacttatttatttttattttattttattttttactttttgagacagggtcttgctctgtcacccaggctggagtgcagtggcatggtcacagctcactgcagccttgacttcctgggctcaggtgattctcccacctcagccttccaagtagctgggactacaggcatgcaccacattgcctggctaattttttgtggagatggggtttcgccatgttgtccaggctgttcttgaactcctgggctcaggcaatttgcctgcctcattctcccaaagtgctgggattataggcgtgagccactgcgcccagccttacttatttttaaatcagattttttaatcaactaaaacagctatgagttaagtacctgccctgcaaaaatttttagaaaaagttttaggattatgaaattaagaattattttccttaactggaacagttctaaaatttatctgatacttctctaacaagtgagtgatctcatgtaaccccagtttgtatcttaaaggctgcagcatagaattgagctgtataacagtgttagaactgtcaagtgataatcacagaacagtttgtatcggttttataattctcatgtcttgatcagatctgaaggaaataggcataccctccaacattctaaaaattatttatttttattaggatttgtttattaaagttccacgagctgctttatggtcagttgggctgagtagtagatatcttaaagacatgcagtgaaagtgaaccctgtcatatcatggtgcctctttcaaggttcctctgtaagttcctcatcttgcagaattatttcaataccaaggtatggttgaaccagctgtccagccttaactctatttagtgccccattactaatgttcttttaactggtttgtatgtgttttaactgtccagtgtttggattttacctcttgatagctccatttgtccctggtgctgcttttaaggatgtagggccatgtgatcaggtatcaagttgagtaggtacgcagttggcctggtgatgtatctgtgcctgttttatcttctcccaggaagagctgctttggtatagttgtttacttggattcatacaaagaacagggcagcaatcttggaaagctttctgaagcttataagaacctgaaggggtttggagggggaacagtaacaaaggctgcctttatgtctttggtcacaaagcacatagatgtatgttctgtaaagactaaagtgattgttataccagggcttcctgaccttcgggagagactcaaaaaagcagagaggagcacaaagtgaagttaatttggttggcttgctttatctggtttctcattttctttcaatttaaacctgaacataacacccttctccgatacctatccagcagactcctggttgggaagccctgtattaaattttgagaatgtacacagttttcttttgtacagtgctttacaactgctaaaagttaacttgtttaaagcaaaacaagaccttgaaaggtcaatcatattaaagctggtttgattattaatagttatcttttaggaagaagcttttttccctatgtaagatgtcatactgcagatttaaaatatagactatcaataaaatgcatgaagtgatcatttgtgcttgatcatctctccttgggtttttctttaaaaaggggaatctgctataaaggttctgttgcttcaaaccaatgtcaaatagacttgatttttagagtcatggaattacagtgcaaccttgatttttattcccctcactgctatgagtgtgggcaggtactggtttatatgttataacttccgttttatctgtgttgtgtagttgaatggcttaatcgttgagtggtaaaataaaagattatattccaatacaagaatcctggaaa

SEQ ID NO: 26906 - DNA, 3478 bp, Homo sapiens
  source 1..3478: mol_type = unassigned DNA
tttcctgtcgctgcttggtaacaatggggaagataatggctgcctgagcaacgtctccgagcaggcgctgggctagaggcgggtctcaaccagctactcattggaggcgggcttgagagcggcggccagggaggtgcggagcagcctcggcggcggcggccgaaccaaccgagtcggatcctgaccctaaaacctaagcagagtgaagaaaactaaaatccagtttattgtatttcaatactatgtcataacagtcaggtattttccacttgttcatcaatatggaaaactcagattccaatgacaaaggaagtggtgatcagtctgcagcacagcgcagaagtcagatggaccgattggatcgagaagaagctttctatcaatttgtaaataacctgagtgaagaagattataggcttatgagagataacaatttgctaggcaccccaggtgaaagtactgaggaagagttgctgagacgactacagcaaattaaagaaggcccaccaccgcaaaactcagatgaaaatagaggaggagactcttcagatgatgtgtctaatggtgactctataatagactggcttaactctgtcagacaaactggaaatacaacaagaagtgggcaaagaggaaaccaatcttggagagcagtgagtcggactaatccaaacagtggtgatttcagattcagtttagagataaatgttaaccgtaataatgggagccaaaattcagagaatgaaaatgagccatctgcaagacgttctagtggagaaaatgtggaaaacaacagccaaaggcaagtggaaaacccacgatctgaatcaacatctgcaaggccatctagatcagaacgaaattcaactgaagcgttaacagaggtcccacctaccagaggtcagaggagggcaagaagcaggagcccagaccatcggagaaccagagcaagagctgaaagaagtaggtcacctctgcatccaatgagtgaaattccacgaagatctcatcatagtatctcatctcagacttttgaacatcctttggtaaatgagacggagggaagttctagaacccggcaccatgtgacattgaggcagcaaatatctgggcctgagttgctaagtagaggtctttttgcagcttctggaacaagaaatgcttctcaaggagcaggttcttcagacacagctgccagtggtgaatctacaggatcaggacagagacctccaaccatagtccttgatcttcaagtaagaagagttcgtcctggagaatatcggcagagagatagcatagccagcagaactcggtctaggtctcagacaccaaacaacactgtcacctatgaaagtgaacgaggaggttttaggcgtacattttcacgttctgagcgggcaggtgtgagaacctatgtcagtaccatcagaattcccattcgtagaatcttaaatactggtttaagtgagactacatctgttgcaattcagaccatgttaaggcagataatgacaggttttggtgagttaagctattttatgtacagtgatagcgactcagagcctactggctcagtctcaaatcgaaatatggaaagggcagagtcacggagtggaagaggaggttctggtggtggtagtagttctggttccagttcgagttccagttccagttcgagttccagttccagttcaagttccagttccagtcctagttccagttccggtggtgaaagttcagaaactagctcagatttatttgaaggcagtaatgaaggaagctcatcatcaggctcatcaggtgccaggcgagagggtcgacatagggccccagtcacatttgatgaaagtggctctttgcccttccttagcctggctcagtttttcctcttaaatgaggatgatgatgaccaacctagaggactcaccaaagaacagattgacaacttggcaatgagaagttttggtgaaaatgatgcattaaaaacctgtagtgtttgcattacagaatatacagaaggcaacaaacttcgtaaactaccttgttcccatgagtaccatgtccactgcatcgatcgctggttatctgagaattctacctgtcctatttgtcgcagagcagtcttagcttctggtaacagagaaagtgttgtgtaattaagatctgaactctcagctatgtagctgatatagtgatgggcaaacaggaatcacttgcttttatgtccactttttgagtggtacttaaatgtaaagtaacaacctgaattgagtcattgctttctgaaggaatcattgtcctttctccagtttttgttccagaataaaaggaaatattttaaaagccacgttataggacctaaaaatctgatttccgtaccagttaaattggtagcatcactgttactgataatttatcatatacacttgtcaatttttcctttgttatcttaaaagatctgccttagcaatggctcctttttcatgttgatctttaaattttcccacaccataagagaggagcaaaggaaattaccagtttagactaagttacagtatgtgtttcataagtgattaaagctatatcattcccagttattagttaacacaaattcagccacattctgagtattgtttgttcacctttcagacttggtgatactggacatgtcagtgtaaataacactaaggttaggatcttctaagtgtataactgtctcctaagcccatcactgtggcacactgtagagtgagcttatagtttaattgagatatttatcttgtggaaatattaaaaagcctatgcttgtgtaagtgaaaaaaaatcacattcatttgtttaaaaatgtaaagctattttgtagaggctcagtacttttccaatgcactgttgtatgaatgcattaaaaattgtaaagtaccatgcttagaactgagaaaactgctttttgtgagccaacatagtaacaaacacaccaaacaaagtacaaagctgcttttgtaagtgtgtagatgtcaagagcagaacatatctataatatttaatgtgtgaacagctactgtgacatgcaaaggaaaggacagtgcagaattaaaccgtgttgaagaccagtggaaattgtataatttaacttggatttaggcaggaagtgaaatatgggaggagtaaagaaaactgaagaatttaaagttttcctgaagacagtaataatgcagacacaaactggtttcatatggtgagagcagccacagcagcagcttgacctggtattctacctgagtagatgaagcagaagatcagcaagtttggcagagttttggtttaagaaaaacaaaccactactacctagcacaagttaaatttacaagtctgctcctcaaaaatgaaaaaatggaggaaagagactataaaaccacttttagcatatgaattgcagttggtacacatgtgtgtgttaataggaaagtctcgaatttgt

SEQ ID NO: 26907 - DNA, 4744 bp, Homo sapiens
  source 1..4744: mol_type = unassigned DNA
gcttcctgcgcccgccgcggcccttcccggggcgccgccgccaccgcctggtgtgcgaggctatccggcccgggcccggggcttgcagggtgccagtgggggcgcccggttcccttcctcgctctctcttccagtccccggaaagggtgggtgggtggtctcccgagcgaagtttccagcactggattcctgcgaaattacgacggctcacccgcgtctgtgttttgctgtctctcccccgttttcctgctccctgcctcttccctcccttttcccccactctccactcctcggaaggccaaaaagacaagcgaaacctgccgcagacgaagggttttgggattgtagcgtctgcaccttcagaaacagtgctgaagcctttaaatgcagcatctgcgatgtgaggaaaggcacctccaccagaaaacctcggatcaattctcagctggtggcacaacaagtggcacaacagtatgccaccccaccaccccctaaaaaggagaagaaggagaaagttgaaaagcaggacaaagagaaacctgagaaagacaaggaaattagtcctagtgttaccaagaaaaataccaacaagaaaaccaaaccaaagtctgacattctgaaagatcctcctagtgaagcaaacagcatacagtctgcaaatgctacaacaaagaccagcgaaacaaatcacacctcaaggccccggctgaaaaacgtggacaggagcactgcacagcagttggcagtaactgtgggcaacgtcaccgtcattatcacagactttaaggaaaagactcgctcctcatcgacatcctcatccacagtgacctccagtgcagggtcagaacagcagaaccagagcagctcggggtcagagagcacagacaagggctcctcccgttcctccacgccaaagggcgacatgtcagcagtcaatgatgaatctttctgaaattgcacatggaattgtgaaaactatgaatcagggtatgaaattcaaaacctccacctgcccatgctgcttgcatccctggagaatcttctgtggacatcgacctcttagtgatgctgccaggataatttctgcttgccatgggcatctggccaccaaggaatttcgcaccctgacgattactcttgacacttttatgtattccattgttttatatgattttcctaacaatcatttataattggatgtgctcctgaatctactttttataaaaaaaaaaaaatctgctgtgcacaattttccatgtacattacaactggttttttgtttttgttttgttgccggtggggagggctgggagggggagggaacttttatttattgtgttcacaaactccatcctttcagcatatccttttaagtttagttctttcttccagttatactatgtactatcagttttgatataactatatatatataaatataaaattatatataaagggttatttgaaaccaatccatggcaacgctggtgcttgatacactgtgaagtgaatacaacattgaacagttacagatctgggacagtcccttctatgaaagtgctgaaatttaattaaaatcagtcttatatgaagtatgttccaatccatgtgggaacttgactctctcatctgtctaaagagtactggacgatataaaaatatatattttttaaacaatgtgatctcaaatttaaagactgctccagatagcctgcatttgcaatggaataactgacaaatcacaagtggtttagttgggcagggctttgatcattcaaaagtaactaaagtagctccagaatgccaagtattcgtgtaaattacggttacatgttatcatttgctgttcttacataagcactcatgaaaatatggtattctgtaacttgaattccatccattttccagacctctactcatgtctgaggtaaatctagaaattgtcttagttttaggattgaaacagtctataaactgtatttttggtccatccaggaagctagtcccttgtttctcctttctacatgacattgcagtggtggtttctgtaattaaaatttgtttgcctcatgtccctttgtctgataaaccttcactctaccgattcagttgtgagcattctttttttccttctcaaaacctactatgatttgttttactgaacaaaggttatcaaccacacatccagtcctgacatggagcttttcagtgtttggagacatttctcaatcccctgctgtggtaggaactccagtggtgaacggcttgcgcgcctgcagccagagttgcagggaaagctcgtacttactgcgagcagcatgtaatcttttttcttcctggacataaagatagcttgagtaaactgttctatttcattctcttcactctttttactgtcttgcaaaaaaaaaaaaaaaaaaaataatcaaagaccactaataagattccacctctccttattaaaataattttttaaaattttgttttgcttttgtttggatgtggggtctctcttctatttgacttttacatttagatacagagtttgtagtacttcagagacatttcaagcatgagaatttgaggttacctctctttatttgacctttagggactcacgggagggcagcctgatttgtaatgaagcaccacattttggtgttaaaaacctggtttgcttaataatagcagtaatttctgtctgtggaggcaacaaataaaaaaattaacagcttgaattgagtagccaacaggaaaggttcctttcacatttacattaaaactattctgtagtcactaatgtaccataatttaaattcttttctcaaaggtatagattataaagcagtgccatttgttgctgtggtcctattctcaaatgcatggacaatgttcccccctttttaaaataatgcttgtgtctgggatgcaagctttgcttatctttttaaatacatttttaaagtatttattaatgaaccaaaggaaatcagatgctttctataagcatcagaatatataatacatagtgatttgactatgaattttaaatccacattttaatattggtgggatattgcaaagacattccttctaaagttttaatattccttttattaagggtctcagggagggtaaattagtcagccatatttattttccagaggtttaagaaattgctgtttttaactttttgaaaaaacttaaatgccaccaaactcatgtaggttgcactgcttattgaaccaataactgttggtatgcactttgttcagacacactgtgtactttttcaaaaactagtttcatgtaaagtgattggaccccatagattagtggaaaaagctgattaaccagctactcataggctgctaattcattcatgccaatgttttggtttttcagttttgcctccgtgataaattaaagaatggggaggggtgaaggaaggggaagaagattgctttagaacaagtggcatgaaattaccatctttgtagaaaccgcagctaacagtgggagttatctaagcaatcagatgttacagggccagccctttagctgctgtggtgtattctgttgggtagtgaggtagtaggtactttatagacttttaattttggaaattgatgacatccctcaggcatgtattctggaaatggaattcctgtaacttcctgtgtctgcagtatgccctacaattagtaggcagcgtgtaaaaacactagtgtagattataaagatatacattaaaagaggaccagaaatacttggtattcagtggcacagaaagcaggttaaacaaacaaaaagcacagtgttacgcttgcaagtttccatttgttttaataccacgcaatctttcacactcgtgcgtgtgcgcgcacacagagcttacctgacttgctctgcttgagtcatgcagttacaaaaaaaaagacatcttgacacccacacaatattctaatcaaaacctttcagtttcaatctggatatttaaaaacattggcagaagcttctgtgagtttagttccactaagatgtttcacctgccttatcaagaccattctcagtctacttttttaagctaccgtatcttaaattattgaaaatttattaattgctgaatatataataacctttgcttgtatgtaaccgaaaatggtttaagagccaacatttagagtatgacaatggagctgaacagtttttaatgcgcaagcagttctgttcttgtgtatgacttgtaaccttaatttactgtgtaaagatggttacattatttccttagctttgtttgttggagacaaatagagaatgcttgttaagtatgtcaaaacaatcttatcttgtgaatttttgttaatgtattatacgagctatatttttcatttgcccagaaagacagcttgtataacgcttttggaagtttctgctctgtaatgtctttagagctgacagtctgttaggtttgtttttttcttcatgctaaagtgtcagttggtggttttgtgaactggtcaaaaattcacaggtcttaaatgttttgggggaaatttatattggacactgctctttgtctagcaaataaaagatgttaatatattcctgttactggcatgtgcacgactatgttattagaagccactttatcattttcctgctttaaatagaaatgtctatttatgaattctgcttgtagttttttcacaaataaaatagtaaaatttacattggaaatctt

SEQ ID NO: 26908 - DNA, 1172 bp, Homo sapiens
  source 1..1172: mol_type = unassigned DNA
ggagaccccactggctttggtcccctaagaatggactctgctgcctgtgctgctgctgccacccctgttccagccctggctttggccctagctccagacctagcacaagccccactggcactccctggcctgttaagcccatcttgccttctctcctctggacaagaagtaaatgggagtgaaagaggaacttgtctctggaggccctggctgtcttccacaaatgactccccaaggcagatgaggaagctggtggatttggctgctggtggggcaacggctgctgaggtcaccaaggctgaatccaagttccatcaccctgtcaggctcttctggcctaaatcccgctccttcgactatctgtacagtgctggggagattttactgcagaactttcctgtccaggcaaccatcaacctatacgaggactcagacagcgaagaagaagaggaagatgaagagcaggaggatgaagaagagaagtaggaggccaatgaaaaggggccagaagggtgtgtgagggtaccagggtccataccctacagcgccacagctcatcccccttcctcacccctaacctatccaaatggaggcagccagagtctgattggggttcagtttgtctggcaagttttcacagacatcagttagccggaagtattagtccagcagatagagctttctggactgaaaattgggtcatctagctgcccagctcaccctggcttacctgaatggcctgtgagctcaggcctcttgcatctcattgtctgggctgctgttgtgttgaccatgggagggttctaggagctctagaaggaaggcttgctgaagcccccaggaagcagagcagggcagggaatgcccttgtggagggaagtagtcattcctcaggccctttgactccctagccttcccaggtggccatgtagtcccgtctctctgtggaaagcctgacttctggcttcaccccaaggaataccaacagcagatccatgcaaggttggggtgcctttttgatgagtcttacaggaagggaaggcagtgtgtagagaatcggcttgctctggggatgcctccccattttgcctgctgtccattgaagtctgtgtgttggcatgagatgaatcaggagaaaaataaactggatggtgttttcctttttcttggaa

SEQ ID NO: 26909 - DNA, 786 bp, Homo sapiens
  source 1..786: mol_type = unassigned DNA
agaaggttctgggaagtaggagaccccactggctttggtcccctaagaatggactctgctgcctgtgctgctgctgccacccctgttccagccctggctttggccctagctccagacctagcacaagccccactggcactccctggcctgttaagcccatcttgccttctctcctctggacaagaagtaaatgggagtgaaaggctcttctggcctaaatcccgctccttcgactatctgtacagtgctggggagattttactgcagaactttcctgtccaggcaaccatcaacctatacgaggactcagacagcgaagaagaagaggaagatgaagagcaggaggatgaagaagagaagtaggaggccaatgaaaaggggccagaagggtgtgtgagggtaccagggtccataccctacagcgccacagctcatcccccttcctcacccctaacctatccaaatggaggcagccagagtctgattggggttcagtttgtctggcaagttttcacagacatcagttagccggaagtattagtccagcagatagagctttctggactgaaaattgggtcatctagctgcccagctcaccctggcttacctgaatggcctgtgagctcaggcctcttgcatctcattgtctgggctgctgttgtgttgaccatgggagggttctaggagctctagaaggaaggcttgctgaagcccccaggaagcagagcagggcagggaatgcccttgtggagggaagtagtcattcctcaggccctttgactccct

SEQ ID NO: 26910 - DNA, 521 bp, Homo sapiens
  source 1..521: mol_type = unassigned DNA
ctctccatcccccactgcccggtgccagcgctcggcttcggtggattctcccgggtctgggctcacgtctcctctgcgcgccttgtgctcccctatcccgcagatacgcaggcttctggagaccctgggtggacgccggaggcaagaaagaagaggagacgccgaaccacgccgcggaggcgatgcccgatggccctggaatgaccgcagcctcaggaaagctttaccaattcaggcacccagtcagactattttggccaaaatcaaaatgttatgattacttatatcaagaagcagaagctcttctgaaaaattttccaattcaagccacaatttcattttatgaagattctgatagcgaagatgaaattgaggatctgacctgtgaaaattaatctgattagctacttttgattatatccaaagcttgtggggtttaaatttagtgtacaaatgtatcataattattttaaactaatttatttgtatataaattattaataaaatgaaatattttgtaa

SEQ ID NO: 26911 - DNA, 664 bp, Homo sapiens
  source 1..664: mol_type = unassigned DNA
gcggctagcagggagaggggcggagaggcagcgaacctctcaatgtgcagcaggccgcgagggctatataaagctcgggtctcggacctactggaactggtcaagattgcccgcgagctggcagcggccttccgcccagctctgcggcgtcatggagaacgcgggaggcgcagagggtacagagagtggagctgcggcgtgcgcggccaccgacggccctacgcggcgcgcgggcgcggactccggatacgcaggcttctggagaccctgggtggacgccggaggcaagaaagaagaggagacgccgaaccacgccgcggaggcgatgcccgatggccctggaatgaccgcagcctcaggaaagctttaccaattcaggcacccagtcagactattttggccaaaatcaaaatgttatgattacttatatcaagaagcagaagctcttctgaaaaattttccaattcaagccacaatttcattttatgaagattctgatagcgaagatgaaattgaggatctgacctgtgaaaattaatctgattagctacttttgattatatccaaagcttgtggggtttaaatttagtgtacaaatgtatcataattattttaaactaatttatttgtatataaattattaataaaatgaaatattttgtaa

SEQ ID NO: 26912 - DNA, 1457 bp, Homo sapiens
  source 1..1457: mol_type = unassigned DNA
cgggaaagcggaggcggggcggaagggtgcggcgaggcggaatggcggcggctgcggactcgttctcaggcggccccgcgggggtgcggcttccgaggtcgccgccactcaaggtgctggcggagcagctgcggcgcgacgcggagggcggcccgggcgcgtggcggctgtcacgggcggcggcgggccgcgggccgctggacctggcggccgtgtggatgcagggcagggtagtgatggcggaccgcggcgaggctcggctgagggacccgagcggggacttctcggtccgcggcctggagcgggtgccgcgcgggcggccctgtctagtcccaggaaagtatgtgatggtgatgggagtggttcaggcctgcagccctgagccctgcctgcaggctgtgaagatgacagacctttctgataatcccatccatgaaagtatgtgggaactggaggtagaagatttacacaggaatattccttagagtatgttggaactgtcgttaaaaacaaccaaaatcccgaaactatttagaagcttataatgatgtggatttcatggacacttttcaatgcgtatttttcaaatgcttctcagagagccttgctttggttgaccaaggagtccggatgtaggaatgtttaaatcctcggatacttcagtgacacagcctctgctgccccttgctttgcctgtgtttgctgatgaaaagcagatgcttgtgtttcattttccttcctggtttgtgtgtgttaattctctctctctctctcagacacagaagtctcatgttgcattttccaaattttatgagtgatgatactttttccattactgctgcgtccctgttttacaatgcaaaatttaagtacggtcgttgcccatggtgattaaagtgtggttatgggcaggaagacagactgtgtaaaaaaggaatgacatcctggctcctcatcttcttcatcagcaactaccataaccagtttgcgagtcaaatggcatttcctaacggcaggcatggcggcccctgaaagacaacagctccctttctgcttcggacaccactcaaacatttagacgcagctctatcccttttcctagctagagaaggtgatgccttcttccattactcagagatgttgagacgttttcagaatttcttgttgaaatgaaaaacatcaagataaaggacgcctttcaggcattagctaaacttccacttcataactttcggcgagacatggtgagcctcctggtgtagagttcttttgtctttgtatggaatgactttttgctgtgatggttttgaatgttgggtttctgctgtctgcttagtacccatgcctgaattttttgagattgtaaatatcaaaggagttagattgtgttctgacatggttgtagactttcacctggattattgatattctacctctaataaatttttaataggctg

SEQ ID NO: 26913 - DNA, 1193 bp, Homo sapiens
  source 1..1193: mol_type = unassigned DNA
atgaaacagacccaagtgggctcgctcttcagtctcggcataaggaatccggaacctgggcccgtgtccggaactgctgtgcccaggcagcttgcctggaaatcaggaaagtatgtgatggtgatgggagtggttcaggcctgcagccctgagccctgcctgcaggctgtgaagatgacagacctttctgataatcccatccatgaaagtatgtgggaactggaggtagaagatttacacaggaatattccttagagtatgttggaactgtcgttaaaaacaaccaaaatcccgaaactatttagaagcttataatgatgtggatttcatggacacttttcaatgcgtatttttcaaatgcttctcagagagccttgctttggttgaccaaggagtccggatgtaggaatgtttaaatcctcggatacttcagtgacacagcctctgctgccccttgctttgcctgtgtttgctgatgaaaagcagatgcttgtgtttcattttccttcctggtttgtgtgtgttaattctctctctctctctcagacacagaagtctcatgttgcattttccaaattttatgagtgatgatactttttccattactgctgcgtccctgttttacaatgcaaaatttaagtacggtcgttgcccatggtgattaaagtgtggttatgggcaggaagacagactgtgtaaaaaaggaatgacatcctggctcctcatcttcttcatcagcaactaccataaccagtttgcgagtcaaatggcatttcctaacggcaggcatggcggcccctgaaagacaacagctccctttctgcttcggacaccactcaaacatttagacgcagctctatcccttttcctagctagagaaggtgatgccttcttccattactcagagatgttgagacgttttcagaatttcttgttgaaatgaaaaacatcaagataaaggacgcctttcaggcattagctaaacttccacttcataactttcggcgagacatggtgagcctcctggtgtagagttcttttgtctttgtatggaatgactttttgctgtgatggttttgaatgttgggtttctgctgtctgcttagtacccatgcctgaattttttgagattgtaaatatcaaaggagttagattgtgttctgacatggttgtagactttcacctggattatt

SEQ ID NO: 26914 - DNA, 6051 bp, Homo sapiens
  source 1..6051: mol_type = unassigned DNA
agtgttggttcatgaagttttaccatcaattcaagtaatcataaatggcaaattctgcaaaagcagaagaatatgaaaagatgtctcttgaacaggcaaaagcgtcagtgaattctgaaacagagtcttcattcaatattaatgaaaacacaacagcttctgggactgggctttctgaaaagacttctgtctgtaggcaagtagacatagcaagaaagagaaaagagtttgaagatgatcttgtaaaggaaagttctagttgtgggaaagacactccatccaagaagagaaaacttgatcctgaaattgtcccagaggaaaaagattgtggtgatgctgaaggcaattcaaagaaaagaaaaagagaaactgaggatgttccaaaagataaatcttctactggagatggcactcaaaataagagaaaaatagcacttgaggatgttcctgaaaagcagaaaaatctggaagaaggacacagctcaacagtggctgcccattacaatgaacttcaggaagttggtttggagaagcgtagtcaaagtcgtattttttacctaagaaactttaataattggatgaaaagtgttctcattggagaatttttggaaaaggtacgacagaagaaaaaacgtgatatcactgttttggacctgggatgtggtaaaggtggagatttgctgaaatggaaaaaaggaagaattaacaagctagtttgtactgatattgccgatgtttctgtcaaacagtgtcagcagcggtatgaggacatgaaaaatcgtcgtgatagtgaatatattttcagtgcagaatttataactgctgacagctcaaaggaacttctgattgacaaatttcgtgacccacaaatgtgttttgacatctgcagttgtcagtttgtctgtcattactcatttgagtcttatgagcaggctgacatgatgctgagaaatgcgtgtgagagacttagccctgggggctattttattggtactactcccaatagctttgaattgataagacgccttgaagcttcagaaacagaatcatttggaaatgaaatatatactgtgaaatttcagaagaaaggagattatcctttatttggctgcaaatatgacttcaacttggaaggtgttgtggatgttcctgaattcttggtctattttccattgctaaatgaaatggcaaagaagtacaatatgaaactagtctacaaaaaaacatttctggaattctacgaagaaaagattaagaacaatgaaaataaaatgctcttaaaacgaatgcaggccttggagccatatcctgcaaatgagagttctaaacttgtctctgagaaggtggatgactatgaacatgcagcaaagtacatgaagaacagtcaagtaaggttacctttgggaaccttaagtaaatcagaatgggaagctacaagtatttacttggtgtttgcctttgagaaacagcagtgagcacataggcagtagtcccagaggggccgtgttctgtcctgcacaaatttgaacaactcatctcgatatatttgatatttctctgtctgttgattttaattctaaatgtgcaggatgctgccagaaactccaatgtagaaattcaacatttgctgtctgtgacagatgaacttttgcatgtgtatataagaatgagttgggacctctgtctttaaaaatctatttttaggtaatgttctaagaattccatttgcctctatgatcttagctcataaaaatataatatgacttgataaagcaactaaactctttccacagtgttcagatttgtcctgtgtgtgtttacagtattcaatttattgcagttatagaattggtcagagagcattttcatagtgtgctcatttctatggttttgttatatagcatttttcaacatttaatggtctgtacagttgaatgtaagtgttcaatatgtattgctgaagttataagtttaaaactcaatttcagatgctcataaaagttacttagctaaaattttagcaatttattgcattttgaaataatcattaacatgctgcaattcaggagctggttagaacattttaagtggcagcatagaattttggaattttggggctttcttttcagaaattgctaccatagtaattaatgtttccagttatcaagattgtgattagacacatttacctttcttcattgaacaaatggtgccatagttatttttctcaaaatttagtgaaaatccctcccatgtagacatgttgcacattttttccaaatttatacatggaactgcagtaggaatattctcaccatctgatgccatgtacccacttcagaaataagcaatacttgttcctctgttacaacctcagcactttgcaccgtaggagccattgttaaagttgtcacttgtgtaactgactgcttttccaaaactggtacttatgtgaactgttgtccttgctttacaccaccatttggaaaacttaccagtttttagatgtagatgtagtgaaaaacttcaagaatgaagcagagcaattgagtattcttttttaaattattaagccatgatttacaaaaacattactttctgtaattcacaatacttgttttaaaaacatagtgtcttcattagtgtgcatctattaactgttcatggtgttagagttgcaaactttttagcaagaaaatatggatttcctcatttcagttccttctgcagcctgtgaatctccacaaagtgttaccagtttacaaaaataagtctttttgccttaagtcattttggaaataagtaatactgcatctgactctggtggctgtattagctaggaaaggtttgtaaatggtgtcagtgaggtggggaaaggaagtcttcctgtcacatatgcaggttcgttttcattctagggcagtgccaggaagtatattgatagctttgtaggtacaggaaaaacatcatcattatttcctctgttcacatttactggtcttaattaacaggtaataataatacatgtacttttagcctgaaacctcttccacgccatgggtaacttgggggagagaagaatcctccaaacgatggagtagccagtggtaatacaaagcagggagaacagaaaggtagagttactaaggccttcagtgaacagaaaggagcagagagcaagattagatctgagaagatgctctggggactgagcccactgttgttggtgtcagggaggcttactggagccacacctgcaggcgctgtgttcaggcaccaccttcctccttgagctttgcctgtctcttgccttatcagttcttcctccaccaccctacacccccctccccccggccccaagcccctgtgtctccttgttacaattaagtttctggatattgacttaagaactgttaggaagaggactagaaaaggcttcccctgcctatcctctccgatcaccaaggtggaagggagctagtaggactcttccttgacacaccttgtcgtctaaatgttcggtattctattcaggacttacggtaactattatgagggaggcatggctttccaccgtcgggccaggaagagcacctgttgctgcaagctcagtgaagtggggcactcccagacctgccatgcagtttatcctctgagaatggaattggaaatgaagacctaaccagctattggtgggaatgacggaactggggattgcgatgattgatctgggaacatggctggattgtgatttaaccaagaatgctgatgttgaattctttgggcctagaatatacttgagaaagcactagtggcttgtgttcagggagaggagctggcagtttttaaccacttctgtgggagccgtgttctaacctgtggaaagtattgcaattctgtgagagtgactctgcagagtcactgcaccatcaggcttggccctgctgtgccttcagtacccagccaggttctctgggtccagggtgactctccaaagaaattggccttcagctggagaaaacattgggtggagactctcacttatgttaatgcaatcttgaaatgactgaaaggtagattgccagcacagtgagtttcccagcctgctcccccatccacacttggaaattgagggagcatgaccgctctctgacttcacatgttaatagaggatcagagcagagttgggagtatattggtcaggatcatagaaaagaagacaaagcttgctcagccatgagatggccaggtatccagttttgttaactctctttgggaatttctttttcagcctgttttttagcttagtgccattatgtcattttgatttgtattcaagtactcttcaagtatctttgtaatgaaggtttggctacttgtataggtctgcctgcagggtgaaaatgccagtgtgaatattctagctaccaaacattgttttttgttgaaaaactgactttctgttgtctacctcaggccttgtgcatttgggttatctcaagccagtcaccacagagggtctctagggtctgcaaaatagaggccaaatccagggaccaggccctaataatagaagttgtaccaaaatgcctgtggtacttgatggcctgttggtcaaataggaagtacaagtgtgtgatgttagaacctccctagttgctgctatatcaaacactgcacacttgacaagtgttttcattccccgccctctgacagaacaacattcctaattctttgaaggcaaccagtgcaaaggctactacacttgtgtaatgatatttagcagatgcatacaggactggatcccagggcactgtcagttcttccctccctctcgtgctgctcagtttgtcctctgctcccatgtaggcctaaagtcaccccactccttagtgcctgcacctcaccacgatattgaggaagcacaggacatccaagggtactctccagtttggctgtggagacttgagcaagccctaaagtcccctgctccctggacttctcctgggttgtgcttttttgggggcaacataccttggacaaagctgagctgacagctaatgtttattagcctcctacctaagtcagtcactttgctaaattcttcacctgtggtaactcattttgattgttataacatctcagcaccgttattcccattttaatgatgaggaaactgagtcatagaggatacagacttgcccaaaggagagccaggattttcacaccccctcctcaagctgggcctgccctccaagtgcttgttatatacctccacgggtgtcagcccagatgactcctcacccatccaccacctgcagcttgagatgttaactattagagctccattcttttggttcaaaacgttgatacttacttagatgttccctgagaggagtgtttatttctgagtaaggggctttgttgaaagagggggttagagagagcaagacagcacttgagtgcactggcaggaagcagagataagacttgaatttcagtttggtagaccaccttctttagcagcccaacctgtagcaaatctagtttagcctgcatggcagggagagggattctcttcccaccctcaccatttgcaagtggcaggagctgagaatgccagtacgagagtgtagccaaagtgagaggctgagagcaaaggagacatttttttcagttttgagtcgagtatccagacagaggcaaatcattttgtttaactttttattaaagtgtaactatagaaacacatcaatgatttttcacaagtggagcacgtgcatacaatcggcaccccagaagccccccgtcagattcccttccagttaactacctctccaagggaaaccactatcctgagttctaagcgcatagattagttctgtctggtttggggagatatataaatggaattatgcattcttcgtatctggtttcttttcaccaatattatgtttgtgagatttttgttgcatgtatttgtacatggattttcattctcatggttgtataatatttcattgtgtgaataaaccacatactgtttatctg

SEQ ID NO: 26915 - DNA, 6250 bp, Homo sapiens
  source 1..6250: mol_type = unassigned DNA
agtgacgtaagcagacacgcgtggcgcgggccgccgtttccgcaaacagaatcgcgtttggctgtgctggatgtgtgaacctattgggtactgtacaacttcaagcctcgaaatcagataggcaccaccaacctcatttcctgtttcaccttgattttctgtgataccaaaatctcagcttcacaaagtcattgaaagtgttggttcatgaagttttaccatcaattcaagtaatcataaatggcaaattctgcaaaagcagaagaatatgaaaagatgtctcttgaacaggcaaaagcgtcagtgaattctgaaacagagtcttcattcaatattaatgaaaacacaacagcttctgggactgggctttctgaaaagacttctgtctgtaggcaagtagacatagcaagaaagagaaaagagtttgaagatgatcttgtaaaggaaagttctagttgtgggaaagacactccatccaagaagagaaaacttgatcctgaaattgtcccagaggaaaaagattgtggtgatgctgaaggcaattcaaagaaaagaaaaagagaaactgaggatgttccaaaagataaatcttctactggagatggcactcaaaataagagaaaaatagcacttgaggatgttcctgaaaagcagaaaaatctggaagaaggacacagctcaacagtggctgcccattacaatgaacttcaggaagttggtttggagaagcgtagtcaaagtcgtattttttacctaagaaactttaataattggatgaaaagtgttctcattggagaatttttggaaaaggtacgacagaagaaaaaacgtgatatcactgttttggacctgggatgtggtaaaggtggagatttgctgaaatggaaaaaaggaagaattaacaagctagtttgtactgatattgccgatgtttctgtcaaacagtgtcagcagcggtatgaggacatgaaaaatcgtcgtgatagtgaatatattttcagtgcagaatttataactgctgacagctcaaaggaacttctgattgacaaatttcgtgacccacaaatgtgttttgacatctgcagttgtcagtttgtctgtcattactcatttgagtcttatgagcaggctgacatgatgctgagaaatgcgtgtgagagacttagccctgggggctattttattggtactactcccaatagctttgaattgataagacgccttgaagcttcagaaacagaatcatttggaaatgaaatatatactgtgaaatttcagaagaaaggagattatcctttatttggctgcaaatatgacttcaacttggaaggtgttgtggatgttcctgaattcttggtctattttccattgctaaatgaaatggcaaagaagtacaatatgaaactagtctacaaaaaaacatttctggaattctacgaagaaaagattaagaacaatgaaaataaaatgctcttaaaacgaatgcaggccttggagccatatcctgcaaatgagagttctaaacttgtctctgagaaggtggatgactatgaacatgcagcaaagtacatgaagaacagtcaagtaaggttacctttgggaaccttaagtaaatcagaatgggaagctacaagtatttacttggtgtttgcctttgagaaacagcagtgagcacataggcagtagtcccagaggggccgtgttctgtcctgcacaaatttgaacaactcatctcgatatatttgatatttctctgtctgttgattttaattctaaatgtgcaggatgctgccagaaactccaatgtagaaattcaacatttgctgtctgtgacagatgaacttttgcatgtgtatataagaatgagttgggacctctgtctttaaaaatctatttttaggtaatgttctaagaattccatttgcctctatgatcttagctcataaaaatataatatgacttgataaagcaactaaactctttccacagtgttcagatttgtcctgtgtgtgtttacagtattcaatttattgcagttatagaattggtcagagagcattttcatagtgtgctcatttctatggttttgttatatagcatttttcaacatttaatggtctgtacagttgaatgtaagtgttcaatatgtattgctgaagttataagtttaaaactcaatttcagatgctcataaaagttacttagctaaaattttagcaatttattgcattttgaaataatcattaacatgctgcaattcaggagctggttagaacattttaagtggcagcatagaattttggaattttggggctttcttttcagaaattgctaccatagtaattaatgtttccagttatcaagattgtgattagacacatttacctttcttcattgaacaaatggtgccatagttatttttctcaaaatttagtgaaaatccctcccatgtagacatgttgcacattttttccaaatttatacatggaactgcagtaggaatattctcaccatctgatgccatgtacccacttcagaaataagcaatacttgttcctctgttacaacctcagcactttgcaccgtaggagccattgttaaagttgtcacttgtgtaactgactgcttttccaaaactggtacttatgtgaactgttgtccttgctttacaccaccatttggaaaacttaccagtttttagatgtagatgtagtgaaaaacttcaagaatgaagcagagcaattgagtattcttttttaaattattaagccatgatttacaaaaacattactttctgtaattcacaatacttgttttaaaaacatagtgtcttcattagtgtgcatctattaactgttcatggtgttagagttgcaaactttttagcaagaaaatatggatttcctcatttcagttccttctgcagcctgtgaatctccacaaagtgttaccagtttacaaaaataagtctttttgccttaagtcattttggaaataagtaatactgcatctgactctggtggctgtattagctaggaaaggtttgtaaatggtgtcagtgaggtggggaaaggaagtcttcctgtcacatatgcaggttcgttttcattctagggcagtgccaggaagtatattgatagctttgtaggtacaggaaaaacatcatcattatttcctctgttcacatttactggtcttaattaacaggtaataataatacatgtacttttagcctgaaacctcttccacgccatgggtaacttgggggagagaagaatcctccaaacgatggagtagccagtggtaatacaaagcagggagaacagaaaggtagagttactaaggccttcagtgaacagaaaggagcagagagcaagattagatctgagaagatgctctggggactgagcccactgttgttggtgtcagggaggcttactggagccacacctgcaggcgctgtgttcaggcaccaccttcctccttgagctttgcctgtctcttgccttatcagttcttcctccaccaccctacacccccctccccccggccccaagcccctgtgtctccttgttacaattaagtttctggatattgacttaagaactgttaggaagaggactagaaaaggcttcccctgcctatcctctccgatcaccaaggtggaagggagctagtaggactcttccttgacacaccttgtcgtctaaatgttcggtattctattcaggacttacggtaactattatgagggaggcatggctttccaccgtcgggccaggaagagcacctgttgctgcaagctcagtgaagtggggcactcccagacctgccatgcagtttatcctctgagaatggaattggaaatgaagacctaaccagctattggtgggaatgacggaactggggattgcgatgattgatctgggaacatggctggattgtgatttaaccaagaatgctgatgttgaattctttgggcctagaatatacttgagaaagcactagtggcttgtgttcagggagaggagctggcagtttttaaccacttctgtgggagccgtgttctaacctgtggaaagtattgcaattctgtgagagtgactctgcagagtcactgcaccatcaggcttggccctgctgtgccttcagtacccagccaggttctctgggtccagggtgactctccaaagaaattggccttcagctggagaaaacattgggtggagactctcacttatgttaatgcaatcttgaaatgactgaaaggtagattgccagcacagtgagtttcccagcctgctcccccatccacacttggaaattgagggagcatgaccgctctctgacttcacatgttaatagaggatcagagcagagttgggagtatattggtcaggatcatagaaaagaagacaaagcttgctcagccatgagatggccaggtatccagttttgttaactctctttgggaatttctttttcagcctgttttttagcttagtgccattatgtcattttgatttgtattcaagtactcttcaagtatctttgtaatgaaggtttggctacttgtataggtctgcctgcagggtgaaaatgccagtgtgaatattctagctaccaaacattgttttttgttgaaaaactgactttctgttgtctacctcaggccttgtgcatttgggttatctcaagccagtcaccacagagggtctctagggtctgcaaaatagaggccaaatccagggaccaggccctaataatagaagttgtaccaaaatgcctgtggtacttgatggcctgttggtcaaataggaagtacaagtgtgtgatgttagaacctccctagttgctgctatatcaaacactgcacacttgacaagtgttttcattccccgccctctgacagaacaacattcctaattctttgaaggcaaccagtgcaaaggctactacacttgtgtaatgatatttagcagatgcatacaggactggatcccagggcactgtcagttcttccctccctctcgtgctgctcagtttgtcctctgctcccatgtaggcctaaagtcaccccactccttagtgcctgcacctcaccacgatattgaggaagcacaggacatccaagggtactctccagtttggctgtggagacttgagcaagccctaaagtcccctgctccctggacttctcctgggttgtgcttttttgggggcaacataccttggacaaagctgagctgacagctaatgtttattagcctcctacctaagtcagtcactttgctaaattcttcacctgtggtaactcattttgattgttataacatctcagcaccgttattcccattttaatgatgaggaaactgagtcatagaggatacagacttgcccaaaggagagccaggattttcacaccccctcctcaagctgggcctgccctccaagtgcttgttatatacctccacgggtgtcagcccagatgactcctcacccatccaccacctgcagcttgagatgttaactattagagctccattcttttggttcaaaacgttgatacttacttagatgttccctgagaggagtgtttatttctgagtaaggggctttgttgaaagagggggttagagagagcaagacagcacttgagtgcactggcaggaagcagagataagacttgaatttcagtttggtagaccaccttctttagcagcccaacctgtagcaaatctagtttagcctgcatggcagggagagggattctcttcccaccctcaccatttgcaagtggcaggagctgagaatgccagtacgagagtgtagccaaagtgagaggctgagagcaaaggagacatttttttcagttttgagtcgagtatccagacagaggcaaatcattttgtttaactttttattaaagtgtaactatagaaacacatcaatgatttttcacaagtggagcacgtgcatacaatcggcaccccagaagccccccgtcagattcccttccagttaactacctctccaagggaaaccactatcctgagttctaagcgcatagattagttctgtctggtttggggagatatataaatggaattatgcattcttcgtatctggtttcttttcaccaatattatgtttgtgagatttttgttgcatgtatttgtacatggattttcattctcatggttgtataatatttcattgtgtgaataaaccacatactgtttatctgaca

SEQ ID NO: 26916 - DNA, 1343 bp, Homo sapiens
  source 1..1343: mol_type = unassigned DNA
gtaagcagacacgcgtggcgcgggccgccgtttccgcaaacagaatcgcgtttggctgtgctgaatctggaagaaggacacagctcaacagtggctgcccattacaatgaacttcaggaagttggtttggagaagcgtagtcaaagtcgtattttttacctaagaaactttaataattggatgaaaagtgttctcattggagaatttttggaaaaggtacgacagaagaaaaaacgtgatatcactgttttggacctgggatgtggtaaaggtggagatttgctgaaatggaaaaaaggaagaattaacaagctagtttgtactgatattgccgatgtttctgtcaaacagtgtcagcagcggtatgaggacatgaaaaatcgtcgtgatagtgaatatattttcagtgcagaatttataactgctgacagctcaaaggaacttctgattgacaaatttcgtgacccacaaatgtgttttgacatctgcagttgtcagtttgtctgtcattactcatttgagtcttatgagcaggctgacatgatgctgagaaatgcgtgtgagagacttagccctgggggctattttattggtactactcccaatagctttgaattgataagacgccttgaagcttcagaaacagaatcatttggaaatgaaatatatactgtgaaatttcagaagaaaggagattatcctttatttggctgcaaatatgacttcaacttggaaggtgttgtggatgttcctgaattcttggtctattttccattgctaaatgaaatggcaaagaagtacaatatgaaactagtctacaaaaaaacatttctggaattctacgaagaaaagattaagaacaatgaaaataaaatgctcttaaaacgaatgcaggccttggagccatatcctgcaaatgagagttctaaacttgtctctgagaaggtggatgactatgaacatgcagcaaagtacatgaagaacagtcaagtaaggttacctttgggaaccttaagtaaatcagaatgggaagctacaagtatttacttggtgtttgcctttgagaaacagcagtgagcacataggcagtagtcccagaggggccgtgttctgtcctgcacaaatttgaacaactcatctcgatatatttgatatttctctgtctgttgattttaattctaaatgtgcaggatgctgccagaaactccaatgtagaaattcaacatttgctgtctgtgacagatgaacttttgcatgtgtatataagaatgagttgggacctctgtctttaaaaatctatttttaggacttacggtaactattatgagggaggcatggctttc

SEQ ID NO: 26917 - DNA, 1825 bp, Homo sapiens
  source 1..1825: mol_type = unassigned DNA
gtggcgcgggccgccgtttccgcaaacagaatcgcgtttggctgtgctgtgttggttcatgaagttttaccatcaattcaagtaatcataaatggcaaattctgcaaaagcagaagaatatgaaaagatgtctcttgaacaggcaaaagcgtcagtgaattctgaaacagagtcttcattcaatattaatgaaaacacaacagcttctgggactgggctttctgaaaagacttctgtctgtaggcaagtagacatagcaagaaagagaaaagagtttgaagatgatcttgtaaaggaaagttctagttgtgggaaagacactccatccaagaagagaaaacttgatcctgaaattgtcccagaggaaaaagattgtggtgatgctgaaggcaattcaaagaaaagaaaaagagaaactgaggatgttccaaaagataaatcttctactggagatggcactcaaaataagagaaaaatagcacttgaggatgttcctgaaaagcagaaaaatctggaagaaggacacagctcaacagtggctgcccattacaatgaacttcaggaagttggtttggagaagcgtagtcaaagtcgtattttttacctaagaaactttaataattggatgaaaagtgttctcattggagaatttttggaaaaggtacgacagaagaaaaaacgtgatatcactgttttggacctgggatgtggtaaaggtggagatttgctgaaatggaaaaaaggaagaattaacaagctagtttgtactgatattgccgatgtttctgtcaaacagtgtcagcagcggtatgaggacatgaaaaatcgtcgtgatagtgaatatattttcagtgcagaatttataactgctgacagctcaaaggaacttctgattgacaaatttcgtgacccacaaatgtgttttgacatctgcagttgtcagtttgtctgtcattactcatttgagtcttatgagcaggctgacatgatgctgagaaatgcgtgtgagagacttagccctgggggctattttattggtactactcccaatagctttgaattgataagacgccttgaagcttcagaaacagaatcatttggaaatgaaatatatactgtgaaatttcagaagaaaggagattatcctttatttggctgcaaatatgacttcaacttggaaggtgttgtggatgttcctgaattcttggtctattttccattgctaaatgaaatggcaaagaagtacaatatgaaactagtctacaaaaaaacatttctggaattctacgaagaaaagattaagaacaatgaaaataaaatgctcttaaaacgaatgcaggccttggagccatatcctgcaaatgagagttctaaacttgtctctgagaaggtggatgactatgaacatgcagcaaagtacatgaagaacagtcaagtaaggttacctttgggaaccttaagtaaatcagaatgggaagctacaagtatttacttggtgtttgcctttgagaaacagcagtgagcacataggcagtagtcccagaggggccgtgttctgtcctgcacaaatttgaacaactcatctcgatatatttgatatttctctgtctgttgattttaattctaaatgtgcaggatgctgccagaaactccaatgtagaaattcaacatttgctgtctgtgacagatgaacttttgcatgtgtatataagaatgagttgggacctctgtctttaaaaatctatttttaggtaatgttctaagaattccatttgcctctatgatcttagctcataaaaatataatatgacttgataaagcaact

SEQ ID NO: 26918 - DNA, 939 bp, Homo sapiens
  source 1..939: mol_type = unassigned DNA
gcgggccgccgtttccgcaaacagaatcgcgtttggctgtgctgaatctggaagaaggacacagctcaacagtggctgcccattacaatgaacttcaggaagttggtttggagaagcgtagtcaaagtcgtattttttacctaagaaactttaataattggatgaaaagtgttctcattggagaatttttggaaaaggtacgacagaagaaaaaacgtgatatcactgttttggacctgggatgtggtaaaggtggagatttgctgaaatggaaaaaaggaagaattaacaagctagtttgtactgatattgccgatgtttctgtcaaacagtgtcagcagcggtatgaggacatgaaaaatcgtcgtgatagtgaatatattttcagtgcagaatttataactgctgacagctcaaaggaacttctgattgacaaatttcgtgacccacaaatgtgttttgacatctgcagttgtcagtttgtctgtcattactcatttgagtcttatgagcaggctgacatgatgctgagaaatgcctgtggtacttgatggcctgttggtcaaataggaagtacaagtgtgtgatgttagaacctccctagttgctgctatatcaaacactgcacacttgacaagtgttttcattccccgccctctgacagaacaacattcctaattctttgaaggcaaccagtgcaaaggctactacacttgtgtaatgatatttagcagatgcatacaggactggatcccagggcactgtcagttcttccctccctctcgtgctgctcagtttgtcctctgctcccatgtaggcctaaagtcaccccactccttagtgcctgcacctcaccacgatattgaggaagcacaggacatccaagggtactctccagtttggctgtggagacttgagcaagccctaaagtcccctgct

SEQ ID NO: 26919 - DNA, 1884 bp, Homo sapiens
  source 1..1884: mol_type = unassigned DNA
tggttgacctgccttgggcttaggtagtagagtctgcagacctgtgggcctggcccggagaggacctcgtgagtcttctgacatggactctgaagcctcaaaccaagagaggtgtctgtctagccctgatagtcgggcagcttagaggagtggggaggagaactcagcctgagttcagtcaagatgtaagtagtagcaaggggaacatggtgcattcaggtcattttgtgtgggattctatagctcctgatgaagccattctggggtaaaggagcttattctggaacatggcacccagaacctggtgcccagcaggaatttttggcctcttttgcccacttacccttgcctgctcttccctcaccattgccctgactgactgccaacccatcatccttgtgtctcccacacttagtctctggatggtcgtcagatccgtgtggatcatgcaggcaagtctgctcggggaaccagaggaggtggctttggggcccatgggcgtggtcgcagctactctagaggtggtggggaccagggctatgggagtggcaggtattatgacagtcgacctggagggtatggatatggatatggacgttccagagactataatggcagaaaccagggtggttatgaccgctactcaggaggaaattacagagacaattatgacaactgaaatgagacatgcacataatataggtgagacttggatatcggcattgagtgaacctgtttgtcacactctgtcatgaccctctcaccttttctggcaagactgctctgcatttctgctgccctcatacctcacccagccaacctaccaaacattcctagctaggccttccttgctctcaggtgcatatcagagcaagtttgctagggggtgggatctgaaaacccatctcctataatcttctactcttgtgtgggatggaggaaatgaaggtgtgtccctgttgtccaaccctcagcatcttcatcagctctaggaggtgagcatgttgtcagctgttacttcatgacatcacaattctccccctcttgctgttcccagatacacaaggaataatttctgatccaggatcgtccttccaaatggctgtatttataaaggtttttggagctgcaccgaagcatcttattttatagtatatcaaccttttgtttttaaattgacctgccaaggtagctgaagaccttttagacagttccatctttttttttaaattttttctgcctatttaaagacaaattatgggacgtttgtagaacctgagtatttttctttttaccagttttttagtttgagctcttaggtttattggagctagcaataattggttctggcaagtttggccagactgacttcaaaaaattaatgtgtatccagggacattttaaaaacctgtacacagtgtttattgtggttaggaagcaatttcccaatgtacctataagaaatgtgcatcaagccagcctgaccaacatggtgaaaccccatctgtactaaacataaaaaaattagcctggcatggtggtgtacgcctgtaatcccagtgacttgggaggctgaggcaggagaatcgcttgaacccgggaggcggaggttgcagtgagctaagatcgcgccactgtactccagcctgggcaacagcgagactccatctcaaaaaaaaaggaaatgtgtatcaagaacatgattatccagcggtattttctaattcagatcatcaaactgattatatagaagagttggctttaaaatgtttgcaaatgtctttttttttttaatactggaagaaaaaatattctgttgtgtctcatacagtgcttaggatgtctttcacagagcttattaaaaagatgaaacctgagaacaaa

SEQ ID NO: 26920 - DNA, 1130 bp, Homo sapiens
  source 1..1130: mol_type = unassigned DNA
atgcgcaatgtggccccctaatggtggctgcgctgagccagctcctcagattaccaccttattggccgcctttctcagcttttctgtagttacccatattttgttcctctttcttgtctattttctgtgctttttctctgctttccgtctcgctattttctcacatctccattttctttctccttcctgccaccattcttcatgttcttcccacaggacttgaactgccatgtcctctgaagaaggaaagctcttcgtgggagggctcaactttaacaccgacgagcaggcactggaagaccacttcagcagtttcggacctatctctgaggtggtcgttgtcaaggaccgggagactcagcggtccaggggttttggtttcatcaccttcaccaacccagagcatgcttcagttgccatgagagccatgaacggagagtctctggatggtcgtcagatccgtgtggatcatgcaggcaagtctgctcggggaaccagaggaggtggctttggggcccatgggcgtggtcgcagctactctagaggtggtggggaccagggctatgggagtggcaggtattatgacagtcgacctggagggtatggatatggatatggacgttccagagactataatggcagaaaccagggtggttatgaccgctactcaggaggaaattacagagacaattatgacaactgaaatgagacatgcacataatatagatacacaaggaataatttctgatccaggatcgtccttccaaatggctgtatttataaaggtttttggagctgcaccgaagcatcttattttatagtatatcaaccttttgtttttaaattgacctgccaaggtagctgaagaccttttagacagttccatctttttttttaaattttttctgcctatttaaagacaaattatgggacgtttgtagaacctgagtatttttctttttaccagttttttagtttgagctcttaggtttattggagctagcaataattggttctggcaagtttggccagactgacttcaaaaaattaatgtgtatccagggacattttaaaaacctgtacacagtgtttattgtggttaggaagcaatttcccaatgtacctataag

SEQ ID NO: 26921 - DNA, 2162 bp, Homo sapiens
  source 1..2162: mol_type = unassigned DNA
gctcctccgagctcgctgttcgtccgggttttttacgttttaatttccaggacttgaactgccatgtcctctgaagaaggaaagctcttcgtgggagggctcaactttaacaccgacgagcaggcactggaagaccacttcagcagtttcggacctatctctgaggtggtcgttgtcaaggaccgggagactcagcggtccaggggttttggtttcatcaccttcaccaacccagagcatgcttcagttgccatgagagccatgaacggagagtctctggatggtcgtcagatccgtgtggatcatgcaggcaagtctgctcggggaaccagaggaggtggctttggggcccatgggcgtggtcgcagctactctagaggtggtggggaccagggctatgggagtggcaggtattatgacagtcgacctggagggtatggatatggatatggacgttccagagactataatggcagaaaccagggtggttatgaccgctactcaggaggaaattacagagacaattatgacaactgaaatgagacatgcacataatatagatacacaaggaataatttctgatccaggatcgtccttccaaatggctgtatttataaaggtttttggagctgcaccgaagcatcttattttatagtatatcaaccttttgtttttaaattgacctgccaaggtagctgaagaccttttagacagttccatctttttttttaaattttttctgcctatttaaagacaaattatgggacgtttgtagaacctgagtatttttctttttaccagttttttagtttgagctcttaggtttattggagctagcaataattggttctggcaagtttggccagactgacttcaaaaaattaatgtgtatccagggacattttaaaaacctgtacacagtgtttattgtggttaggaagcaatttcccaatgtacctataagaaatgtgcatcaagccagcctgaccaacatggtgaaaccccatctgtactaaacataaaaaaattagcctggcatggtggtgtacgcctgtaatcccagtgacttgggaggctgaggcaggagaatcgcttgaacccgggaggcggaggttgcagtgagctaagatcgcgccactgtactccagcctgggcaacagcgagactccatctcaaaaaaaaaggaaatgtgtatcaagaacatgattatccagcggtattttctaattcagatcatcaaactgattatatagaagagttggctttaaaatgtttgcaaatgtctttttttttttaatactggaagaaaaaatattctgttgtgtctcatacagtgcttaggatgtctttcacagagcttattaaaaagatgaaacctgagaacaaactgctttattcttactcagcccattttgcaaattaaaagtgggggcagaggtgggcggatcacctgaggtcaggagttcgagaccagcctggccaacagggcaaaaccccatctctactaaaaatacaaaagttagcggggcgtggtggcgggtgcatgtaatcccagctactcgggaggctgaggcaggagaattgcttgaacccaggaggcggaagttgcagtgagctgagattgtgccactgcactccagcctaggtgacagcaagactctgtctcaaaaaaaaaaaaatggcacatcaacgagagggaggcttggagaatatttggttggtgggtgggcagggactgccagagggttaggtgtacattgaggcctgaggcctgctggaattgggtttccttaactggtctcttatcttagtcccattgttctgagaacataagcacctaatctcatggcgtgagctaatccctatcataaatagtggtaccagttcattccttcccctgaaatgatgggggttgggcagagatgcactgaactcatctttgtgtatgagggccatgagagaggcctggtttgaaaacaatgctaagagctcagattccaggatttatgtaggggctcttctacttcccaggtatttgacctcaggtgagtcatttaatttcagccttatgccattttacattttctgtggagggttaggttaattggcatataaagccactgagaagagttggcaaagctctcagtcacggggatttgatc

SEQ ID NO: 26922 - DNA, 2011 bp, Homo sapiens
  source 1..2011: mol_type = unassigned DNA
gctgttcgtccgggttttttacgttttaatttccaggacttgaactgccatgtcctctgaagaaggaaagctcttcgtgggagggctcaactttaacaccgacgagcaggcactggaagaccacttcagcagtttcggacctatctctgaggtggtcgttgtcaaggaccgggagactcagcggtccaggggttttggtttcatcaccttcaccaacccagagcatgcttcagttgccatgagagccatgaacggagaggtggggcctcctatctgcagagggaccttgtccccatctgcggcttccttcattctttttgtttttccctctgtgtctgctcggggcagcgtggccaccaagccccgcagtgcccactcacaggagcatgactgccttttgttctagggggtggagggcagcggcagacagagcctggccgcctgggaggcgacgactggtcctgcatgaggccgagaagccacctgtggatggttgacctgccttgggcttaggtagtagagtctgcagacctgtgggcctggcccggagaggacctcgtgagtcttctgacatggactctgaagcctcaaaccaagagaggtgtctgtctagccctgatagtcgggcagcttagaggagtggggaggagaactcagcctgagttcagtcaagatgtaagtagtagcaaggggaacatggtgcattcaggtcattttgtgtgggattctatagctcctgatgaagccattctggggtaaaggagcttattctggaacatggcacccagaacctggtgcccagcaggaatttttggcctcttttgcccacttacccttgcctgctcttccctcaccattgccctgactgactgccaacccatcatccttgtgtctcccacacttagtctctggatggtcgtcagatccgtgtggatcatgcaggcaagtctgctcggggaaccagaggaggtggctttggggcccatgggcgtggtcgcagctactctagaggtggtggggaccagggctatgggagtggcaggtattatgacagtcgacctggagggtatggatatggatatggacgttccagagactataatggcagaaaccagggtggttatgaccgctactcaggaggaaattacagagacaattatgacaactgaaatgagacatgcacataatatagatacacaaggaataatttctgatccaggatcgtccttccaaatggctgtatttataaaggtttttggagctgcaccgaagcatcttattttatagtatatcaaccttttgtttttaaattgacctgccaaggtagctgaagaccttttagacagttccatctttttttttaaattttttctgcctatttaaagacaaattatgggacgtttgtagaacctgagtatttttctttttaccagttttttagtttgagctcttaggtttattggagctagcaataattggttctggcaagtttggccagactgacttcaaaaaattaatgtgtatccagggacattttaaaaacctgtacacagtgtttattgtggttaggaagcaatttcccaatgtacctataagaaatgtgcatcaagccagcctgaccaacatggtgaaaccccatctgtactaaacataaaaaaattagcctggcatggtggtgtacgcctgtaatcccagtgacttgggaggctgaggcaggagaatcgcttgaacccgggaggcggaggttgcagtgagctaagatcgcgccactgtactccagcctgggcaacagcgagactccatctcaaaaaaaaaggaaatgtgtatcaagaacatgattatccagcggtattttctaattcagatcatcaaactgattatatagaagagttggctttaaaatgtttgcaaatgtctttttttttttaatactggaagaaaaaatattctgttgtgtctcatacagtgcttaggatgtctttcacagagcttattaaaaagatgaaacctg

SEQ ID NO: 26923 - DNA, 3151 bp, Homo sapiens
  source 1..3151: mol_type = unassigned DNA
ggtggtcggagcgccgactcccttctcgtcgtcgccattttgagctggtgactgtggccggctgggagtaggcggcagtgagtttccctgggagggcagcgcgcttggcgcttctcccctccccccgatctgcctccagtctcggacttggttgttgcgcgctccggctccggctgagctgggagagttggaggaggtggcggcgggcagaggtgatgtctgggagcccttccttgacagcccgggccgagaagagtccctgcaggaagcatcacccaggctggcagatcatggtagcagcagcgggggtggctgggaagtgaaacggagccagcggctgaggaggggccccagcagcccccgaaggccctatcaggacatggagtatgaaagacgtggtggtcgtggtgacaggactggccgctatggagccactgaccgctcgcaggatgatggtggggagaaccgcagccgagaccacgactaccgggacatggactaccgttcatatcctcgcgagtatggcagccaggagggcaagcatgactatgacgactcatctgaggagcagagtgcggagatccgtggccagctgcagtcgcacggcgtgcaagcacgggaggttcggctgatgcggaacaaatcttcaggtcagagccggggcttcgccttcgtcgagtttagtcacttgcaggacgctacacgatggatggaagccaatcagcactccctcaacatcctgggccagaaggtgtcgatgcactacagtgaccccaagcccaagatcaatgaggactggctgtgcaataagtgtggcgtccagaacttcaaacgccgagagaagtgcttcaaatgtggcgtgcccaagtcagaggcagagcagaagctgcccctcggcacgaggctggatcagcagacactgccactgggtggccgggagctgagccagggcctgcttcccctgccgcagccctaccaggcccagggagtcctggcctcccaagccctgtcacagggctcggagccaagctcagagaacgccaatgacaccatcattttgcgcaacctgaacccacacagcaccatggattccatcctgggggccctggcaccctacgcggtgctgtcctcctccaacgtgcgcgtcataaaggacaagcagacccaactgaaccgcggctttgccttcatccagctctccaccatcgaggcagcccagctgctgcagatcctgcaggccctgcacccaccactcactatcgacggcaagaccatcaatgttgagtttgccaagggttctaagagggacatggcctccaatgaaggcagtcgcatcagtgctgcctctgtggccagcactgccattgctgcggcccagtgggccatctcacaggcctcccaaggtggggagggtacctgggccacctccgaggagccgccggtcgactacagctactaccaacaggatgagggctatggcaacagccagggcacagagtcttccctctatgcccatggctacctcaagggcaccaagggccctggcatcactggaaccaaaggggatcccactggagcaggtcccgaggcctccctagagcctggggccgactctgtgtcgatgcaggctttctctcgcgcccagcctggtgctgctcctggcatctaccaacaatcagccgaggcgagcagtagccagggcactgctgccaacagccagtcgtataccatcatgtcacccgctgtgctcaaatctgagctccagagccctacccatcctagttctgctctcccaccggctaccagccccactgcccaggaatcctacagccagtaccctgttcccgacgtctctacctaccagtacgatgagacctccggctactactatgacccccagaccggcctctactatgaccccaactcccagtattactacaatgctcagagccagcagtacctgtactgggatggggagaggcggacctatgttcccgccctggagcagtcggccgacggacataaggagacaggggcaccctcgaaggagggcaaagagaagaaggagaagcacaagaccaagacagctcaacagattgccaaggacatggaacgctgggcccgcagtctcaacaaacaaaaagaaaacttcaaaaatagcttccagcctatcagctccctgcgagatgacgagaggcgggagtcagccactgcagatgctggctatgccatcctcgagaagaagggagcactagccgagagacagcacaccagcatggatctcccgaaattggccagtgacgaccgcccaagccctccgcgaggactggtggcagcctacagcggggagagtgacagtgaggaggagcaggagcgtgggggccctgagcgggaggagaagctcaccgactggcagaagctggcctgtctgctctgccgacgccagttccccagcaaagaggcgctcatccggcaccagcagctctcagggctccacaagcaaaaccttgagattcaccggcgagcccacttgtcagaaaacgagctagaagcactagagaagaatgacatggagcaaatgaagtaccgggaccgtgcagctgaacgcagagaaaagtatggcatccccgagccgccagagcccaagaggaggaagtacggcggcatatccacagcctctgtagacttcgagcagcctactcgggacgggctgggcagtgacaacattggcagtcggatgctgcaggccatgggctggaaagagggcagcggcctgggccgcaagaagcagggcattgtaacgcctatcgaggcccaaacacgggtgcggggctccggcctgggtgcacggggcagctcctacggggtcacctcaaccgagtcctacaaggagacactgcacaagacaatggtgacccgcttcaacgaggcccagtgagcagcttcaagagcaacttctccacatgttgggtgtccatcctggggcagggaaggacagagtgttggatggctgggacggggccttgctcttgtcggccagcccactccccagccagagagggcttgaccaaatcaaattgaggtggtgacttttgttggaaaattgggctgggatcacgtcctgttttgtaataaaagctgaaaagtctgc

SEQ ID NO: 26924 - DNA, 3108 bp, Homo sapiens
  source 1..3108: mol_type = unassigned DNA
gtgactgtggccggctgggagtaggcggcagtgagtttccctgggagggcagcgcgcttggcgcttctcccctccccccgatctgcctccagtctcggacttggttgttgcgcgctccggctccggctgagctgggagagttggaggaggtggcggcgggcagaggtgatgtctgggagcccttccttgacagcccgggccgagaagagtccctgcaggaagcatcacccaggctggcagatcatggtagcagcagcgggggtggctgggaagtgaaacggagccagcggctgaggaggggccccagcagcccccgaaggccctatcaggacatggagtatgaaagacgtggtggtcgtggtgacaggactggccgctatggagccactgaccgctcgcaggatgatggtggggagaaccgcagccgagaccacgactaccgggacatggactaccgttcatatcctcgcgagtatggcagccaggagggcaagcatgactatgacgactcatctgaggagcagagtgcggagatccgtggccagctgcagtcgcacggcgtgcaagcacgggaggttcggctgatgcggaacaaatcttcaggtcagagccggggcttcgccttcgtcgagtttagtcacttgcaggacgctacacgatggatggaagccaatcagcactccctcaacatcctgggccagaaggtgtcgatgcactacagtgaccccaagcccaagatcaatgaggactggctgtgcaataagtgtggcgtccagaacttcaaacgccgagagaagtgcttcaaatgtggcgtgcccaagtcagaggcagagcagaagctgcccctcggcacgaggctggatcagcagacactgccactgggtggccgggagctgagccagggcctgcttcccctgccgcagccctaccaggcccagggagtcctggcctcccaagccctgtcacagggctcggagccaagctcagagaacgccaatgacaccatcattttgcgcaacctgaacccacacagcaccatggattccatcctgggggccctggcaccctacgcggtgctgtcctcctccaacgtgcgcgtcataaaggacaagcagacccaactgaaccgcggctttgccttcatccagctctccaccatcgtggaggcagcccagctgctgcagatcctgcaggccctgcacccaccactcactatcgacggcaagaccatcaatgttgagtttgccaagggttctaagagggacatggcctccaatgaaggcagtcgcatcagtgctgcctctgtggccagcactgccattgctgcggcccagtgggccatctcacaggcctcccaaggtggggagggtacctgggccacctccgaggagccgccggtcgactacagctactaccaacaggatgagggctatggcaacagccagggcacagagtcttccctctatgcccatggctacctcaagggcaccaagggccctggcatcactggaaccaaaggggatcccactggagcaggtcccgaggcctccctagagcctggggccgactctgtgtcgatgcaggctttctctcgcgcccagcctggtgctgctcctggcatctaccaacaatcagccgaggcgagcagtagccagggcactgctgccaacagccagtcgtataccatcatgtcacccgctgtgctcaaatctgagctccagagccctacccatcctagttctgctctcccaccggctaccagccccactgcccaggaatcctacagccagtaccctgttcccgacgtctctacctaccagtacgatgagacctccggctactactatgacccccagaccggcctctactatgaccccaactcccagtattactacaatgctcagagccagcagtacctgtactgggatggggagaggcggacctatgttcccgccctggagcagtcggccgacggacataaggagacaggggcaccctcgaaggagggcaaagagaagaaggagaagcacaagaccaagacagctcaacagattgccaaggacatggaacgctgggcccgcagtctcaacaaacaaaaagaaaacttcaaaaatagcttccagcctatcagctccctgcgagatgacgagaggcgggagtcagccactgcagatgctggctatgccatcctcgagaagaagggagcactagccgagagacagcacaccagcatggatctcccgaaattggccagtgacgaccgcccaagccctccgcgaggactggtggcagcctacagcggggagagtgacagtgaggaggagcaggagcgtgggggccctgagcgggaggagaagctcaccgactggcagaagctggcctgtctgctctgccgacgccagttccccagcaaagaggcgctcatccggcaccagcagctctcagggctccacaagcaaaaccttgagattcaccggcgagcccacttgtcagaaaacgagctagaagcactagagaagaatgacatggagcaaatgaagtaccgggaccgtgcagctgaacgcagagaaaagtatggcatccccgagccgccagagcccaagaggaggaagtacggcggcatatccacagcctctgtagacttcgagcagcctactcgggacgggctgggcagtgacaacattggcagtcggatgctgcaggccatgggctggaaagagggcagcggcctgggccgcaagaagcagggcattgtaacgcctatcgaggcccaaacacgggtgcggggctccggcctgggtgcacggggcagctcctacggggtcacctcaaccgagtcctacaaggagacactgcacaagacaatggtgacccgcttcaacgaggcccagtgagcagcttcaagagcaacttctccacatgttgggtgtccatcctggggcagggaaggacagagtgttggatggctgggacggggccttgctcttgtcggccagcccactccccagccagagagggcttgaccaaatcaaattgaggtggtgacttttgttggaaaattgggctgggatcacgtcctgttttgtaataaaagctgaaaagtctgca

SEQ ID NO: 26925 - DNA, 3747 bp, Homo sapiens
  source 1..3747: mol_type = unassigned DNA
gccaaccattttcggccaggctgagaaatttcttattgatgggtctgctcatttcctgcataggaagaaatcggtgacatttgggtggatacagttcccagccaatcgccccgagttccctcgcccactggggaaagaggcagagcttccgctagtctttcatcttcaaaggaaatcaagcttctaaaaagcgggccctgccgaattggctaatagctactccttttctccactaggggagcgttcgcaaggggtgtggggaggtggccagcgcttgccaatcagaggaggccagggctgtcccctagcgggcggtgaccaatcgccggggccggccagagcgcgcttccttagtaggtggatggtggtcggagcgccgactcccttctcgtcgtcgccattttgagctggtgactgtggccggctgggagtaggcggcagtgagtttccctgggagggcagcgcgcttggcgcttctcccctccccccgatctgcctccagtctcggacttggttgttgcgcgctccggctccggctgagctgggagagttggaggaggtggcggcgggcagaggtgatgtctgggagcccttccttgacagcccgggccgagaagagtccctgcaggaagcatcacccaggctggcagatcatggtagcagcagcgggggtggctgggaagtgaaacggagccagcggctgaggaggggccccagcagcccccgaaggccctatcaggacatggagtatgaaagacgtggtggtcgtggtgacaggactggccgctatggagccactgaccgctcgcaggatgatggtggggagaaccgcagccgagaccacgactaccgggacatggactaccgttcatatcctcgcgagtatggcagccaggagggcaagcatgactatgacgactcatctgaggagcagagtgcggaggattcctacgaggcctccccgggctccgagactcagcgtaggcggcggcggcggcacaggcacagccccaccggcccgccaggcttcccccgagacggcgactatcgggaccaggactatcggaccgagcaaggggaggaggaggaggaggaggaggatgaggaggaggaggagaaggccagtaacatcgtcatgctgaggatgctgccacaggcagccactgaggatgacatccgtggccagctgcagtcgcacggcgtgcaagcacgggaggttcggctgatgcggaacaaatcttcaggtcagagccggggcttcgccttcgtcgagtttagtcacttgcaggacgctacacgatggatggaagccaatcagcactccctcaacatcctgggccagaaggtgtcgatgcactacagtgaccccaagcccaagatcaatgaggactggctgtgcaataagtgtggcgtccagaacttcaaacgccgagagaagtgcttcaaatgtggcgtgcccaagtcagaggcagagcagaagctgcccctcggcacgaggctggatcagcagacactgccactgggtggccgggagctgagccagggcctgcttcccctgccgcagccctaccaggcccagggagtcctggcctcccaagccctgtcacagggctcggagccaagctcagagaacgccaatgacaccatcattttgcgcaacctgaacccacacagcaccatggattccatcctgggggccctggcaccctacgcggtgctgtcctcctccaacgtgcgcgtcataaaggacaagcagacccaactgaaccgcggctttgccttcatccagctctccaccatcgtggaggcagcccagctgctgcagatcctgcaggccctgcacccaccactcactatcgacggcaagaccatcaatgttgagtttgccaagggttctaagagggacatggcctccaatgaaggcagtcgcatcagtgctgcctctgtggccagcactgccattgctgcggcccagtgggccatctcacaggcctcccaaggtggggagggtacctgggccacctccgaggagccgccggtcgactacagctactaccaacaggatgagggctatggcaacagccagggcacagagtcttccctctatgcccatggctacctcaagggcaccaagggccctggcatcactggaaccaaaggggatcccactggagcaggtcccgaggcctccctagagcctggggccgactctgtgtcgatgcaggctttctctcgcgcccagcctggtgctgctcctggcatctaccaacaatcagccgaggcgagcagtagccagggcactgctgccaacagccagtcgtataccatcatgtcacccgctgtgctcaaatctgagctccagagccctacccatcctagttctgctctcccaccggctaccagccccactgcccaggaatcctacagccagtaccctgttcccgacgtctctacctaccagtacgatgagacctccggctactactatgacccccagaccggcctctactatgaccccaactcccagtattactacaatgctcagagccagcagtacctgtactgggatggggagaggcggacctatgttcccgccctggagcagtcggccgacggacataaggagacaggggcaccctcgaaggagggcaaagagaagaaggagaagcacaagaccaagacagctcaacagattgccaaggacatggaacgctgggcccgcagtctcaacaaacaaaaagaaaacttcaaaaatagcttccagcctatcagctccctgcgagatgacgagaggcgggagtcagccactgcagatgctggctatgccatcctcgagaagaagggagcactagccgagagacagcacaccagcatggatctcccgaaattggccagtgacgaccgcccaagccctccgcgaggactggtggcagcctacagcggggagagtgacagtgaggaggagcaggagcgtgggggccctgagcgggaggagaagctcaccgactggcagaagctggcctgtctgctctgccgacgccagttccccagcaaagaggcgctcatccggcaccagcagctctcagggctccacaagcaaaaccttgagattcaccggcgagcccacttgtcagaaaacgagctagaagcactagagaagaatgacatggagcaaatgaagtaccgggaccgtgcagctgaacgcagagaaaagtatggcatccccgagccgccagagcccaagaggaggaagtacggcggcatatccacagcctctgtagacttcgagcagcctactcgggacgggctgggcagtgacaacattggcagtcggatgctgcaggccatgggctggaaagagggcagcggcctgggccgcaagaagcagggcattgtaacgcctatcgaggcccaaacacgggtgcggggctccggcctgggtgcacggggcagctcctacggggtcacctcaaccgagtcctacaaggagacactgcacaagacaatggtgacccgcttcaacgaggcccagtgagcagcttcaagagcaacttctccacatgttgggtgtccatcctggggcagggaaggacagagtgttggatggctgggacggggccttgctcttgtcggccagcccactccccagccagagagggcttgaccaaatcaaattgaggtggtgacttttgttggaaaattgggctgggatcacgtcctgttttgtaataaaagctgaaaagtctg

SEQ ID NO: 26926 - DNA, 2828 bp, Homo sapiens
  source 1..2828: mol_type = unassigned DNA
attggctaggccagggcgcctgcgcggcggggttctcggtcgccagccattcctgaggaggactgccggtcgttcggacgtcttgcctgtcgctggaggagaggtccgggctctccaggaaggtggctgcggcgacaaaatgaagatattcgtgggcaacgtcgacggggcggatacgactccggaggagctggcagccctctttgcgccctacggcacggtcatgagctgcgccgtcatgaaacagttcgccttcgtgcacatgcgcgagaacgcgggcgcgctgcgcgccatcgaagccctgcacggccacgagctgcggccggggcgcgcgctcgtggtggagatgtcgcgcccaaggcctcttaatacttggaagattttcgtgggcaatgtgtcggctgcatgcacgagccaggaactgcgcagcctcttcgagcgccgcggacgcgtcatcgagtgtgacgtggtgaaagactacgcgtttgttcacatggagaaggaagcagatgccaaagccgcaatcgcgcagctcaacggcaaagaagtgaagggcaagcgcatcaacgtggaactctccaccaagggtcagaagaaggggcctggcctggctgtccagtctggggacaagaccaagaaaccaggggctggggatacggccttccctggaactggtggcttctctgccaccttcgactaccagcaggcttttggcaacagcactggtggctttgatgggcaagcccgtcagcccacaccacccttctttggtcgcgaccgcagccctctgcgccgttcacctccccgagcctcttatgtggctcctctgacggcccagccagctacctaccgggcccagccgtccgtgtcactgggagctgcctacagggcccagccttctgcctctttgggtgttggctatcggactcagcccatgacagcccaggcagcctcttaccgcgctcagccctctgtctcccttggggcaccatacaggggccagctggctagtcctagctcccagtctgctgcagcttcttcactcggcccatatggtggagcccagccctcagcctcggccctttcctcctatgggggtcaggcagctgcagcttcttcgctcaactcctatggggctcagggttcctcccttgcctcctatggtaaccagccatcctcttacggcgcccaggctgcctcttcctatggggttcgtgcagctgcttcttcctacaacacccagggagcagcttcctccttaggctcctacggggctcaggcagcctcctatggggcccagtctgcagcctcctcactagcttatggagcccaggcagcttcatataatgcccagccctcggcctcttacaatgcccagtctgccccatatgctgcacagcaggctgcttcctactcttcccaacctgctgcctatgtggcacagccagccacagctgctgcctatgccagccagccagcagcctacgccgcacaagccactaccccaatggctggctcctatggggcccagccggttgtgcagacccagctgaatagttacggggcccaagcatcaatgggcctttcaggctcctatggggctcagtcggctgctgcggccactggctcctatggtgccgcagcagcctacggggcccaaccttctgccaccctggcagctccttaccgcactcagtcatcagcctcattggctgcttcctatgctgcccagcagcatccccaggctgctgcctcctaccgcggccagccaggcaatgcctacgatggggcaggtcagccgtctgcagcctacctgtccatgtcccagggggccgttgccaacgccaacagcaccccgccgccctatgagcgtacccgcctctccccaccccgggccagctacgacgatccctacaaaaaggctgtcgccatgtcgaaaaggtatggttccgaccggcgtttagccgagctctctgattaccgccgtttatcagagtcgcagctttcgttccgccgctcgccgacaaagtcctcgctggattaccgtcgcctgcccgatgcccattccgattacgcacgctattcgggctcctataatgattacctgcgggcggctcagatgcactctggctaccagcgccgcatgtagggccatcctgggatggggcaccacagggagggagggagaaaagaggtgggtagggttacagatccaggttataactactctggcccatacctttcctggttgtggtttttcatgccctctaccatgtgggccttccccaggagatgatcctgttaagtgttcggcagtaacctactttgttccttcgcctcagcagcaaatcttgctactggctctagatctgcggtttcccctctaccctgcctcccgtctccccagaatgggaatttcttttatgtttttatttttttcctggctcccttttatttttgtgcgcgatatttaaggtcgtctggatggggaagcaacctgcagctgaggtcgccggcgcctttttctttttagatgggaaggaggccaggaaagggtcagcttaaccatttcctatgtgccaagctgtgccagcagtccagggtaccctgactgtccctctgtagactgttgagactgagttcctgttgggacagtcagttggtatgtatccaagtccctgctgaccactaatgttctagctgatggtgagcggcacagtcccacttccccatctccccaagtaggtggtgttagaaaaccttaattttttttcccttttgtatggactacaaataaaacttggggcaatttgcagtttggaaacctg

SEQ ID NO: 26927 - DNA, 1426 bp, Homo sapiens
  source 1..1426: mol_type = unassigned DNA
agccattcctgaggaggactgccggtcgttcggacgtcttgcctgtcgctggaggagaggtccgggctctccaggaaggtggctgcggcgacaaaatgaagatattcgtgggcaacgtcgacggggcggatacgactccggaggagctggcagccctctttgcgccctacggcacggtcatgagctgcgccgtcatgaaacagttcgccttcgtgcacatgcgcgagaacgcgggcgcgctgcgcgccatcgaagccctgcacggccacgagctgcggccggggcgcgcgctcgtggtggagatgtcgcgcccaaggcctcttaatacttggaagattttcgtgggcaatgtgtcggctgcatgcacgagccaggaactgcgcagcctcttcgagcgccgcggacgcgtcatcgagtgtgacgtggtgaaagactacgcgtttgttcacatggagaaggaagcagatgccaaagccgcaatcgcgcagctcaacggcaaagaagtgaagggcaagcgcatcaacgtggaactctccaccaagggtatggttccgaccggcgtttagccgagctctctgattaccgccgtttatcagagtcgcagctttcgttccgccgctcgccgacaaagtcctcgctggattaccgtcgcctgcccgatgcccattccgattacgcacgctattcgggctcctataatgattacctgcgggcggctcagatgcactctggctaccagcgccgcatgtagggccatcctgggatggggcaccacagggagggagggagaaaagaggtgggtagggttacagatccaggttataactactctggcccatacctttcctggttgtggtttttcatgccctctaccatgtgggccttccccaggagatgatcctgttaagtgttcggcagtaacctactttgttccttcgcctcagcagcaaatcttgctactggctctagatctgcggtttcccctctaccctgcctcccgtctccccagaatgggaatttcttttatgtttttatttttttcctggctcccttttatttttgtgcgcgatatttaaggtcgtctggatggggaagcaacctgcagctgaggtcgccggcgcctttttctttttagatgggaaggaggccaggaaagggtcagcttaaccatttcctatgtgccaagctgtgccagcagtccagggtaccctgactgtccctctgtagactgttgagactgagttcctgttgggacagtcagttggtatgtatccaagtccctgctgaccactaatgttctagctgatggtgagcggcacagtcccacttccccatctccccaagtaggtggtgttagaaaaccttaattttttttcccttttgtatggactacaaataaaacttggggcaatttgcagtttggaaa

SEQ ID NO: 26928 - DNA, 372 bp, Homo sapiens
  source 1..372: mol_type = unassigned DNA
gacaaaatgaagatattcgtgggcaacgtcgacggggcggatacgactccggaggagctggcagccctctttgcgccctacggcacggtcatgagctgcgccgtcatgaaacagttcgccttcgtgcacatgcgcgagaacgcgggcgcgctgcgcgccatcgaagccctgcacggccacgagctgcggccggggcgcgcgctcgtggtggagatgtcgcgcccaaggcctcttaatacttggaagattttcgtgggcaatgtgtcggctgcatgcacgagccaggaactgcgcagcctcttcgagcgccgcggacgcgtcatcgagtgtgacgtggtgaaaggtatggttccgaccggcgtttagccgagc

SEQ ID NO: 26929 - DNA, 4244 bp, Homo sapiens
  source 1..4244: mol_type = unassigned DNA
gcgcgcggggggcggggctccccccggctgttcactcagctaccacagcgacgtaaaatggtgtccgctaggcgtcccaggacggcttcctgagggactggagggccccgacagccggaaagcctgccccgccccttggccggcacaggtacgacggcggggagctcagaagtttcgaactccaagggccgaagcacagccaaacaccccacggaacttaacaaatgtttgtggggagaacgccgaaaacgcggggaggcggggctggcgcacagtcaccctctcgcgacatctaagtgacgtcgcacagcaagcacgtgttctagtctttcaccttcagtcagcctcctccgttatacaggcctacccctttaagcgagtgatggacagttatttcagcctatcaacttccttgccgacatccaatcagatttaaacttcttttagccgccggaggagttggaaaaagggggtcgaaagagggagcttaccgtctctcgcgatatcgctgtgagcctgcctctctggaaaaaacgccgaaactgatggcccgacctcccaaatagtggtttaaaggacgggtttataagccaatgaaagggataaggaggtgggttgctgctgtcactgagcaagaagtaccgttacagggcagactttttgtccaatcaacacctcaacactttgggtcacgtgaccgcagagtgcgaggggcggagctacagtctggcgcgaggaaccgttaagatagacaacaaatgtaaccaatgaggtactccgactagggggttgggaacccaataacagtggttgggcgggcgccttcctggagcgcggggagatgtaaagatagacaaataattttcccaatgagactgtagaagagagagcaattggccaatgaggactgcggggcgggaccctgtgccgcggcggagtccaagatggcggcgtgcggttccgctgtgtgaaacgagcgcggggcggcgggttactcagctccgcggagacgacctccgacgacccgcaacaatgaagggaaaagagcgctcgccagtgaaggccaaacgctcccgtggtggtgaggactcgacttcccgcggtgagcggagcaagaagttagggggctctggtggcagcaatgggagcagcagcggaaagaccgatagcggcggtgggtcgcggcggagtctccacctggacaagtccagcagtcgaggtggcagccgcgagtatgataccggtgggggcagctccagtagccgcttgcatagttatagctccccgagcaccaaaaattcttcgggcgggggcgaatcgcgcagcagctcccggggtggaggcggggagtcacgttcctctggggccgcctcctcagctcccggcggcggggacggcgcggaatacaagactctgaagataagcgagttggggtcccagcttagtgacgaagcggtggaggacggcctgtttcatgagttcaaacgcttcggtgatgtaagtgtgaaaatcagtcatctgtcgggttctggcagcggggatgagcgggtagcctttgtgaacttccggcggccagaggacgcgcgggcggccaagcatgccagaggccgcctggtgctctatgaccggcctctgaagatagaagctgtgtatgtgagccggcgccgcagccgctcccctttagacaaagatacttatcctccatcagccagtgtggtcggggcctctgtaggtggtcaccggcacccccctggaggtggtggaggccagagatcactttcccctggtggcgctgctttgggatacagagactaccggctgcagcagttggctcttggccgcctgccccctccacctccgccaccattgcctcgagacctggagagagaaagagactacccgttctatgagagagtgcgccctgcatacagtcttgagccaagggtgggagctggagcaggtgctgctcctttcagagaagtggatgagatttcacccgaggatgatcagcgagctaaccggacgctcttcttgggcaacctagacatcactgtaacggagagtgatttaagaagggcgtttgatcgctttggagtcatcacagaagtagatatcaagaggccttctcgcggccagactagtacttacggctttctcaaatttgagaacttagatatgtctcaccgggccaaattagcaatgtctggcaaaattataattcggaatcctatcaaaattggttatggtaaagctacacccaccacccgcctctgggtgggaggcctgggaccttgggttcctcttgctgccctggcacgagaatttgatcgatttggcaccatacgcaccatagactaccgaaaaggtgatagttgggcatatatccagtatgaaagcctggatgcagcgcatgctgcctggacccatatgcggggcttcccacttggtggcccagatcgacgccttagagtagactttgccgacaccgaacatcgttaccagcagcagtatctgcagcctctgcccttgactcattatgagctggtgacagatgcttttggacatcgggcaccagaccctttgaggggtgctcgggataggacaccacccttactatacagagatcgtgatagggacctttatcctgactctgattgggtgccacccccacccccagtccgagaacgcagcactcggactgcagctacttctgtgcctgcttacgagccactggatagcctagatcgcaggcgggatggttggtccttggaccgggacagaggtgatcgagatctgcccagcagcagagaccagcctaggaagcgaaggctgcctgaggagagtggaggacgtcatctggataggtctcctgagagtgaccgcccacgaaaacgtcactgcgctccttctcctgaccgcagtccagaattgagcagtagccgggatcgttacaacagcgacaatgatcgatcttcccgtcttctcttggaaaggccctctccaatcagagacagacgaggtagtttggagaagagccagggtgacaagcgagaccgtaaaaactctgcatcagctgaacgagataggaagcaccggacaactgctcccactgagggaaaaagccctctgaaaaaagaagaccgctctgatgggagtgcacctagcaccagcactgcttcctccaagctgaagtccccgtcccagaaacaggatggggggacagcccctgtggcatcagcctctcccaaactctgtttggcctggcagggcatgcttctactgaagaacagcaactttccttccaacatgcatctgttgcagggtgacctccaagtggctagtagtcttcttgtggagggttcaactggaggcaaagtggcccagctcaagatcactcagcgtctccgtttggaccagcccaagttggatgaagtaactcgacgcatcaaagtagcagggcccaatggttatgccattcttttggctgtgcctggaagttctgacagccggtcctcctcttcctcagctgcatcagacactgccacttctactcagaggccacttaggaaccttgtgtcctatttaaagcaaaagcaggcagccggggtgatcagcctccctgtggggggcaacaaagacaaggaaaacaccggggtccttcatgccttcccaccttgtgagttctcccagcagttcctggattcccctgccaaggcactggccaaatctgaagaagattacctggtcatgatcattgtccgtgggtttggttttcagataggagttaggtatgagaacaagaagagagaaaacttggcgctgaccctgttatagtggttatagtggtgtccctaaagggaggaaatgatttcagcaaaactggttgaacagcggatgaagatatggaattcaaagctctaatggacctttttgaagagaagttgtggcttatgtggagtttacatgggcctctgatggaagaaagctaatctgtttagtatttgtgcattttactaaaatggcagcttaaagttgtgtatctgctattgtgatgccaatgccggtgttttaagtggaaaaaaaatgacctctttgatttgtgctgtgtacacaagatttctggaaaagtaaagaaaaaccctttttatggctcacacagcttaagagtagctgtctctcaaacgtgcgctcacagttgagctgcttttgttttattctaaataaattgtttcttttgaggaaaa
